United States Patent Application Publication US 2020/0157537 A1 - sequence listing, part 5

SEQ ID NO: 9134 - DNA, 1147 bp, Homo sapiens
attgcccaggctggcctcgaactcctgagctcaagagattctcctgcctggaaataacctcttttatacttaaagcaaagctgaaagcaagagttcctagcccaagatggctagcagaaaggaagcagcagctgtgcagttggggcggggcccaattccttccctggccgccagggggagtctacccacagctgactctgctcaccttaagcgcgccacttggcgcaggcgctgaggcgccagacgtccctgcgtctctggttgggacgtcctgaaagagagtcgtcacatcctcctcaggactctatggttccggcctcaggactctatggttcccgcgagggacgaggggcaacgtatataaatgcgcgcaggcgtagttaagagagcgcattttgacttcgaggcaccgccgacgttactgtgtcgccatggggcgccgtccagctcgctgttaccggtattgtaagaacaagccgtacccaaaatctcgtttctgccgaggggttcctgatgccaagatccgcatctttgacctgggtagaaagaaggcaaaagtggatgagttcccactcggtggccacatggtgtctgatgaatatgagcagctgtcttctgaagccctggaggccgcccgtatttgtgccaacaaatacatggtgaaaagttgtggcagagatggctttcacatgcgagtgcggctccatcccttccatgtcatccgcatcaacaagatgttgtcctgtgctggggctgacaggctccagacaggtatgcgaggtgcctttggaaaaccccagggtactgtagcccgggtccacattggtcaagtcatcatgtccatccgcaccaagcttcagaacgaggagcatgtgattgaagccttgcgcagggccaagttcaagttccctggacgccagaagattcatatctccaagaagtggggcttcacgaagtttaatgctgacgaatttgaagacatggtggccaagaagtgcctcatccctgatggttgtggagtcaagtacgttcccagtcatggccccttggacaagtggcgggttctgcactcatgaaggttttggcagtactgtctccttgggccatgctggtctgacttatgcttactaataaattctgtttactg

SEQ ID NO: 9135 - DNA, 1252 bp, Homo sapiens
tgctctgggttgcaatcctcaaacttgccccaaataaacattctacttatatgaattgtgcctcagttcttttttttttttgagacgtaattccgctgttgttgcccaggctggagtgcaatggtgcgatctcggctcacggcaacctccgcccctccccaccccgcccaagcgattctccttacaggtatgcaccaccaccacgccaggctaattttgtatttttagtagagacggggtttctccatgttggtcaggctggtctcgaactccggacctcaggtgatccgcccttctcggcctcccaaagtgctgggattacaagcatgagccaccgtgctcggccttgcctcagttctttaggtcgacaaattagtcctccagtaatttaaacgaagtgtttcaaaaaggtatgtacttgtatgtgcgtttattcatatggaaaaagagtacgtggtggatttatatattactcatttatgtgtacggttttcctgtatatacttgtatagcactttcacttttcggaatgtttaacgtctgctatcttattttaaatattttactacagttttcatcatatagacaaaacagccctgctgcaaagatggtcaacgtacctaaaacccgaagaaccttctgtaagaagtgtggcaagcatcagcctcacaaagtgacacagtataagaagggcaaggattctttgtatgcccagggaaggaggcgctatgatcggaagcagagtggctatggtgggcagacaaagccaattttccggaagaaggctaagaccacaaagaagattgtgctaaggctggaatgtgttgagcctaactgcagatccaagaggatgctggccattaagagatgcaagcattttgaactgggaggagataagaagagaaagggccaagtgatccagttctaaactttgggatatttttcttcaattttgaagagaaaatggtgaagccatagaaaagttacccgagggaaaataaatacagtgatattcttacgcaaactttttgtggtttttacttataaatagaattccatgtttagtgtagtcccacctcaaactttactaacaagtttatatatgtatgaagggaaaatactactttactactttttgttttctggtcaatttcaaatgttgaatgaattcataaacattgagcagcttagaaggatctttaagattttgcaagagaaggaacaagataacgctaggcttgtgtatagcagg

SEQ ID NO: 9136 - DNA, 1920 bp, Homo sapiens
aggggttgcgaaaaagggaaaaaaaaaaaaaacaaaagcgaacagagcttccctgggacgttcagggagcgcggagggtgcgggaaggctggggcgggcggagggaattcgcagagcatctggcgggcaccgaggtctgggaacaggcctggaggcagctcggttcgtggagagagcgggctgcccgtgggccccaccctgtagggccccccagtagatctgctcccttggttcgggtgggcaggggagggcagagcgcaaaagagaaaagcagggaaggagacgctagaagagccacgggtaggcgcgagtcagagtccgaggttcgagggctctgggccggccgcatctgcgagccctccgaggcgccgtagccccgcccctccggcgcgtggcgcccatgacgctaggcgcgcgggccgctctccttacagaggtcgctcttgtccgaacggtcggcctctgctgcgcctgcgtggtcgggaggggaagtgaggcggtttcctcggcgccttttccggcagcggcggcggcagaactgggaggaggagttggaggccggagggagcccgcgctcggggcggcggctggaggtaaccccttgggccgagctggaaaggcgggccacctcggtcttcgctcctttgtggagctctggcagtaactcccctccctctctgtttctctgcaggcagcgcaccgagttcccgcgaggatccatgacctgacggggccccggagccgcgctgcctctcgggtgtcctgggtcggtggggagcccagtgctcgcaggccggcgggcgggccggagggctgcagtctccctcgcggtgagaggaaggcggaggagcgggaaccgcggcggcgctcgcgcggcgcctgcggggggaagggcagttccgggccgggccgcgcctcagcagggcggcggctcccagcgcagtctcagggcccgggtggcggcggcgactggagaaatcaagttgtgcggtcggtgatgcccgagtgagcggggggcctgggcctctgcccttaggaggcaactcccacgcaggccgcaaaggcgctctcgcggccgagaggcttcgtttcggtttcgcggcggcggcggcgttgttggctgaggggacccgggacacctgaatgcccccggccccggctcctccgacgcgatggggaaggtgctatccaaaatcttcgggaacaaggaaatgcggatcctcatgttgggcctggacgcggccggcaagacaacaatcctgtacaagttgaagctgggccagtcggtgaccaccattcccactgtgggtttcaacgtggagacggtgacttacaaaaatgtcaagttcaacgtatgggatgtgggcggccaggacaagatccggccgctctggcggcattactacactgggacccaaggtctcatcttcgtagtggactgcgccgaccgcgaccgcatcgatgaggctcgccaggagctgcaccgcattatcaatgaccgggagatgagggacgccataatcctcatcttcgccaacaagcaggacctgcccgatgccatgaaaccccacgagatccaggagaaactgggcctgacccggattcgggacaggaactggtatgtgcagccctcctgtgccacctcaggggacggactctatgaggggctcacatggttaacctctaactacaaatcttaatgagcattctccacccatcccctggaaggagagaaatcaaaaacccattcataggattatcgccaccatcacctctttcaattgccactttctcttcttttgaatttgaactctggagttactgttctacagtttggcggggacggggcttgggggttttctcttttgtttgtttccctttctttttccttttttttttttttttttttttgttggcttt

SEQ ID NO: 9137 - DNA, 2726 bp, Homo sapiens
tccccccccttccttatgagttctaacttagtaatttcaaatgtgaccttttatatctaagaccagtatagtaaacttagcccacagtggcaaataatgagtaatattgtaatatgttccagttgcacctcagtatgttaaacaggtaatgtaagaagttctctgaaatgtcagcaagtaagttctgaaacacatcatgcatgagtaggaataaaacccaagttccccataacgtagataacttaatgctgcataaaaatatgaaagtgtaacccatgaaggacactttttctttccactgcaaagttagccactttgctgtttttcctcttttttaaactttgaaaatagactctttccagaaattggagcaataatggtgttaccacacacagattaaataatttgtagatattttaagtgacttttgggcaaaactggaatgtatacttttaccttgtttcaaacacctaagaccagtaatttaaaaattactaaaaggtttactttgttcattaataaaacatttaacaattcaaattatatgcaccttttacctagttgaaaaaaatacacattcctgttttcacattatagcaactgattaagctgaagctgtaagtcattttttatagatgagtgatccgcatctccatcaattagaacactggaaaagatgttttataaaagaggtatttaattttgtttgtaggattaactcatgcaaataataaaaaagatatcctgttggttcaatagtacactgtctcctttaaggaaggaagcgtgatgaatgaatgatgtgtagacttgagggatgactattaaaggggacgtaggatgaagagaaagaacctacagatgacaatgaatgtaaacttatttttcttcatgtgtaagcagtgtgctcgctggtgatatccagatcctaacaagattacttggttagctggttaggaccagtaactggattgcgaccactatgataatattttgaaccaaatgttaatgcttgatgcagaattgtaaagcagcatctggttcctatatagccttaaggattaattttagtgatcctcaaggaattaaatagggaatttcagaaatgtagactgcaaaggcagtatacaggaaaaggtggagtgggttttgtttatgagggtgtctgaaaactaaaattgagcgggatatcatggtatagttggacagtattggtccttcacactttggccatattgtataatggagcttttaccaaagatgtatgagaagtgtaagactataaaaaaatgaactattcaaagtaaaactcttaacaaacattttacttaaagcagatgcaaaagggtattctcatgtaggctcctgttggtgcagagggatttttttgatttcaggatacaactaaagtacgaagttctcagtttcactttagtagaaagagctctagaaatgaggctgataaacacatctaagaacactggttgctttctaaaatttccaaagctccaccataaatgtaatttttagtgtttcaaatgattgcattttaaagtatataaatatgggttatccaatatcaatgctatagtaacatcctgaaacaaaacaagcacaaaggtataaatgcctaaactggaggaaacttgaaaccctcatgttaaatcttaaatgtagtatttctaacttgtgaagacagattggtaggcagccatttttttgtgtcttaaaataactgggggcatagttaaaattttatacatcaagtgattgctattattgaatgttgcaggtgagatgtggttatttttagtttatttgaaatgtttgactggaaaggggggagggggaagcaaatatttgaaatttggaaaaccctaaaccttttggtaagaaattgtaattttcacttaaaattttctttaaggatataagaggtttataattgatgtagttaaattgaacaataaccattggtgactggagcaggtaattatagcctgcagaaaaaattatctaagaattttaaaaataagatcctgaagttgtttaattgcatccatttctgtatttatgtgaatttataaactgcagtaagttttgaatgaggttaatcttgtttaatataagtaaatgagtctgtagactgtgatctccccaaactaaaaagtacagtacttggaattgtgttctttatggttgtagtgttggtaaagcactaatatgcagaaaataaaggaattacacagtgcagtttctcacgttatgttactcgcttgaactagataagtgggacgtgtggtgtgtcgggccatgttattctccagggtatatggtaaaaagtgacttaatttggaagttgcctgacttttgtaagaaaaaaaaatcaatttggttcttgtaaatgctggctgtttgaggtaatgcgccctgttttagttccaccaacttaatctgattgtatgataatttagaataccacagttaaacaatttttaaaatttgaggtcccatagcagtctttattctgctgttttttccaaattacaaccttagcatttttagaagtagagaattgtgtctaaagaattggccttaagtcttaaattcaggccttaattctttatagacttttggatttcaaagtttcttttagaggtcaaattgtttgtcctatcgaaatggcaaaactgtattcatttagaaagtaaaatagtatcatagag

SEQ ID NO: 9138 - DNA, 1477 bp, Homo sapiens
gtttctatcttaattataatatttgtaggaaataacaaaacaaactcaaagcctttattatttccagtctctttgtaactgatgtggtatggtatcatcatgaaatctaaacagtggtacactgagtggttgtcctgttcttcaatctctgtggctgagaactgaaataacttagaagagacagatttttatgagagcagttttagaatcctgacactgatgtatagaactccaatttaaaaaagttatttatctattatatctctgatctttagtcacactaaggctctcaaaatgttggccaagattggtaatgattcatacgtacttgatttttcagggctcctataaacttgtatagggatatttttccatttttgataaatatctaactttgaggcattcacttttgtaaaccgcgaaagtgccttacattcacctcatgagtattttaagttgatgcccagtgctgtggtatatcctgtatatatgtgttttgtggtatctatcgaaattattcttataatttagaaagttagaaaatagaaattgtaaatgaaaatgtggcgacctgactgcagaactttgagtactgaaccacatttaggtgaggcattttcatccattctctctgatttgctctctcaggattcatcttctactgtgtatgtcttctttcctcttagctctccaaagctgtatgatggatgggtgagaaggatgtgcattttggttgataggaaaaatgtttctgttttcttccttttcccctcacttcaagcattgatgattacattgattgagctacctcatccattaatttgaaaggctacacttcatcagctcatgtttaagaagtagcacatcccaggtaaacagagtaggccattattcaactcttaggatgagtatattaaaagcattcagatatcaatgacagaagaaacaagccctaatgtttctttataacagctgattcctgcaagaaatgcaaacacaggatatttttctgttccattacaagattactaagagatggaaaatattatcattctgtattttgtcagtagtacgattgcatacatactaagttgtaaacattgaattacaaaaaatgattgtcctaattgaagcagtcctcaatccatttgagtctgtacaataccctgaaaaggaaacaacaggtgctggagaggatgtggagaaataggaacacttttacactgttggtgggactgtaaactagttcaaccattgtggaagtcagtgtggcgattcctcagggatctggaactagaaataccatttgacccagccatcccattactgggtatatacccaagggactataaatcatgctgctataaagacacatgcacacgtatgtttattgtggcactattcacaatagtaaagacttggaaccaacccaaatgtccaacaacgatagactggattaagaaaatgtggcacatat

SEQ ID NO: 9139 - DNA, 1866 bp, Homo sapiens
aaacattaggaccaaaagtactagattgttcatctcttacattacttgaagcttcaaagcttcatcttttagtagaaactctagtatctaagaattttcccagcttttgcccttttggggttgagattcacatttcatgtttcacatgcaaagaatatctacatcattataaatatatattttatttagaatgattcagctagaaatattgatgtaacccaaagtctgtgttacttcctggcatgaatttcatctctaaggctactgctctaaaagtaattttgaaggcatagggtgatatagattcattttctacataattttctttctttaagtcagtaaattgaatttatttttaatgctcttggccaaattgaagtgacttttttctttatttgcagaaacctcaaatatttgttgttaagtgatcttcctggagtaagagaaaaagaaaatcttgtccaagcctttaagacagcactgccttctctggaactaaaattacaattgaagtaaaataatgtgtcttatttcagtataaaggatcatttgaaactgttgattccaaacatcaactaatattatatagtcatcagtagaattataaggatgccatatcatgacattttagaagtggagagtgcatcatatgtagaaaataaatattcagacgtggctcattaatgttactaagttggaagtgagaatttatgaacattaattcattttaagaaaagtgcagccaggcgcagtggctcatgcctgtaatcctagcactttgggaggccaaagcgggcagatcacctgaggtcaggagttcaagaccaaccatggccaacatggtgaaaccccatctctactaaaaaaacaaaattagctgaatgtggtggtgcacgcctttaatcccagctactctggaggctgaggcaggagaatcacttgacttgggaggtggaggttgcagggacccgagattgtgccactgcactccagcctgggtgacagagcgagactgtctcaaaaaaaaaaaaaaaagaaaaatgtaaactaggtaacattttaattctaatatattcatttaatatgtaaatctatagatatctcttgatgtagatatttagaatcctttaaagttatttgtacaacagatgtttttattataacagtaatttacatttaactttaaagttagtgaagcatactaccataaatgcacaattatgaaaaattagaagctaaattacagattcattgatggagtcaattatgcaaagtggtcagtggttgttgaagcatgcattgcttcaacaggatttgcgtgcatttcccatgatcctgcattcttgtgttcttgatagcatacagacttactcagaatcaacagttgctgcttaatttgtctattttgtaagcttaggctactattttattaaaactggacatagatacttggctgaatacaaatagttttgcagattgcaatataataaaggaaacagtaaaaactagtgggctatgcttaggtttttcttgaaacctaacattgctttaggctgggtgccgtggctcgtgcctgtaatcccagtgctttgggaggctgaggtgggaggatcacttgagaccaggagtttgagaccaatttgggcaacacagtgagaccccatctctaaaaaaattttaaaaattaggcaggcatggtggtgcatacctgtaatctcagatacttgggaggttgaggtggtaggattgcttgagctcaggagtttgaggctgcagtaagctatgatcacggccactgcacaccagcctggtagcctgggtgaaagggggagaccctgtctcttaaaaaaaagggctggcctgtaa

SEQ ID NO: 9140 - DNA, 1704 bp, Homo sapiens
gctggaaacagctagtctatctcttgccactgtgtggtggttatatcaagtttgcttaataaaagctatgagacaaatagtcctctagttccaggaaacacagtctttttttaaaaaaaacaatgtttgtaacaagggtgccatggtatttttagataactcgtgattatcttaagagaggtaaatttagtgatcattttatatcatgtcttattccttcttaatgaacataatttgttaaattctcaagcaaggttttcacttttatattggccattctgtatgtttttgtaaaacagaatatttaatccttatttattaatctcttgctggagtggtgtaatgtatctaacttttagcaaaggagggttgcagagcagcttaaattttttttataatgtataagaattttgtttatcttttaagagtagtaaagtactttgagtgtttgggggttcaacacacacatgcaattttgcttaacaaaagtattttataatacagtttcatacagaattaccttaaaagggagtcttatgttttcaactacagatagttgtaagggatcatacagaagatattgatgatagttgaaatattcttagaaggggtgtgtatgtctagctgtgtctaccatgtgtatgtattcttgacaagcagtataaaatacctgtgatttttctttacattagggataatgcataaggaattaatcttcatatatattatcatccctaatgtagcagggggaagtatttaattgcccatgatatgtattttacttatactatgccagagaggaaactataaagtaattacacatgtaatcttgggtttttcacatatgtaggtattcattttgagtaggttgaagaagaaaaaaaatatttaaatgaattgaattcctgatgggatagtatcaataagtatttaaaagccagtattctaaaaataataaagggtagggtcatttttgagtttgtttttcttttgctattgttaatattcaaaattaaagtgttacattggtacctgttgtcttaatgcatttattgagaacagcattgagatgatgaacaaggggttagcaatagcaaactctataattattttgactaattacttaagaggaaaacagtataagtatctcattcagtatttagcaattctgtaaaataagtattatctctatttttcagatgaggaagtaagggtttagcaaggttaagagatctatccaatttacacagcaagttagtagttgagcctgaccatgagtcttctgactctgttcttttcactatgcaatacgcaaacaataaaatgttatacaaatggaatataaagttatttattctttaaaaatgcacatatgatatgatttcagtaagtgtgtggctgtttattttggctatgttaagaatacgggatacagtagatgacaggggaaccatcctcaaaacaggggacatttacatgatggataagaaagccagaatcctccttttcttactgaatcctggcagccagatctttaccatcccatggtggaataccgaagagtcttctctgtgaaatctgaccaatgcaagtgaaaaggcctcattaagatcttgatgtcagacatgtcccggctaaactgcccagctagatgacactacagtgaaaatcatagttggcaatcccaccatcccacgcattatg

SEQ ID NO: 9141 - DNA, 2334 bp, Homo sapiens
ataataggcgccaccactgtgcccagttatttttaattaaaacttatggtttgtttagttataaataaagttgacattttaaaaaacagactagtttcttgctagaaatacatgtttatgtatgtgttgtgaacatatatatgattgtgttttaaaacagatatgaccacattctgaagtgggaactcttccagctggctgacctggatacataccagggaatgctaaagttgctcttcatgaaagaattggagcagattgttaaaatgtatgaagcatacagacaagcccttcttacagagttggaaaaccgaaagcagagacagcagtggtatgcccaacaacatggaaaaaatttttgagctgattttttaaaaatttaagttttgtaagagctttaaaatattttcacagataaaaaattgcaaacaagtactctggttaataaatgctgcttcctttgtggaaattataaaattctaactttacatgtattttgttattagaaattttcttttattgaatgagaaaaattagtctatcattttaagagccaatatggcaaacactttcaaatactgtatattaggaaactgttttggtattcttgatggaaaaaaacgcagcggaaatgtcattatgaacagatgttaaataggaaattattacttgttaacttcttacagcagtagtaccttctttaaaaaaaaaaaagaatctgcggtatttttttaaaaaaaaagtttaccgctgtagtgtgaaatattgtctggaaagggatggtttaaatattaccatgatgtagttgaaatataaaataggatttggaaccttattgtgataaatatttatatatgatgtatgtttgtctcccctctccaaagtaaggaacccagctgggcgtggtggctcactcctgtaatcccagcattttgggaggccgaggtgggtggaccgcttgagtccacgagtttaagaccagcctgggcaacatggtgaagccccatctctacaaaaaatacaaaaaaattagccgggtatgatggtgtgtgcctctagtcccagctacttgggaggctgaggtcagaggatggcttgagcccaagaggcagaggttgcagggtcaagatcgcaccacttgcactgcagcctgagagagagagagccagaccttgtctcaaaaaataaaaaataaaaaaataaaaacaaaataaggaatccttttaaagcatgttgagaaagtattttttggtatgaatgggtgacgggccttttaatctttcaggaatacatataagcaggaatacttagcctgtattgggaaggtgcgtgaaactcaaagttgctaacatcatcttccttattttcagccagtgctgttactgcatttagcatggctctgacgaggcagtggagagttcctgacagcatagcatactgccttctgacagactgggttaagctaccaaaaatgacaaccagggattcaaaaaaaatttttggtcattaaatcgaatgtatattattactttttaattttctaagtatttatcacaggactttaacaccatatatttccctcccagtttttctccccttttggtttaatagttaaaacatttttcataattagtgctgtacatttgattgcaaacaaattggtgatacttctaaactataactataaatctctagaattctgtgaatttcaacattatttgaagtagttcttcagttatatttacatgtgttgtaaatatgtaaatatacttttagcttaggaagtcttccagaatacaaactactcccagttagatatcagtgagtttgaataactgaagaaatgttgacaatgttaagtgtttgattttatataacaagcttattaaatatatttttgtggaaactaagcgcgtggtttttgagtccatgttttagacatagtgctgtatttcatttttctgttcaaaaggccatagacaaaggaatcaatataattgaaaggggtaatgaaaaggggtattgaaaaatgaaagtgtggctagtggaattttatcactgggaaaagataatttgctgaacttgtgatcagacttttctaagatgtcagtatatatatcttatgaactcccacactcctctatcttaattgttctttcctgtcacttcttactttatatcgctacttaattatggtgtagccatttctgtgacagtctttagaagtttctctgttttggacctcctagataagtattacttttttcattaacacactttccttcttcctctaagaagtctgttcagtgaaactccactagagattttagtcat

SEQ ID NO: 9142 - DNA, 1143 bp, Homo sapiens
ctctgactcccatatgttctcttgagttggtaaaagttgaaaagttatctgcattggatagagatatttcaaacacaatactcactgctgcgtcactacatatcctaacccccattttcagcctacgggaggaaggaaacatcctttcttagaaactgtcaacctttctgatatgaatttacagctgatgactatttcttgtgggaatttactattctagttttaagcctttgtataaaggttaaaacttagttccagctttttcatatcctcctttgaacctgtttttgaaaagactaaataccagccagaagaaatatcttaaaaatacattacctttcaggtggtgtaagtcagtttggacagaaggcacactgaaaaatgcttaagtattatttgttctttataatttcttgtttagattttaagacctttatcctaaagaatgtcactcctttcttcttagtgtacctcggtatgatcaaccacctcctgtcacataccagccacagcaaactgaaagaaatcagtcccttctggtacctgcaaatccatatcatactgcagaaattcctgactggcttcaggtttacgcacgagcccctgtgaagtaagtacatttacaacacaaatttgtttgaggagtgagtgaagggctgaatggagtctctgggctgctcgatccaagtagtgtgccatattttactcttaataatattcggcttctaagtaatacgtgacttgaataaaggatgtcatagtttataatgtgtgaaaatcattaattagaaatattagttcttcagacatttatagaatcttcatttctttgtgtgcgggcctctgctattagggatacaagtaagaaacttacattctcataggagaagattaatttgtaaataagtgatacagtacttgtgataaaagtaaggacctgggcttggcacagtggctcacacctgtaatcccagcacttcgggaggctgaggcaggaggatctcttaagtccaggagttcgagaccagtctaggcaacataacgagagccccatttccacagaaaaattttaaaaattagccaggctttttgcatggtctgtagtcccaagtacttgggaggctgaggtgggaggatagcttg

SEQ ID NO: 9143 - DNA, 1104 bp, Homo sapiens
aggtgcttaatttctcattttatcccacttatgagattgggaaaaagatcaatatgagaaataccatacagataccttaaatgtatgcatttgtgcaacaatttttgagaaggtgagtggcaatttataatttagttggcaatttataatagaacttatagcttttaaaagaccttttaaagacattaaatgtaaacttaaaaatgtttagatcttgtttcaaactttacaatagcattcttcaaaatattaagttatatattttataggcatttagttgcttattaaaagcactgattttcaaactttttgatttaagaacaattatttaagatcgtctcagaagatgggatcttcgtttcaagaaaagggaatcaagtttgcctttgagataatacgttacactaagaaaaggaaaatgtggatagtaaaacccacctctctcatcctattgtactctcttctgctttttagaagcctgcacttaagcttagatttgtgaagggagagtagaaggggagaagtagaaccacagtgttttatttatttttctaaaactcttactaaatccagattttttaaactgttttaaatgtgaattcttcccagaaatttcaatgcattgcatatttagccttcggcatatttttcatgaatagatcatgaagtcataggcttccaaggcataggaagagatcttgcaggtctagtattttaataatgcactattacccagggcagatattatgagaaactgtttcttctctaagggtttatggcagactttgcttttttaacatgtgagaaatgaattttttattttgtgatttatgtgatttcttttgctgagtgaaggaaaggagaaattgttgctattgtcagcatcttaaaggtatttccagtcaaggcaaggctaagtgctttgtgatagtattaagcaagtcatgttttgaatggattacctgtagtgactcattggaatgatataattatacaagtaatgccaaaaaccaagtcaaagcctaattaaccaaagcactcatttaaaaatcatcatgtttggacctatctggacctctcagcactgtaaaatagttttggttt

SEQ ID NO: 9144 - DNA, 1117 bp, Homo sapiens
attcacaacattaatgctgattcattaatttcagttcagtttataaataggtgggtaattagaatgactttgataactaaaatggctcaaacaatttttatttttataatattcatggttttttttatcttatcttgaataactttccttttggacatccaaacatgataaatttatgccaaagcagttttggggcatatgagacattgtatcttgattttactctaaagcaaatctaatacatcaacaaaaatacatttttggtctttgtctttaagaaaaattattatcagaatctgcacaacctttgaaaaaagtggaggaggaacaagaggcggatgaagaagatgtttcagaagaagaagctgaaagtaaagaaggaacaaacaaagactttccacagaatgccataagacaacgctctctgggtccatcattggccacagataaatcctagttaaattttatagttatcttaatattatgattttgataaaaacagaagattgatcattttgtttggtttgaagtgaactgtgacttttttgaatattgcagggttcagtctagattgtcattaaattgaagagtctacattcagaacataaaagcactaggtatacaagtttgaaatatgatttaagcacagtatgatggtttaaatagttctctaatttttgaaaaatcgtgccaagcaataagatttatgtatatttgtttaataataacctatttcaagtctgagttttgaaaatttacatttcccaagtattgcattattgaggtatttaagaagattattttagagaaaaatatttctcatttgatataatttttctctgtttcactgtgtgaaaaaaagaagatatttcccataaatgggaagtttgcccattgtctcaagaaatgtgtatttcagtgacaatttcgtggtctttttagaggtatattccaaaatttccttgtatttttaggttatgcaactaataaaaactaccttacattaattaattacagttttctacacatggtaatacaggatatgctactgatttaggaagtttttaagttcatggtattctcttgattccaacaaagtttgattttctcttgtatt

SEQ ID NO: 9145 - DNA, 1132 bp, Homo sapiens
aatagatgtagggtacagtggaacataagcagtgttacccctggctgggagtcagtattatacaacaaatggtgagctggaacatgccctgtctgtgctgtccctcctgtgctgggtcgcggatgtgtaggcaacattgccttatcacgctaggttcacctgacactttaaaaggaaaaaaagttccatagagttctgtggtcacaaaattgttttgcttttatcaaatactttaatagaaccaaagttgcagatattggaatgtatggaagtatctcagtctctgcataagaggattaaagtatgaaaggatcatttaatgactgttttacttataagtcattaagtaatccaccatttcttatggatgatgcttaagcctggtgaggtttgtactctaaggagcccagatcataatgcagtgcatttccttagcccttagagtttcttgcaaacatttaaaaaaagacatatttaagaaagaaagataaagaaaaaacatatttaattactgtaaacaggtactgctttatgtttattttctctctacttcaaccaaaatcagatctttgaggttttgctgacattgttggtggttttgcacatgttctttctaattggatttatgaatagttctatgggttttcaaagatgaatcatgctaagaacacttctgctttttgatccactgtttgcagcagaattatatatatgtataggaaaaatccactttgaataatccatgttttgtatttggaaattgtttttaaaaataaaaaggaaaggaaatatataaagctgttatttattctgcatttcttacatatctatcgcttgtcagtatacccgttttggtatatattgcctctgcacatctacatttgtatatgcaacagtgagctttatatctacataaactgtaaataatcctttctgtgaaaggatcatcatatcaagatgataccaaaagtatgtaaaaagaaacctgcattattttgtaattatttcttatagatatttcatggtaagattagcagtcaataaagttacttttttgcctttaaattgcctttttgattattagagctctcaagcgagaagcattaaggagtgacagtgttttcttcatgtt

SEQ ID NO: 9146 - DNA, 1161 bp, Homo sapiens
aaatgttaatgaaaagatatttgtgtcacatagtccagtaattgctttagcttaatcaaaaagatagttacattgtctttttacattttctatagcaaaaattaagcttgattgaatgaattgttttatgcttatacaggttaagcatccctaatccgagaatctgaaatcctaaatgctccaaaatccaaaactttttgagcactgacatgaggacacaagtagaaatttccacacataagcacttaacacaaactttatttcatgcacaaaattattaaaaatattatatgaaattaccttcaggctatgtgtataagttgtacattgaacataaaaatgaattttgtgtttagacttcagtcccatccccaaaatatcccattttatatatgcagataatccgaagtctgaaaaaatttaaaattggaaattattggcatttccagtaagggaaactcaacctgtaatcattttggctcagttaaatttggtaaatagcagtagtcattttaccttgagttgcagttgtacaaattatatttttgcctgtttttatagctgaaaaatacaaggatttagtacctgataattcaaaaactgctgacaatgcaactaaaaatgcagaaccattgatcaatttggatggtgagtatataaatgcataacattgaacatcaacatttttggttttttaaatgtttttttctttgaagaatgaagtccaggtttacttggttttagtaaatttagaaggatccatgcagacagcatttatgttaacattttattctctataatgtttttatgatgtgctttctccttccccttgcatttgaatatctgaatgttgatttgatttgcttctagtaatttggagttttgatttgtatttaatcatgggggtcattgtttgcctttttgaatgtgtaaatttcttttaatccaatgactctatcagacaagtggtaaaattttccattattttaagtcctggatatcttttagtaatttccctttttaaaaatatgaagaatctaattacctaaattatgatgtgtaaaatatttgttcactggctaattcattgtgacctataatttaggagttaacccttttgaatgagtgagcctcttggacactccagagctgctgcttaga

SEQ ID NO: 9147 - DNA, 1934 bp, Homo sapiens
aatcgaatggtattgctcacatatagcttaaaaagtagcaaagctattggataatgtctcaaaagggagcatattaatctaaatatgttctttagagaataagactacccttgataccatgagctatattacagggcttaagttggcttttgacactgtggacatattgtctgagggaccgaaaaatactatttagactagttctcaaatgaggaactgtggaacattaaagtctaagccctttacaccatgccctacaactctgatttgatagctcatcatgtgattctaacatgcagctagagatgagcaatggatttagagcaatggtcttcaaacttcagtatggctttagcaccagccctgggacagagaaggctgccagaaattttcctctattgcaactgattttctgtggctgactgacttctttatctagtaaatgactgtccctgaattcactcttcctttctgttaccagggatggtgttgtatcagtaaataaacatagtggccagtttactgatgagtatctcccagaacaacgatctcacctctacgggataactgcagtctacccctactgcccaacaggtaaaaagtatgctttaggatgctcctttaaattagcagggtagagaagggatatatatggtatttgattacccctgctgcctgtgacactgccaccattgccttcttcctgccctgagggccagtctttactaccttaaatctacctagtttatacacaaaatgcaaagacttgctgttgcaacttggttacaatatactcacccaccaccctgtcccacccctgctcttctctcacaggaagaaagtaagtacagtaatgtaaaggaagacttggagtttacaatcagaacctggaccctaaagaacagtgactgcaaaggcaaagaaagtaaaaaaggaattggccattagacgttcctgagcatccaagatgaacattttgtagtgcaaaaagacttttgtgaaaagctgatacctcaatctttactactgtatttttaaaaatgaaggttgttattgcaagtttaaaaaggtaacagaattttaactgttgcttattaaagcaacttcttgtaaacatttatcattaatatttaaaagatcaaattcattcaactaagaattagagtttaagactctaaacctgatttttgccatggattccttctggccaagaaattaaagcacatgtgatcaatataacaatataatcctaaaccttgacagttggagaagccaatgcagaactgatgggaaaggaccaattatttatagtttcccaacaaaagttctaagattttttacctctgcatcagtgcatttctatttatatcaaaaggtgctaaaatgattcaatttgcattttctgatcctgtagtgcctctatagaagtacccacagaaagtaaagtatcacatttataaataccaaagatgtaacaattttaaaattttctagattactccaataaagtgttttaagttttcctatgacttaaggatctatattgtctctaggacaaagctgggggttggcatatatgccttaaccacaaaggagaaaggtgatttatgcaaacatacagtacataataaaaattctactttcctaaactttattaaagaaaaaagcaataagcaatggtggtaaatctctagaacatacccaattttctgggcttcctcccccgagaatgtgacattttgatttccaaacatgccagaagtgtatggttcccaactgtactaagtaggtgagaagctgaagtcctcaagtgttcatcttccaacttttcccagtctgtggtctgtctttggatcagcaataattgcctgaacagctactatggcttcgttgatttttgtctgtagctctctgagctcctctatgtgcagcaa

SEQ ID NO: 9148 - DNA, 1835 bp, Homo sapiens
aaattttattaaggctctgggaaaagtgctgatgacattgggaaaagattcagtttttacccagtaaaatattaaaaacttattttgcttaaggccatgtcctctaattactgaaggggctgatttttttttttttttaaatcatcagtcataatagcacctattgaagggcttactgtatgccaattactgattaggacactttacaagcacttatagtattaatttttatagcaaccatatgaggcaggtacactattggcctcattttgcaaatgagacaaacgcatagaggttaaatgcccaaagccacatggctactaagtggctgagcctagatttcacccgagtgcccacatgtccagctactctgctctgttgcctgcaggatcacagtgcagtgttgctcactgcagctgtgcatgagcaaggcagctgagtgtgaacaaaggggaaatgtaacctaattcttctaattctatgatttgatgcacaaagggctccataatcgtgggaattgattacgactgccgggagaggatggtgtactggacagatgttgctggacggacaatcagccgtgctggtctggaactgggagcagagcctgagacgatcgtgaattcaggtcagcagcttcactcagcagtctgcatttcatttgattctacaaagtcacttgtctactttacgccgaagtctcccctcgatttttctccattaggggaggttaagttctaggcaagtcattttattgagctgtataagactagccccctctgtaagcaaacaccttcatacatacggaatgaaataggtgattcctactgtgcgcacttcttaaaagaattcatggtaagaattcagggtgacgccttcgtttattcagcctggctctggcactgtggatgccggttgtcatcaaactggtaggtctgctggtctagaagctagaggtagtggaatatgtaacaaaagtacttgtttctctattaacctggttcttggggacttggagacacttgggctttgctttcccctgctgacccccctgcccacccgaccgttggagggcttcaggtttgccctccatatcctgcaaacactccagtcctgactttgctttatttccaggtctgataagccctgaaggacttgccatagaccacatccgcagaacaatgtactggacggacagtgtcctggataagatagagagcgccctgctggatggctctgagcgcaaggtcctcttctacacagatctggtgaatccccgtgccatcgctgtggatccaatccgagggtcagctgggcttccctaattcttctcttacctgtagatcctgatgtgaagcccttgggttttaaatacaatgtggggaaggtcagaacaagagagtgaaagctcaaatgcattcatgtaacaaagatttactgaggatctaagaggtgtcaggacctgttctaggaaaagacaaggtctgttctttcatggcacttatattttattaggaggaaacaagactggtataaacaatattagtctgtgatgtgatatgtagaaaattcagatagtgttgtgagaactagggctactctgaatcaaatgatcaggcgaggcctcagctgacacttaaactggaagtgaagtgggattcctccagcagcacatttagaaaccagggttgacgctcacagtagggctgacctacatcaagtgacattagccaaagctcagacacctctggcttcagtgttgctgtagcagaaatcaagataaacattttccctgtctgtataattgctaaggtcatcaaatgtgacatacagga

SEQ ID NO: 9149 - DNA, 1145 bp, Homo sapiens
tatgtgctatgttgatttataatctggtccacacaagatcccaatttgcgtttggtgtctggtttttgtcattagcagcttccataattggaacatctgcaactcggttcagcaggcagttactccccctccccagcccagggtgacaggggacacgtgtcactctggagtcctaaaaggaagctgacacaatgctggctctgttttttttttctcttgaaaaaaaaatctgttctgctttgttctgagggaagtgttttgctgtcttcttccctagtaaatggcagatttacataattgatccttaaaaaaaccctagaaattagaatttcttttgaagaacatctggagcacatctgcgtagggcgaagaacttttgatatttttggaggctctggtatgtggtaaagtaacttttcttcccatctccctgcctgcccttgttccccttcctgctctcccaccctctctcccacaggtatacccaccgtcgctccacccatggtccggcccacgccccggccagatgtgacccctccatctgtgggcaccttcctgctctatactcagggccagcagattggctacttacccctcaatggcaccaggcttcagaaggatgcagctaagaccctgctgtctctgcatgtaaagtggatttctcctgtagggggcagggctgcgtggctttcccagtgggagccacctcacaggccctgttgcagtgaggtggactggtgcagggaagtcctggagggtttctgagctgcagcccatcggcatgggcccgatgccaccaccataggaccagggctctctcttgctgggagtcacctgtcactgaccaaggctgtgctctctggttcgttcatggagtttcagataatatggaaagggaactttagagttgtcagcacatggaggctgtatggtgatccaagggaaaatggaccgactcttaccctaagtccccagggttgtatgtcataacatctccatggaaatcctggaaatcaaagtgacaggacaactagtcacaaggtgtgatctctgcggtttgttggggactccaagtggaagtcagttaatgactgtctcaccgttgcagcccttccctttcactttggttctgtccctttgaccca

SEQ ID NO: 9150 - DNA, 1166 bp, Homo sapiens
gatgagagtaaagaaaatgcactctttagccaggcatggtggctcacgcctgtaatcccagctactcaggaggctgaggcaggagaatcacttgaaccagggagttggaggttgcagtgagccgagatcacgccactgtactccagcctggcgacagagtgagactccatctcaaaaaaaaaaaaaaaagaaagaaaatgcactctttaattcagtgggatgagggtaaaagtgacaggagaaactgcgtgtgtgtgtgtgtgtgtgtgtgtgtgtgtgtgtagcaattgctctggagtgttataaactttaattgaggactgcttaggtgatgggtttttgtgcttagtattttaacagcaaattcataccagtacttgaactttaatagcatacaaaccatctaggaatcttattaaaatccagattctgaatcactggaccttgggtagggtctgagaacctgcattccctggtctgttgctgttggtctgtggatcatgccatgaggagtgaggctcatcctttgcaggcctaaactctggatgcccttatcttcttctcttttcagtgatcaccccacctgccaacccctgtgaggatggcagtcatacctgtgctcctgctgggcaggcccggtgtgttcaccatggaggcagcacgttcagctgtgcctgcctgcctggttatgccggcgatgggcaccagtgcactggtgagtaactgcaggtcagcctcaatgactggaaagttgctttggatgcacatccccacatagatggagctctcccagaaaagacaaaggacttcctttgactctaacagccttgtggctgccaaaatagtgagaaaaaagcgtcctttgagttagaaaggggagccaagggtgatttcctctggactagatgggcgagcatatatggcttccttggcggagacgttcctgtagcactcgggagcttctaaccttggttccttggagccagcgcaggctggaggaatttagggaaagttgcataccttcctgttaggcggtctccaccttaattcaacacttatggttgtgctcttctgctttaagtgatattttaagcaatctctaaacacatatgtaatttctaatttttctcctctttcaaaagagagaactccacatatataaaaag

SEQ ID NO: 9151 - DNA, 1066 bp, Homo sapiens
tggattttgcaccggggctgtgaaaagaaaacatctgttgcagttcctggatgttttgagttaagttttgtaattttgagcttttgtagtaagtagttcttagacttaccaaaaagcacattttctgattttctttaaattttagacagacattgtgtgtcttatatccccaaaaggcaacggtagaaatttcttgatattaaaaaaaattgttggttttcttccaagtatccattctttttaaaacagttaaagaattcttagaatattcacttaaaaatttatcttcctgtggtgtttacttgaatggcatgaaatttttactatttctgattatctgcaacatgcattcatatctgatttttaaaaattctacatctgccaaccatttgtcccattgaagcatcatactagtgagaaaacattgagtttttagaccctccacttctgggacccttgaattaagcagaatttttctcttctcatttcttcttagatgaaaatgaatgtgcaactggctttcatcgctgtggccccaactctgtatgtatcaacttgcctggaagctacaggtgtgagtgccggagtggttatgagtttgcagatgaccggcatacttgcatctgtgagttccaaaatcattttcctgtgtggccaaaatggtgctctttaatcttgctctttaatctgtcagtgttttgacttctgctattcagaggctctgctatatggttttcttaagaagacagtttacatcaaaataacccaaagctggctggatgtggtggctcacgcctgtaatcatcgctttggaaggctgaggcaggtggatcgcttgagttcagaagttcgagaccagcctgggcaacatagcaaaaccccgtctctacaaacaatacaaaacattagccaggtgtggtggcacacgcctgtagtcccagctactcaggaggctgagataggaggattgcttgagcgcaggaggcagaggttgcagtgaactgacagcatgctagtgcattccagcctaggtaatagagtgagactctgtctcaaaaaaacaaaa

SEQ ID NO: 9152 - DNA, 1166 bp, Homo sapiens
tttctctcttaatcacaacaccacttctcacgcttgggtaattttaattcagcagttcctaaatccttatctttagccagactcctcaatccatctgcctgttgcacttttcttggttgtcccagagacacctgtgtgtgtcttaaaacattcattctctgcaaaacctactctaatgcctgtgtcccttactttggttaattttagaaccattatattctaagttttctaggctcattcctctcctccaccttcccctatcatttagtgtctaagttttactgattttatctccacctctctgatacatcactctttcatcttcattgctattattaataaatacctacagtactaacctgcctcctatacctagctggtctcctctctgttgctcaatgttaccacagcaggctttctagaagcactctgacagtgttactccctaatatccttcagtgacttcaggaactttcaggagaaagccaaactcctctgtttggtgtacaaggtcttctgatgtgtttcctccaccgaatgttctggtgaaacagacttacacttcttcagaagccacatttggccaggcctcccgccttggtaaatgctgtactctttgcatcaagtatgctagtcatccttccccacttggaaaattcctatgcatcttgcaggcctgacataagcatttcctctgtgaaacctcctttgctccactcaaggagagtcatctaacttccactttcgtgtcaccactgtaattacaacctacctctattgtatgtcacttaaatcgtactgtattgttttatttttcaaaagtctttactagaatgtgagctccttaagggcaggaaaaggaacctttttattttttgcatctccatagcatagtttttggcatatgaatgtttaataaatgtttgttgaataaattgattttaaagtgacatctttattatattagaggtcctacctatattccaaatactttcactcccttcactttacagcaagggtcagtagagtcccaaggatttgtagactttagggggtcaataaagctgaaattgtattcaagatttggtgtggtttttggtgggtcatgaaaggggtctattcggggaaaaaaaggaacttctttcatgggaaaaggcagcatcatt

SEQ ID NO: 9153 - DNA, 1755 bp, Homo sapiens
accttgaacttctgggctcaagcagttctcctacctcgggtttccaagtagctacgactacatggcacacacagccatgcctggcaatttttaatttttttttgtagagaccaggtctccctgtgttgtccaggctgttctccaattcctggcctcaagtagttctcccgtcttggcctcaaaaaatactgggattacaggagtgaatcactgcacctggcatatgtatttaaatacttttaaaataactaatttctagacattaatatcttagttttaccttgtcgaattaagaactaaaatatattaaaatacattaaatggtttatgcaccttaaatttattgaaataaattactttaaaaatgttttaaaatgcaaagtgaataacttttacagataaaatttatctaagatggtttctgagtgaaatattttttggttacagaatttctacaagtgtgaaagaattagaaaacttcaggaacttgttacagaatattcattaaagaaaacaagctgatatgtgcctgtttctggacaatggaggcgaaagagtggaatttcattcaaaggcataatagcaatgacagtcttaagccaaacattttatataaagttgcttttgtaaaggagaattatattgttttaagtaaacacatttttaaaaattgtgttaagtctatgtataatactactgtgagtaaaagtaatactttaataatgtggtacaaattttaaagtttaatattgaataaaaggaggattatcaaattcatatatgataaaagtgaatgttctaagtctctcaaactagcgttttatgtaataatatgtaatataaataaaactatggtaaatgtgacaagcatttaataggaaaatgctaaggaggcctcataaatgacccataattaccaacgtagaatttttcagtacatttagggttgctggatttagcaaataaaaataaagattgcccagttagatttgaatttcagataaacaattagttttttaatattttacatggaatatttggaaaatacttatactaaaaaattatttgtttgaaattcaaatttaactgggagtcttgtattttatctggcaatcctaaaatacattggtatgaaacaaatcacttttagaagtatattgctattttgattgggttgtttttgtgtgtagaaacgtacaataacaactcaaaggcacaggagatttctaaacattgtgaaaagttgaatagattatatatttattctcataatactttcactaatactaaataaaatttggggaacactttttatttttatataatttccaatttacagaaaagtttcaaaaatagtacaaagagctctcttacccagattcactaattgttcatacgtgctttatctttcatgctttctctgtacacacacacacacacacaaatttttcctcaatcatttgaaagtcagttataggcatcatgccccttaaaccctaaatacttcagtgtgtaatactgaataattactaaaaatgattttctcagaaaaaaaaactcccacaattctggaactataatactgtaagccttagaataaataatactttcaagttccaatctaaagttctttttgagttttgttgcccgttttatgcttgatgtgtatagtaatagggtaggctatttattttattaaaattttttttagagacaaggttttgctgtgttgcccaagctggaacttgaacgact

SEQ ID NO: 9154 - DNA, 1314 bp, Homo sapiens
ctagccaaactgtaagaaacaagccatctattttaaagctatccagggcttaacctatatgaactctatttatcatgtctaatgcatgtgatttaatgtatgtttaatttgatatcatgttttaaaatatcctacttctggtagccatttaattcctccccctacccccaaataaatcaggcatgcaggaggcctgatatttagtaatgtcattgtgtttgaccttgaaggaaaatgctattagtccgtcgtgcttgatttgtttttgtccttgaataagcatgttatgtatattgtctcgtgtttttatttttacaccatattgtattacacttttagtattcaccagcataatcactgtctgcctaaaatatgcaactctttgcattacaatatgaagtaaagttctatgaagtatgcattttgtgtaactaatgtaaaaacacaaattttataaaattgtacagttttttaaaaactactcacaactagcagatggcttaaatgtagcaatctctgcgttaattaaatgcctttaagagatataattaacgtgcagttttaatatctactaaattaagaatgacttcattatgatcatgatttgccacaatgtccttaactctaatgcctggactggccatgttctagtctgttgcgctgttacaatctgtattggtgctagtcagaaaattcctagctcacatagcccaaaagggtgcgagggagaggtggattaccagtattgttcaataatccatggttcaaagactgtataaatgcattttattttaaataaaagcaaaacttttatttaatatttatttttgtacttgtttttaatgtttacatagtattaatttagtagaaatgaacttctgccttttggaattgctttgcctgcatgttattttgtgagaacaactggttagtattccacagcgttgccagatagagatactttatctcaaagatagtctttcacctcaattgaaaagccctcattttcttaatacttaaaaatgaatgtgtaatatctaaatgttagaaatgtacttataaatagaagttggctgtggcagaatttgttttaaataacaaaattattcttggtttacaaaaaaaaatacatttacgaatttactcccagtcattactgctgtcatcattcaagactcagatttctagtcctttaccctttgcatgtaattagaccaattcctgttgattttcccctcacacagccttgcatcttttctcttgtcattgctgtcaccgtcatccaaattcagttctttgtcctgtgcctgctgt

SEQ ID NO: 9155 - DNA, 1203 bp, Homo sapiens
ctgagattacaggcgtgagctaccacacctggcctgaatacagttgttttcattccagcttcccaagtatatgtgtatgttaccttctgcagcagatgccttcataaaatactatggcaaaatccaacatgttaagatgccacagaatgagggctgcttgtattgacttgagatttcttaaaagtaaatttagccattttaataaaaattttttgttacaggatgtgaagttaccccagatgtaaacatttcaggccaaaaatttaacattaaactcctgattccagttgcagaaggcatgaatgaaatctggcttcgttgtgacaatgtaagttttccagttaaaaatacacttcaattttcttaaatgagttgaccagtcatccttatattttatacttgaaagacccacctcgtgatacattgcacacatcagtatttcttttctccaggaaaaacagtatgcacactggatggcagcctgcagattagcctccaaaggcaagaccatggcggacagttcttacaacttagaagttcagaatattctttcctttctgaagatgcagcatttaaacccagatcctcagttaataccagagcagatcacgactgatataactcctgaatgtttggtgtctccccgctatctaaaaaagtataagaacaagcaggtacttacttcattttacttcatctactgtgctggtttgtttttataattttgtacataactttgtttttcccctcttaaacaaaactttttagtcttaattttgtatcagatggttagaatataaaatacagttagagtatccctaatctgaacctctgaaatcctccaaaatctgaaactttttgagtgccaacatgactctcaaatgctcattggcacattttggatttcagatttgggatcctcaactggtaagtataatgcagatattccaaaatccaaaaaaatctgaaacccaaaatacttctggtcccaagaattttggataatggatactcaatctgtagaaaataaagtaacctttagtcagtttaaattggtcattaaaaaaaaaaatctttatcattttaatagaacagataaggacacagaatagttgagaacttactctaaacaaattgcagaaatcattctgttaacatggtgttctttcagacattttagggaattgaatatggtctcaatgc

SEQ ID NO: 9156 - DNA, 1181 bp, Homo sapiens
agccacaatggattcaagttcgaaatacagcaacttcgaaagatgttaccaagcgactaaagtccatcaaaaacatccagaaaattaccaagtctatgcaaatggtagcagcagcaaaatacgcccaagctgagagagagctgaaaccagcttgaatatatggattgggatctttggctctggagaaaaagctggtatcaaggtgcctgaagacaacaagaaacacctccttattggtgtgtcctcagatcgaggactgtgtggcgctattcattcctccattgctaaacagatgaaaagcgaggttgctacactaacagcagctgggaaagaagttatgcttgttggaattggtgacaaaatcaggggcgtactttacaggatgcattctgaccagtttctggtggcattaaaagaagtgagaagaaatccccctgcttttggaaatgtgtcagtcattgcccttgaattactaaattctggatatgaatttgatgaaggctccatcatctttaatcagttcaagtctgtcatctcgtataagactgaagaaaagcccatctttttccttaataccattgcaagtgccgagagcatgagtatctactataatattgatgctgaggtgctgcaaaattaccaggaatacagtctggccaacagcatctactactctctgaaggagtccaccactagtgagcagagtgccaggatgacagccatggacaacaccagcaagaatgcctctgagatgattgacaaattgacattgacattcaactgtacccgccaagctgtcatcacaaaagagttgactgaaattatctttggtgctgtagctctggattaatgaaaatcaagttccatcctcagacaaggggtaaagaaggaaaattcagccagctgattttgtttttagcttactgttgtctttgtcagaagaaagtgttcctccattgttttaattactgaagacagcaagataagtgtaaattattttacaataaacaacttaaaatcataaatatcacttatcttcatgcactcgtatgcaagttgaaaggcagtatttatatggtacattttgtctacagatgtggagactttaaaaataataaaatcccaatttgctgaagaaacagacacaagcatgatgtgtcatgtgatgagtctcaggtgaa

SEQ ID NO: 9157 - DNA, 1413 bp, Homo sapiens
ctaagctctgatccgccattaagctttcagctgtgccgttctacttgctaaaattggaagggaataggggacaactacagcatatgcactgagccaagtcatatgttaggcaaaagtccataaatgcaaattaaaatcactgtgaacttgtcattagtcttgtcattttctgtgatactagtttgctatataaagcatactctctcatgctctgagtttttttttaataattagtaatgttcaaattaacatcttttttcttcttttcagcatgatctatgttttggtgagctcttagaacaacacacagaagaattggtccagttaagtgcatgcaaaaagccaccaaatgaagggattctatccagcaagatcctgtccaagagtagcctgtggaatctgatcagttactttaaaaaatgactccttattttttaaatgtttccacatttttgcttgtggaaagactgttttcatatgttatactcagataaagattttaaatggtattacgtataaattaatataaaatgattacctctggtgttgacaggtttgaacttgcacttcttaaggaacagccataatcctctgaatgatgcattaattactgactgtcctagtacattggaagcttttgtttataggaacttgtagggctcattttggtttcattgaaacagtatctaattataaattagctgtagatatcaggtgcttctgatgaagtgaaaatgtatatctgactagtgggaaacttcatgggtttcctcatctgtcatgtcgatgattatatatggatacatttacaaaaataaaaagcgggaattttcccttcgcttgaatattatccctgtatattgcatgaatgagagatttcccatatttccatcagagtaataaatatacttgctttaattcttaagcataagtaaacatgatataaaaatatatgctgaattacttgtgaagaatgcatttaaagctattttaaatgtgtttttatttgtaagacattacttattaagaaattggttattatgcttactgttctaatctggtggtaaaggtattcttaagaatttgcaggtactacagattttcaaaactgaatgagagaaaattgtataaccatcctgctgttcctttagtgcaatacaataaaactctgaaattaagactcactttcagtgcattgtttgagattaaaaatagtatttcttaaacttgcttaatccatgataaagacatgttgctgtcatttttaaaaagtgacgtactacattatgggttttctgaaaaataccatgcctagatctaaaaaggaaaatttttaaatgccgagcacattaacctcttttgtcatttgacaagattcataaacgtggatggcatagcatcatcatttctctt

SEQ ID NO: 9158 - DNA, 3792 bp, Homo sapiens
ttttttttttaaaggtatttgaaataagaaataccgaagacctaactgaagaatggttacgtgagaaacttggattttttcactaatgtgaacttctgtgtttctaaagtatttatgtattaacctgaccatactggaatcagacataaatacttatttatgcctaaaaatgcactgttacttacagtttgtttcctgcagtaaagaaaaattcttcatttgtgcaaaatttgaacaaagaggaaatcatcttcatagtaatgaaactttgtaaagtgtttccttatattggtaattgttaggtggactacttttctccagggactttttgcactcttgtgactaatttctataacttatggttcggaatttgttactatttacagacaccattggaaagtggatatattagattgtgagagacaacagttgcctccttttgacaaatactggatattagcagtttatttatgaaaatagcgtattatcacttgtcaaatcattgaaattcatttggggtcaaagacttgagtgacccagtattgagccatgaataatttagtgtaacctgtattacaagtacattgatgaattctgtatcttctttggtttcctgtatctttttaatcaagtctagaaactatgttcatcagtcactcatttttaaggtcgggagttagattttatgatagaattatgactgttagcttttctccttatagcatcttagtcttagaaattggtgggttgtaataatcaagggcttcattccttttatgtcatttctagacagttttgaatctaggttaataacactttatttataaagcacctcaatgtcctgtgaacactaattattttaaatgtgttaatactgtgcctttgatttgttagctttaaagttagtttaagacttttacactgccagtattccacatttggtgaaattaatacttttttaaagggtccaaataaaataattttctaatgtgtatatctgaaatttgtaataaaatcaacttcatattttaaaaattccaactatctgcttgcattggtgaatatatggcagtcgagagttataattttgggtatacttgtggttagttttgtgccataggaaaaaattatcttaaaactttggccatagttaataacattaacacttcaatagcaatcacatcttatatcctaaatgtcagaagatattctgaactggatgcctgaatagttaactaaaccagtcttgttagatgatggtactcttggcataaagcgaggattctgatatttggcatacttgtaaaaacaaatacataagtaaccattgaacattaatttgataataggtctagagactctaaaaactaaccaaacttggtgagtgtattcttatattaagaatatcttagtcatctcaaaactagcaaaatttaaattttggcatgttttccattcatatgttctttgcattttatttttgaggtttctgtgagaagtaaagatagttggaatttttgcgatattgaatagaacatcttctgttcccaacactgtttggcttcactaatttagaagtcaggaagcaatagaaagttggagatgaggaagtgctagagtaggtgtttgttttggttcttggagggaaaagattctttattccaatttccagagagaagagaaaactcacccaggaagtttaaaaattctttaaacaggtattttgatattggagaataacatgcatataattctgtaggaatgcacatgtaatccaagtgagtggagagtgtttttaatgtttttgaatgaaggaaatgaggttttgtttcacctgttttgcagcagtaagagaaactagtgctgcaagaatgtattttttaatgaagttccttattttgtcttgcatgttttagttttgcttatttttaaatttggaggtcctccataatgtcagataatattgacctgccatacgttagcactcttagttccgctactgtctttaacaggagcaaagagctgtgataaaccatgcttttttgagcttgtctgactcctaattaataacatgtttttggcaagacaacagattgaggttagaggatcagtaggacatttttattccatctgtcctatggggaaatttacaaatcccgtgctctaaaatgttctcaaacatttatatagatttccctttcatcttactaaattttgcattgttcttttcaagtatgtttcgtatttactgtctttttttctgccatttcccaaataataactccagatttcataattccagtttttacattccgttatctttctggtacaaccattcccattcagccttaaatctgagtcctttttagcagcaacttttttcctgggatcctccttcgtggtcttctaagtcagtgttagttttgaaatttttggccctgcataagttctgcatagcatctaatgtcaaaatagaaccaactggtaatcacagtattatttagtgtggtttccatgacaacaaaaatacatacgaagaaaacttctcaggttactatgctgaaattccaaaatgtctgagttttgaatagtgatcactttgttctggtattgacgcaattatattaggaaaaaagttggttgactgtttttgtttaattgacttctaaaatgttcaaattgtctagttctaaaagtttactaaatgcctagtgcagttaaacatactcttgtttaagtgtgtgttgctaaattttttactgtcattactaaataatctgtgtggcaaaatgtgtgtcagcacttttccctccttttttatctcctattttcaggagtcaaatgtagccataaactgtatccttgtctgacactttagctaaaaatttccagttaggggagtttattgccaaattaaatttggctgttccccccaacccatatagatattaaggaaggtgtacttaaaaaatgtttggactgcttttaaaacctgagcaatgtcattaatccatatgtggactagtgatgaatagatattttcataagagtttaaatgctgatatttggtggaagtagagagtaactcatattctatcaattcaagtattcttactatggttgctttccctatttgttcaatagactgataatactggaatttatagagtttgagccattacaacttttgtgaggatgtgtttcaaacatttctggacaaatcttattttgtatttctggaagaatgtagtaatcttctagaccgcttaaaaccaatgctcccaagctgaatattcttgagaaatttgtttttattatgccatttgacatttcaaatcagtgctcatatacagtaaacttgtgatagaaattgtattttattgctttttggattataattcatataaatataattacttgaatattgtttgagatcattaacatgccagggcagttcccactgatttagatggtccaagataatctcattcaggaggcttgaaacattaatggtttagtcttgtgaattttaacagttctctgtcatcgtttaacaaaaccaacaactgacacaactccttaagctgtggtttcagtctctgctagttcatattgcatgtttattttggacagtcttttgttaagcatggtgcttgtactggtttaaataaaatgttaacattaaaagacttccagcttttctttttttactcacctctttccccctttggagttactggtatgtacctggctagatttgtgtgagccataaactttatctggacaaactga

SEQ ID NO: 9159 - DNA, 1175 bp, Homo sapiens
catgctcattatgcataaaagcatgtgctaattgtgtagtttgtgatattgctaatttaactaccttgtttaaaagcattagtgaagtccagtgtaataagtggtataagttggggtcatatactgagtaagaagtgagtcaactttgtaacttgcttctaagttgcttgactagtacttaaaacctgaaaccctacaatttaaatatctggtttgtcaaattaagtaactagagtaaaaagaattcaattcttttttctgaaatcagacattgtttctttccgctaagatactggcttatgtcattcagtatttcctgacagctgggacataagcatagaatctgtgcctcccagccccatatttacttaataaatggaatgaaaccaagtgggcagaaggaggctttgattggattgagaatttagtaacctgagtttatgtataatttagtaagataaaattttattttgtagcatgtggtaataaatttataactgttagtagaatgggtgcttggtgtatctcttaaggacttatgggtaagaaaatgtttaaaagttgcttttctctgtggtgccagggcatttcaccagatgaacttaaagatgaactacctgaacgacaacctcgatatccttttcttagtgctttaaaagatttattttctttagtggtcagacctgtttgtgagctcatttgttaaacatctaaaagtatccttctgtgtcatgatgacagccaaattaaaatatgtgtgcatatactagactaagaaaaatgaaaagttggtttattcgtgggatgaataattttctttttaaaactatttcctttattataacgtgtacaataaaaattgagaaaataatctgtattaaacttgtactttaaaaagttaaattttttgagagattatgtgattttataacttatccttggaacccatttaattttgtggaaagataataatgaaggtgtggcctaaaagaataggacagaaacttgcagctcagtagctccccaggtgttggtaaatacctgtctgagagcagtaactttagtttctttaacttgagaaaaaccttcattgtgtatagttataaatatcaacatgatgatggaagagtttcatatcctctgtgctttattttctccagtcctgttggtaagtg

SEQ ID NO: 9160 - DNA, 2070 bp, Homo sapiens
gtgtatttcatactattctttaaaagtaatcttatgtcctttcctacatgtaaaatattttgttaatctatgccattagtagtattatatataaaatatagttccccgtcccccttttcattgagtttgatattcttcagtaaagctgaatgttgtaattcaccattcatactaatgttattgacttttgtaacttactaatagggatgttaaaagtaacaaaaccaagtcaaacttggtgtatttttattttaaatattaactctaaagcaggattactaaatttgattaatctggtcaatgagaatcaaatggaaacatatcattctggaggtgcacttactcttctacaatgtggccggatcatttgtcattcctgaataggtctttctctcaacctgcaagagctaaaccatcttcaaaacataaatcttgttcctttctcattggaagctttgaaaataatgataacactattagtagctagtagttactaaagtgctaaagtaattgtggggtttttctgtattagcttatgaactgttgcttctacttagcccttttatagaaactctgagctgttactttggggaaattccacaatgtattagcagccacaaatttccactggtaaccaaagagtacctaagtagtttttcattattttaagttgaatttgaataaagattccagaaataaacatggagctcagtattcaggaagcttaatactgtttttgatctacaagatccaaataattatccctatcttcagaattaacttagtctgtaatgtggcttcaaaaaaagaaagccttttgacagctacatgacttacaccatacagaacagtactggacaaaaggggtgatattttaaatttactatcccagaaacagggcaacgtttttagaaacatctttagcccaaagtaactagtaaaaataaatggagtggtatcctatcttctttttttaaggaatcaatgaataataaatgtagatagacaattttcttctggtgagctgtctaaccctttgtacacattgacatttttaatatcgtaactgatttcttgatgctagtttagctatattaggaaactgcttctacctagattgaaagaaatttgactcataaacttccaagttagaacaaatatttcttcattattgttgcttttatgtgagtagcatttccctatcttgcagttctgttaacatgaaaatggcatttttccataatagctttaaaataattttttagtaattattacaaaattaaggaaaatctctattaccgttatcttttagcattttttttttcctcagtgatctcaagattgtcttagtctcaatgagatgtagctacaaaaatggcacctcttagcagtgatgaggctcaggatatcggatatcataacaccaatgtcaggataaatatctcttctaaagacgatatttaccttttacaaggttagaaaagtctcatactacctcatctttattgtggcgcttttgtagatcactgagaagcttatcttattaaccaatataccacttcctaaatatccatctttggtgaaagaaaatagtgtggtaagagtacccatgattatagttttttatcagaatttgataagattttctgtttctgtgaaacaattattttaaatatttttcttttaaaaataactttttatcagtacagaaaaacctaagggatgactagcttacaaatattctgttaaggggtagttttataaagaaaaatgatatatagttatgttgtcttttatagtgttaaaattagtatttatatgaaagtcaagatctaagtaccttttcatataattcaaactgattgcttgtgatatgttttctctggcttttttattttttcaacttcaaggtattaacagctgttaacacttaaaaagtactgccacatatgtagccttgaagtagttgatctaataaatgagagcagggaggagattcattgactctgaaatgatttttatttttcctttggtatttgctacagtgaaaagaagtttggaaagtagata

SEQ ID NO: 9161 - DNA, 1164 bp, Homo sapiens
agctcacaccggtttctctccatcctcagcttgcgcgccaccatcgccgtcgtgctggggccgctctccaccgctgcgcggtgactgcaaccgcccgggccggccctcgaggcctcctgcattccgccccaacccccggccccgccgcggctatccagtcagttcactgctattcccatgggtcacgagacagatgaggagtttgatgctctctgagtaacatacttcaacaagccagatatagatgcctggcaattgcgtaaagggatgaacacacttgttagctatgatccggttccagagcccaaaattgttgatgctgctttgcgggcatgcagacggttaaacgattttgctagtgcagttggcatcctagaggctgttaaggacaaagcaggacctcataaggaaatctacccctatgtcatacaggaactcagaccaactttaaatgaactgggaatctccactccggaggatctgggccttgacaaggtgtaaaccccatggatgggctttgcaaggatttattgatattgctacttgtgtgtaaacagttacctggaaatactgatgataatatataccttatttgaacaagttttcctttattgagtaccaacccatgtaatggtaacctggactttaataaaagggaaatgagtttgaactgaaaaaaaaaaagtagctctccacaaaatacctattaataacttttaacctagtaagtacaaaatacttattaattaattttacagtgaagaaattcagcagacaccatcttaaccaagtgataaaagtcaaccctgatagaaatagaacaaattacgttgttgccttctgatgctgcactgagaagaacatagcatcacttctgtggtacgcctccataaaaacccactaccaacaaataacctgaatctaaccatgagaaacttaaggcaaactcaagcgtagggacagtctacaaattaattgcctgttctcttttaaacggtcaacatgaaagacatggaaaaactgaggaatctccaagttgaaggaggttaagaagacataacaattaaattcaacacatgatcttctattggttcctgggtcagaaaggaaagggtgattataaagcacattatggagacaatcagtgaaatttgaatctagtct

SEQ ID NO: 9162 - DNA, 1104 bp, Homo sapiens
ttttctgtaaaaaaaaaaaaaaagtactacacaccatataaactggtagctgtttgttattcttgatatgtgcagtaaaaactatcatgagagagttggtaaagatttaatgaactggtagaacatgtttttcttagttgctaagaaccatctgagcttaaatttaaaaacatttttttctaaaaacaaaattggtttctgaatcaaatgtgtatttctttcctataggggctttgttatgcacctaaagccatattggaagctccagaagaaagagcaccccccggaagtcagcagggaaacgcagagaactcctatgaaccaccaaaaggctgtaaatgatgaaacatgcaaagctagccacataacatcaagtgtctttccttcagcctctctcggtaaagcatcatctcgaaagccatttgggatcctttctccaaatgttctgtgcagtatgagtgggaagagtcctgtagagagcagcttgaatgttaaaaccaaaaagaatgcaccatctgcaacgatccaccagggcgaagaagaaggaccacttgatatctgggctgttgtgaaacctggaaataccaaggaaaaaattgcattctttgcatcccaccagtgtagtaacaggataggatctatgaaaataaaaagttcctgggatattgatgggagagctactaagagaaggaaaaaatcaggggatcttaaaaaagccaaggtacaggtggaaaggatgagggaggttaacagcaggtgctaccaacctgagccttttgcatgtggcattgagcactgttctgtgcactatgtgagtgacagtggggatggagtctatgctgggaggcctctgtcagttatacagatggttgccttcttggagcaaagagccagtgctctgctagctagctgttcaaaaaactgcacaaactcacctgcaattgtgaggttttctggccaatccagaggtgtgcctgcagtgtctgagtcctattctgccccaggagcttgtgaagaacccacagaaaggggaaatcttgaggttggtgaaccacagagcgaaccagtccgtgtccttgacatggtagccaagttggagtctga

SEQ ID NO: 9163 - DNA, 1553 bp, Homo sapiens
gcagtacatggcttttctgccccaccacattatggtaaaaatcttcaggttacttcccaccaagagtttagtggcccttaaatgtacctgctgctatttcaagtttatcattgagtactacaatatcaggccagcagattctcgctgggttcgagatccacgctatagagaggatccttgcaaacagtgcaagaaaaagtatgtgaaaggggatgtgtccctgtgccgatggcaccccaagccctattgccaggcattgccctatgggccagggtattggatgtgctgccaccggtctcagaaaggattccctggctgtaagctggggcttcatgacaatcactgggttcctgcctgccacagctttaatcgggcaatccataagaaagcaaaagggactgaagctgaagaggaatactaaagtccatgtgagaggcaacaaaaggaccggtttctaaagctgcaaaacacctagatacaccgttcaaatgagcgtagccccctgagtcatcactctagaagaatctgtacatcatcaggactgcattgctcaggcattttctaaactctaaatttacgagctgtacaaaaaaattggtcttgttgtttatagtggcatctcatgtttgaacccgggtggtatcccacagttggattcagttggctgtgaataactgcctgttttcctaaatcaaacccatcctcaaaggatgaagactcaccaccatccaggacattcagaagagttcactgcagatgctgcaggtagtcctcaaaaatgggttccagaaatgttttgagcactggcaacatatttgaaataagtgaatattgtcctgtgaaaagaatagcaggacttttagatgaaaagtattcttaaaaagaaaagtcaggcaccccaccttagacctcgtatgcttgatcctgtgagattgatgtttgtggctggaggtggatttcatgccctgtggtgtttacagtgtatataatggttgtgttttcatggggctatgaaagtgcacgttaaacctgagcgcctttacctttagatgagtgctttggcccctctgtgaatagcacgattaaaatccagttgtatataatggacagctaacggaacaatataatcaccacaatgcagctaggatagtgttgcggctataattttgtgttttttttttttaattgtctagtcttaaatttgtacatcttgtataaaatatgaatgtttcccaaataaactatgaatgtttcctgtataatatatgaatgtttctgagaagaaactctaaatagttgaaaggctaacctgctcaaaggataccaaataatggtttaactggacaacctgaaaattagcatagaaaacaatcctttgttatattttagtgatccacaagattgagaaaatattatatagttagataataacattcttgtctactttatcctgtctggttacaaaattttttaaaacttaaataaaaacatgcatcttaaatggaacccaagttttgcaaagattttttctcctgttttgatacaatgttgaa

SEQ ID NO: 9164 - DNA, 1140 bp, Homo sapiens
ttgttcaaaaacccattcaaatgattgctttattaccttttttcttaataaaacagtaaattgagactctttcttccagattctaaatgaccaaaacaaagcattaaaatcagaagttcagaagctacagactcttgtttctgaacaggtaaggcttttcctaaattacaaagtagaaatacttgttatataacaagatctggttcttcttatttaggtaccaaattactaattgagaaattttgcttaagcttagatatggctgttattgcctttctattcatcctgtatctaaattcaggaaattttttctccctgaggtgaagctaatgccaatctgctcaaaagcacattccagaaaaataaaaatgtgtaataggatgcataaaaataatttaagccattttgatacatttgactttcagaataaatgtcctgccttagacttggagcctcagctttttcttttagggagcatggtgtctttaaaggttgaaacttattactagcacttaaaagcagtgtgatgttgatcaaatagcttaacctttgtgacacctctcattccaagcctttcacatggagattatattatatttacaccataaagttgttagatttgaaaggagaagcttatgtatggtgcctagtctagtgctttgtttatgacaggtatctaaaccttaattcttttcccttagagtatttattttatccatctcatctccatcccctgccaccatcactattcattttatatttatagcaagacatcaaaactatatcagctttgaataagcatggttccataaattagagcccagtggtatctgttctctgcctattcctcagtgctgccttcgtactcttcttctacgcagctcttacaattacaatttattaataaaacacaaactcttgatgacacattagaataggaagtttgcgtttgttcctaatattaagtttttgaattgtacttttattggaagccgaaatgtaaagccattgcaaatgatagcacttctttagcaaatgcatgcgttctttcatttattttaaaattcacatttatgcagatattgagctggtgtaagtagctgtgcctctggaagtattttgttaacttgtcaagaaata

SEQ ID NO: 9165 - DNA, 1404 bp, Homo sapiens
cttagaaaacttcatatgacctaaaaaaaaaaaaaaaaatctatttctgctcttttaaattatttattcactggggtaaggttgtattcaaccccttttcagtgctactcactcactttagctttacattctcttgagtaggactaataaaaatggattaccagtgttgttgttttaaatgttttctaacagaatttggctcacatttaaaagtatctacctaaaagcttgtttcctttgaatcctgagatttttctcagtttgattaccattagtgtgaattgctttgagtctatttgaaagggccatgctagatcaaatggaatatgtacttttggtgtttgacaaatgtcttctgattgccttctgttgctttgttttaaagtgaaattcattctttctgatcttttacagagtgaagtaattgggaaactgttcatttgaggataaaaaaggcattgtattatattttgccaaattaaagccttatttatgttttcaccctttctactttgtcagaaacactgaacagagttttgtcttttctaatccttgttagactactgatttaaagaaggaaaaaaaaaagccaactctgtagacaccttcagagtttagttttataataaaaactgtttgaataattagacctttacattcctgaagataaacatgtaatcttttatcttattttgctcaataaaattgttcagaagatcaaagtggtaaagacaatgtaaaatttaacattttaatactgatgttgtacactgttttacttaacattttgggaagtaactgcctctgacttcaactcaagaaaacacttttttgttgctaatgtaatcggtttttgtaatggcgtcagcaaataaaaggatgcttattattcaaacttgacttgttctaatttttattgagctttaacagatttcattagtagtacagatcattgtaatttagaatacagctattaattggcaaccattcaacaagataggtttatgtagcctctgtaacctttctaactgatgctctgggtcctcttcagtttggtccaatgtaaagtgccccaggagtgctggggtttcagaaaggacagagcaagcatttaggatttcagactaaacacccacacttcaggtagaggagctctatttttaccattactatttttttttgaagtaataataattaactgttagttttctttttcaggcacggttacacagtttacatgtgttatcttttttgttgttgttgttgttgttactgtttttttgatacagagtctcactctgttgtccacgcaggagtgcattggcactatctgggcttactgcaacctccacctcccggttcaagcaattctcatgtagctgggattacaggcgcctgccgcca

SEQ ID NO: 9166 - DNA, 1214 bp, Homo sapiens
gtgctagctggtagacaaactcaagttctaatcataactctgacacctatgagtcagttatatgacgttgggcaaaataaaatctttctctagccttattctcatcagtaaaacgaggataattgctctttgtcctcatcgcaggccttttgggtttgtttgcttgtttaagaatcaaatacatgatttcagggggaaaaacggctttgcaaactgttaagtgctatagaaacacgaacatattgaacatacatttattaaatccctcttactcatctaccaccgctattactaataaatatgaccatttactcgcttgaaacccatgctggaatttgacatgcaaatatcctgagtgttgctcatttgcattggaaaaagggaaagaggtgggaggccttttgaagccttttaaaaattgagctagggggatgaattcttatcactgggcccaagatataattgattttctacacaatggctcacaggtgctacatttaacaccctgagtagtaggaggatggaaacgtatcccaaggtgcagctattacttaaaatatctacaaaatcagccgcttcactctggggaaggcagagaagccttggcggtgggaggacctggtggggggactccacccagttggcggatgtgctgacagaggcacctgctccttgcttatcccactcggagaactgggccttggcttccatggccagaagccaaaaagcacctctttttcagacctggatcacaagggccgggaagaacacagggcaaacccaccatgaaatacatattaatattataacaaccctttcagaattcactgttgctatgtcaacaaagcagctggggaaattgggtctttgggaaattgggaaatgaggtcagctttggcaacctggcaaatgtttccttctctcagaacaattgctctgtgacaccagtcagccttttcctacctaccctttcttctgcttatttctatgaaaattgagaagcaaaacaacagccattaaggtttgggattagggaatttctgtgtcatggaagaagaaagagaaacaaaatgatttttctctccccaccaaccttaacccttttcacctgtttatgcccttttctcagttccaacctggactccaccagactgaaatggattctgtagccatctctgtgattttagttgaattactgacttcatctcagtttc

SEQ ID NO: 9167 - DNA, 2714 bp, Homo sapiens
gcatataaatttaggatttgaaatatgattttttaattaaggtcagtcctactcataaactcattttctgcaaagcattatcatggcataaggttctatgttcaaaattatcccaagtaacaaagaaaaaaagaataactgcctgaccaggattttaacttgttattctagcttaatcatagataatcagcagtgaaaactttccttttgaaagaagaaaatatcattccctataagttatttgatctctcttaaactcaaagcttaacatttcacttatgttgataagttaatggtaatggagccatttggaatcttgattgtataaatgtttaccaaatacactaaggtaagcaagaggcatttatctagtgagtaggcaaagatttaatataataatcccctaggcaaaagtttataagcagttagaaaaatcagtgaatcttctatttgacatttctagaaaccggaggaaaatctagggtgtcctggaaaagtgatgaggtgttggggaacctgatgccatctgttgccattccattctaacatagtgctacagaactgaaccaacttaggttttcatcccattgagatcagctgggcacactgtgatgcttttgattttgtctagaaacctgtcacttcaggataatttctgaagacaaagtctgtttcccgtttggtaggtgacctgtttaatgttttccctgtgtctgggaactccttagtgtaattagcgacctttgaactccacaactaatcctgagctattttgtattccttactcatctttaaggctggacctttcctttcttcagagtccgttgccacaattaaagaagaaacagctgcatttcaaagggattccgattccagaagcttaatcgtgattgacatgttcttattctaagctataagacactctaagagtcctttcttgggttaaaacttcaatcattttctaaaaaattatctcactatggattttattcattttctttgataactattctttgcattttttaacttgaaagatgctttgcgtttgcagtgaatatgagcaactacttccagtgaaagatttggatagtgtcagaccttctctagatgcaaaattgctaaattcccttttagtgccaaaatatgattatgaaatctgatgtctatcacataggtaattattcttcaataaactcgaaaggttaaaaaaaaaagtgttaattttttagaatgaactccagaaaagatcgttcatgattttgtaaacgcttcttttctccattttttactaaacaatattttaaaaactttttagagccagcaatatagtacttaggcaatacccttacggtggtggcaatttttttttaactttttaagtaattgattcaaatgtcaagtttgaagcagtcttgtcaggaattctgatgacaattatttgtttaaaaaattttttttattaaacattagtctgtcccataaaatcgttttcatttttttcacaccaattcagtatttctactaggttaaaattatggtgtttttatacattgtatgatttaagatctttcaaggcagacatttatacttggtaacaattgccaatttttttttctggtttttgttgtagtatttcaaaatacttcgtagacattgatagactcctacactacccctgggagctaggtaggtggaattatcatccaggccttctgtagggactgctgccacaacagagtggttgttcctaagacaaaggtcaaaaaaaggggtgttaataaacagtcctcaggtttaagggacttttttaggattacatcttaaattccaacaaatcagatttaggagttactgaaagtgaaattgatccatccctcatccaaactttgcaatactttcctgttctgacatcatttagatagttagctgtattatcagattagaaaccattgtaccaggctgctgaaaggaaaaggaggcaaaaagctaaacatgggatgaattctgaaccttttaacctggctgaagtacgttggtccctgttatgcaaataccttcaatcctctgctaagttcagtggaaataattttcttgaatgacaggtttattcagcaaggattcagttggtgattaatccccctttgatctagggtatttcacttaactaccagttacctcgttctgacaaagtgcaactgagattagggagatcactagaacactaccagggtgtgcgtttattctctataaccttttaaagcaagggccaagaatgcaatttattttcagtatttgaagatgtaaagtcctgtctgctaagttagaaagtcaattgaataccaaatgaagtttatttcttacgtaatagaacaaacatttctttttgcttcgcctaacaatgatattaggaaacataggctttgaagaaagaagaaacaaagactacattctaagtattgcttctagttttgtttcatgcactagggtatacttaactggccttgacataaccaaaaatcaaagcagtggctacaacttagactgagaaaatgcttctgttttattaagctgcatggtttcttctcacctttccccctaccaccaccaccaccattagaaaatgtcatactgtgtggtaaagaaatccagttgaggaaaatgtgttgcagtacacagttatccaccttaagactaatgatttcgaagctttgtta

SEQ ID NO: 9168 - DNA, 2195 bp, Homo sapiens
ccttttcaggaaagtttgttgctttttttttttttttaaaggaaagctgctctttgctcagtatagtgttttgaaagtgaacatagtaacaaatactttaaaaataaagatacacaatttatatttgaaaataaaaactttctgctggtgggattatttatagttctttatttttaaagaaaatgttttcctttttatattgctcttgaaagtttaatgagcagaatacaatactggttataataaaaatatggtaaccacacagtactcagcctttcaatatgtttttggtcaaacttcatttaggcactagcatttagaagaataccaatcacagtgatgcttttgttatttaatatgaaggaaatggaactaaaacatttatgtcatcaaattttatttcacttctttatatttgacttgctggttgatacataatggttgatgaacatatatttgcttaaatcactaatagggatggttgtaaagtagatagatcattggttcaaccattttagtgtttttgccagattgtcaatgaaaccatcatactgaccttttcctccaaaattgccaaattgactgaactggttgggtgtttgtaaagatgacgttaactgtgtgactaaaaagtcagatggttgccatattgtttggaatatgttgaatgtcagtgtatgccttatgtctttaattgggtatgcaaaaaaatttttacttaagtagattaaaattttaacctctagcatgaaaacccagcaccaacactgaaagactccattcaggttgaagtagcctcaaacagtaatttactttttgataataggctgttgtttttcttaaataagcttaaaacaattctatctgaaattggtagcatgggttcacttggctacaactgagcaaaatagatgcaactttcttttaatggggtgctgcctctttaggactgactgtactatccactgacactggtttggcagttggtactgctgaacatttttatacatgctaccatgaagctatatatgttagtattgaagaagctaacgggtatactatcatttttgatgtgtgggctgattataatttcctgtatttcctgtacattgggatgaaactactttagcaaagtccacagatcagaaaccagacggtagtttttgaagttgaaaccagcaaaataagaaaaaataaaaaatcgattttaatattttctgcctctttcccaaattacccttcccacttgctcgacaaatctatgtaaagcagtttgttttttcatgttttaactttaccttgccctgtgttatggtactggctgacatgtctaagactggatgtgtatatttattatggtgtctaaaaatcatgaagttcatcacttttcaggagtatagataaaatcaaattggtagtacatcagagttacttttcagtgcaccatgacatcactaaaatgagtgctgtaatgttacagggctttcaggtttgtaaaaacataaccataaattatattgacgtcagatatgagttgagtatctataaaatatcacgtgtatctcaaaatattggactgctgtttgactggatattgctgcataattttcttctattgtcccatatccttttggagagagatttaatgggatttgaaatgtgcaagctgtctaaataagatgcagtcaaataaagtatggttaagttgtgtttgcatttttcttttagatacagctgtgtgcattttatgattgggttgttttgcttttacctactaagtaaaacagcaacaaacaatatattgtttcccgcttcctgcctttcatctaagagttacggggaagaagtattacataattgtcatcactgttgtgtgttctgacaaagtaaatttgaaaataacatgaacttgatttttctaaaagtactcagtcaactcatatgtcagttatcggtacattttccatgtgttcagtcaaaagtttatctttttagtctgtttcatagcagtttatttctaagacagtttttattttaatttacttttttgtctgtacactgccactctgtaatgttccccccaccccatcccacccttggtaagacaccaaagtaaaatagagcaatatccaaagagctttttgcccctgtcttgtgaggagctttaaatagctgtgaatacttctgtatgtcaa

SEQ ID NO: 9169 - DNA, 1142 bp, Homo sapiens
atagcagggaatagctgcctggtcaaggaacgtttgatgtgaatttccatctttgttaaatgaatgatgcctttctaatttctctcttactcacacacaagttctttccttccccatctcagttatcagttatttcctttacagtcatacatttgagtatcacctctatggaactaataaaccttcctagaatccgtttttgaataatgtctggctcacaagaacattttcatcaaataattttaactctttttgccaagagatgtaagcaaatatgtgaaactgatcaagagaagtgaaaagctctgtacagtcaaatagaagttagcaactggcaaattagctcaaggtcagattttaaaaatagaattcagaatcatgacactcagaagtgatttgtaatttcacgagtagagacatcctgatattgcataagggatgttttccttttctaagagcagccctttgctgtaagtgtttctaaggttgggagtaagtgagcatggtgtggcattactgtctttgtattcttgacaaactatttgttgagaatacgtcgtaggccacttaactgagtagcacatgggtgatactagtggccattattgccttgggctactcaatctatagtcttaactaaaccatggctaataggttgaatcttcaaactgtagtgtaataaattcccaaataacagacccatattttcatttctcagaggtccgtgaggatgacatgtatgtgaattttggcttaacacagtatctctgtggtcctttttgggacacatgatttcttaaaggaaaagattatacttagagtacatttctgtacaaacccatttaaacatctggattgagtggaaggtcggtggatggtacaaatgacatgtttattttggccattttccttgctgctggtggctgtggaataatgattttcagtggttggcttagattattaagaggatcagaaaaggttgtcatattttaaacaaaacctgggattagagatgctgctacgagatggaagtgctggccagtggttatatagtggtccagttgagaagtagtaaatcaggcacttgtaggtttacccaaaataagtgacaagtatgcttatatttgcacaattaaaataga

SEQ ID NO: 9170 - DNA, 1143 bp, Homo sapiens
actaataacatatgcattccagcctgggcaacatgtaagaccccatctcttaaaacaaaacaacaaaaaaaaactgccgggtgtggtggctgaaacctgtaatcccagcactttgggaggccaaggtgggcagatcacctgaggtcagaagttgagaccagcccggccaacatggcaaaatcctgactctactaaaaatacaaaaattagccaggcatggtggtttgtgcctgtaatcccagctacttgggaggttgaggctggagaatcgcttgaacccgagagacagaggttgcagtgagctgggatcatgccactgcactccagcctgggtgatggcgaaactccatctccaaaagaaagaaagaaataaaaataaatgagcaaacaaaacttacgtttgactcaatctgggctttggtctttctcaagttatttatatttgattgtggaattctcatgaaacattgacttcttaaaaccatctttttcctagtttactaaagcagtgaagcactttggggaagaggctggcaaaatacaaccagatgagttctttggcatttttgatcaatttcttcaagctgtgtcagaagccaaacaagaaaacgaaaatatgagaaagaaaaaggaggaagaagaacgtcgagctcgcatggaagctcaggtgagaggatgattaattgaccaattccacctcctagaagttctatgactgcagcccagtcaaaggtatttagagagcactctgacctggcaggaaggaaggcttcaatgtactctctagaatgctgtgggactttacattggtgttgtttctcttgggctatttaacagtgtatattcaaagccttaaaaaaaaaatctatccacatcctttgctctggaattccatttcttagcaattattttaaagaaataatcataaatttacacaaaaaagggcagcattctttataatagcaccaagctaaagacaacctaaatgtttaccaaaaggggatgagttctaaatgatataacagccatataatggaatatttatgcagtccttgaaagacatgtattcaaagaataatgatacagaaaaagatttctacatgaaatctttttctgttttgttttttaaggtgtgttaataca

SEQ ID NO: 9171 - DNA, 1945 bp, Homo sapiens
ttttctttccccgaacgccatgactgttcagaagcacaatactatctcctgaaagagataagagacattccctagattcaaaggcaaaacagaagaaacaaacaaacaaacaaaaaaagcttgcaaaatattttatggtttccaagcttgatatcctttaaaattattttcattgatggaactggagttgttggaaaaacatagatttaaaatgatttttgatagctgacattgtgatgttgatgtatcacatcagtaataggaccagctttgaatttctgacattggtgtggggatacagtctgtaaatgtttattgagaacatcttgcacacaatttgaattatgtagaatgtcaatcaagtttttgtatatttaaaagttggacatcaattttttcccctgatttcatcaagttatctctgccaagtgctcttgataatttcttcagatttttggaaaaaaacactatataaatgcaatccatgctttttttaaagaacaacattgccagagtatgcttgttctaacaatatagatatataaaccttaaaaataataaaatatctcacccaagacttaaaggaagaattctctgaagggataaagattactaaaaaaaaaaaaaaaaaaaaaaaattaatggggtgcctttttgttatagtttctattttctgttttgtaggacaagctgcattttctgtaaatataggtctggactaaaggatacataaagaatgcacaaaatgtcaacatcagcagagatgcccagatctatttatctctaagtatatttgaagtgattgctgtttatatgttgtcattttaaaattgtgtgtcagtaaagctacctgtaaaatttcagtccaaaaaaataaagctctcagggagacatgaataaaatcaatgaacattagaaaataaaatatagatgcttaccattaacctaccaactcttaatatccttaaattatgtgatatataaagaggactgttacttttttacttttttttttttttttttttttttttggctttgctttatttatttgtagttgggggctaacgttttctcttttctttctattgatcctgttgtggttgggtttcctgtggagagagtagtttgtcctgttgcactagaacattatttactcactaaattgagtttttcagtcaattaacaaatatttattaagttcctactatgtaccaggcatagtagggctacaatggtaagcaagacagagtccctgcccccaaagagcttatattctaatggggatattaagggatgaatagaataccaatgtgtgcactgtacaggaatcatactatttaaaaataatttgtataaactataatgcttagcacagatggcgagttatctgtgctatgtgaaagctgtgaaatagtgctctaagagttgtcaagagctgtggttttacatcttttcctcattgcaaatttagtgactttctacacactatatggaaataaatgactagcaaataaaacagtcataaatacaaagcagaggttgcactcccccaatcccgagttaacccaggtctgcaataacaccatgttaaaggtgcagatagagacttggctcaaaaaggcttggagatgaggaagattggaatataatgatggttttgtctgttccttaactaaagtgcctctatgtatattcttttctatttgtagcaggataaatttggtctggctcagttttggaactgtattttgaaaatggctttgtcttacagtttaaggaatagacaggtggagggaaagtcacataaaggagcaagtttgtgtagctgtccctcttgccccttttaatcatcctcctttgatatggccatcctggtgggcctcctttgccatttccatttttggtttctttccctgaaaactgtgtgcaggtaattccatgtgcc

SEQ ID NO: 9172 - DNA, 1350 bp, Homo sapiens
ggagtggctagactgagtgatttcttaagtcttttttagctcaaacattttatgattctgagattataaataatacattttatattaagttatattaaattacccagctgacttagcctgataatctgtatttctcttttctttcttttacaaaattatatagaactgctatgatcttctggtcagaaagaaaagacttattgttctcttcagccactggttacttcatgcctatggaataatctccatttccagagtggataaacttgagcaagatttgccccttttggctttggtacctacaccagcccttttttacttgttcactgcaaaatttaccgaaccttcaaggatactctcagaaggagccaatggacactgagtgtagacatgtgaaatgccaaaaacctgagaagtgctcctaataaaaaagtaaatcaatcttaacagtgtatgagaactattctatcatatatgggaacaagattgtcagtatatcttaatgtttgggtttgtctttgttttgtttatggttagacttacagacttggaaaatgcaaaactctgtaatactctgttacacagggtaatattatctgctacactggaaggccgctaggaagcccttgcttctctcaacagttcagctgttctttagggcaaaatcatgtttctgtgtacctagcaatgtgttcccattttattaagaaaagctttaacacgtgtaatctgcagtccttaacagtggcgtaattgtacttacctgttgtgtttcagtttgtttttcacctataatgaattgtaaaaacaaacatacttgtggggtctgatagcaaacatagaaatgatgtatattgttttttgttatctatttattttcatcaatacagtattttgatgtattgcaaaaatagataataatttatataacaggttttctgtttatagattggttcaagatttgtttggattattgttcctgtaaagaaaacaataataaaaagcttacctacataaaatttcaatgttttgacacttaattgttgtttggcacaatagtatggaagtaattcaaactggtaaatagtttcctctcatatctcgggtatatatacataccatattttattgatccagagatacttatttcactttgtgacatctctgaattaggatgcatcttacaactgatggcttattagatttaatgaaatacagaagatacacagaataaaaagggttttcctgtggttggtttgtggtttgtgataggtgttctgtgatgtttatgctttgaaggccttaagactcatggttgcaaccatggaagcaaaatgaaatttttagctc

SEQ ID NO: 9173 - DNA, 1253 bp, Homo sapiens
agtggtaacagctctcttcttactcattactgcaaattgattgtctttcccccctccctccagtaccataatcttagagacaaaccttaaaacagctgtttttaggctgttccttgtactcttaggatatttgagtcacttgtgtcaaccactaaagtatagagaaaagtgtattagatgtggtttttaattttgtgttgctaaaaaaagtgcatgatggtgagagcccaagttatctttccctcttcggtgttcttcttctcttctctgcaatgcttctgtagcttctaatgttccccgtggctaggcctttcctgccgagtgctctgatgcaatagtggaaatcgcttatatgtccttgggttgctggttggattaatctttaataacaatatatagaattgtagactgatgttttagcatttttccaacacacacaacgtaaaaataaaagcagtcgaccgcacttatggtaatcagttttgtataacttaaaataattaaataaatgaataaatccaaaacaaacatgcagtacttttgttgtatgggattggtgggctgatttacatgtatggttactaaaaagtaccagcatgttaactttattacaatttgtattactttctctgtagttcctaatggattcaattacggactctggatatttgcacttatgtacttgatactgaatgcataaataaatgttactaaatgtagaatgttctccctctcttctcatgcatggtcttaccagaaaacacaaaagctcgaagtgatgaagtcactcgatgacattctaggagggctgagagcaaatgctcaccttatttctctctaggactgtggagtcaaactgcaacctggcttacggtttttctgggtcattaatagaaaactgaaaagtggtaaactgtcaatcactcttcatattgtactctgtcaggtggatgcagatatttaagatagtttttaaaaacttgaaagtgatataaattcttacataaactgtacggcaatatgcaacaaaacactggcaaaaacaattgtaattgccatgaactcaccgttttagtaattacttattaagcactgactgtgtgccaagcacttagaatagggctgtgaataagaaagatgacaattcctgccctcaccatgtgaagtcttctaataattcctcactgctttttatacaagtccaattgcatattttgtttcactgctacaatcaaacatcaaagacgaagagg

SEQ ID NO: 9174 - DNA, 1293 bp, Homo sapiens
gtagcttccgagtccctacttggccaagggccggcacggaggggctgtcgatctactgggcacctaatagccgcacattctgtccagtccctggcgccggaacgtgaaggcccgggtcctggctgctatccgggatccggacgctcccttcggcttcggcctggtgctccaggccgtaaggcaaaggcggcggcagcagcagcggcagagaaagaagctgggtaaggcagtgacgtcatctgtggcggcccctcccccgcccgccagccctcaccgcagttcctgcccaacgacatccgggtctctgtagctgcgcgccgcgccgcagctgtagcggcggcggagccagcggggcggggcgagcggaggggtgggggaggggcgacgcggtcgtgagcgcgcctgcgcggggccgcgctagaggcggcggcggcggcggtggcggcgctagggacgggagcgcgcgcgggagctagagagcagtggtctcggcgctcgtccggcccgcagcttcgggtcctcaggcggctgttgctccggaacgggtggttggggaggggggggtggggggactctagacagctgaggcgcgaaagcgatgagtcctcggctcttcctcctccttctccgggacccgctctctgcctccctctccaacgcccggatgatctgagccgcgagggcgccgacagccgggggcccggacgcagcccggctcctcccctcctccgccccttccccagcctgacctggcccgccgctgcagcggtgacccctcccccggctgccgccgtcgccgccgcggtgaccccctccccggctgccgccgccgccgcctcggccgaccagggacctgcccgcctgcggctgctccgggtaagtgcggcgctcgggccgacggcgggctggcgggcggtgcgggcctgcgcggcggcggcggcgggcaggcctggggcctgtaaacaagccgggcgtctgcccgggcgctcccgggaggagacgcgacaactccaccccctggccggcctcctcccccgagccgggcggcggacggcgaggggttaacgctcggcgagggcggtggcggggaggcgggggcggggtgttagttgcggtggcgcggggagggggcgcgaccctctggccgtccgcggccgagatgggtgtttgtggcggcgaagcaggcgacggccgcaggccggcctggccggagagcggcctgcagaacttttcccgagcggggagggggcgtccccgcgcccccacccgctcgggcgcgccgccccggctgtc

SEQ ID NO: 9175 - DNA, 1228 bp, Homo sapiens
tctctcctgtcttttggagtattggttatactgtattctctctatactgttcgggggagggggagtcattgcacacacacacgcacgcatgcgtgcacatatgtatttttttctccctgaaagtaacattttcactagaacaagtataactgtaattggcacagctgtaaaggttctcaaggctttgaagagcaaaaagaaaactaaaatattctcaaatttttttcttcccagggaagtcgagacaacatgagtgtgattttgatctgttttccaaatgcacccaaagtatcgccagaagcagtgaagaaggaggcagagttggacaagtacctggaatgcagagtagaaggtggatcatttaacaaaaaataagtagctttattaaagaaaaatcttcaacacaatcaaactttaacattttagcttttagatttttatgtgtctttgacagctagtgtctagtgtatgaaagtggaaaaggacatttctgtagtagctgttaagatgtatgcagttgtcctatcacagttatattagaaataacaactagtgtggaaagtaacccacattctgttcaggatacttttgttttaaaaggctaaaatgtttgtgtgctttaaaattcttaatgaattcactggcatgagtaattttatgccgggaaaatctgatttgtggtctatttaattacaaagagattgtgatggtgataatttgaataccatctttctatgaaaagctgtgtatattaattttaatctctagggccttttttcaataacttgaaaatcacagcctcatcattagcaactttatatacacagctttaaaaaatttgctttaaactgtttcagagcttcttccctaagccataaactgtctcacctaaacaagatagacctcaataaaagacataatatttctccacctggcagaaaagtaactgccaagtaagattaagaaataagttgagcatttctggagtatatttctcataattctgcagagacttccagtttattgcatatatgcagtaaagtgtatatattatgcagtttctctaagtggaaaaacttgacatgactttaatagtgttaaaacatgaaaatgctggtgagctgaggtagaaaaaaaacaagaaaaaaattttaaaaatagcgttaaaatgcattttaggctcctaatgtcgttaatttgcacgttaaagacctctaatcgcatgcaa

SEQ ID NO: 9176 - DNA, 1275 bp, Homo sapiens
tatagggataagttgatatttaatgtattggcactttaacttgggcagacatgttttcttattggtttaaagaagtaataagtattttaatatttttactatgaaatgggatccaattttagaaatgaattgctacttttctctttagtgtgtacactttaagttttagatggaattatgaaatattcactttacgttattttgttacaataataagttttatatttcttattatcaagcaagagttgccacctggacagagtttacattgatactcaatatttttgatatgttaaagtgttattatacttgtaccattcaattggagattgtcataaattaaatatggtattttttactcagatttgatgagactgcaactagagaataaatattacattaaaattgctgctattttaaaacatagaatgtaactgtttgtattgtaaaagttgtgtgtcctcagtgaaaaatactgccttcagcttccaaagcaggcacctgaatgcctttttcttttctctctctcttctttctttaaatacatgccttcactagattgctgtgacctactaaacctcattttatttgcttggaacatttttggcttctctgtccacaccatagaaaaggacaaaggccttccagctctccttttctcttatttgttcccttctaaatacttgactctctgggggtgtgaaaagattcagctcataatttatactactattaattttgtggtccttctaagccaatttaaaattatacttttgtgtatatattttcaaaatctttgctactgactaccttagctttaaagttgctaatttggagatgactgatagaatccctgaaacttggtggaggggagtggaaaggagcagaatgtgtttgtgtatatgtatgtgaaacatggatcttctatatataaatattctttagaaaaagcgttcagtctttttacaattctaagtaaaacgtataggtcaacagaaattaaaggaatatttcttaaaattcatttatttttcttttttgaaagcagacagaagcaaggctagtatagtatgaatggtcaggtagtttaaatgcgttgtcccacgtggaacaggagatattaactgtttttaaagctttacattatttttttacaagaatttgttttcctgtaattttcttcacagttaaaatatcctaatttatattttaacaaaagagatgtaagatacatcaaatatagatgattcaaggtaatgttttttagacctgaaa

SEQ ID NO: 9177 - DNA, 1629 bp, Homo sapiens
tcattaaaaaattctttttagtagatttattgattgagtaatacatttggacagcctcatcataaaaccgcatttcaaatattttccaaaacaaaacaaaggattaacaattctttgaacagattaaacattgctatttcatatgtacacatatatacttatatactttaaaaaacatttatattctaaaagtcatctttacagaacattatctttctccattatccagaaagtatggtgtattttggcaccgctaaattttaacgttgttccttattttgcttccttttacaaaggactctacatcaacagatgatatgtggtaaaactgctcatctagccatggagtttaccttcacctccaaaggagagtacagctcaactttgttgaaacttttaacatccatcctcaactttaaggaaggggatatgacatgggtgagaatgattacatcagagaacttcagcagtacaacagctagcccagaactgatttttttttttttttttgtaaatttgagacttatgtaagcgtgatttcaaaccataattcgtgttgtaaatcagactccagcaatttttgttgtatgattttgtttttttgtaaagtgtaattgtccttgtacaaaatgctcatatttaattatgaactgctttaaatcactatcaaagttacaagaaatgtttggcttattgtgtgatgcaacagatatatagccctttcaagtcatgttgtgtttggacttggggttggaacagggagagcagcagccatgtcagctacacgctcaaatgtgcagatgattatggaaaataacctcaaaatcttacaaagctgaacatccaaggagttattgaaaactatcttaaatgttcttggtaggggagttggcattgttgataaagccagtcccttcatttaactgtctttcaggatgttccttcgttgtttccatgagtattgcaggtaataatacagtgtattcataagaatctcaatcttggggctaaatgccttgtttctttgcacctcttttcaagtccttacatttaattactaattgataagcagcagcttcctacatatagtaggaaactgccacatttttgctatcatgattggctgggcctgctgctgttcctagtaagatattctgaattccattttatcaataaagcttgatttaacaaacaagaaacttaatcatgtatgtgtaattcctcttttaccctggccttttaaaacactgtgccgttgtaatgagacgtttctcatagggaaagatgttagtctcttttaattggacaacactgtcactcaaggcatagatgaaactttccttccattagaaagactaaaagatttaattcttggttgtaccttaatctattttttaaataggtttctttcaggctgcttatttttcattaagatgtgtatcagcttggatttgcctactgtttaattaaaatatttattgtcaaagtttgacaatctaacactctatggtaggggtgtgtgtgtgtgtgtttgtgagtgtgtgtttgcctgtgatttttaattggcccatgtctttagaatccaagtggttaagatgtatttgtgatttgaaatatagcatgttgata

SEQ ID NO: 9178 - DNA, 1186 bp, Homo sapiens
cactattctacaaaatgacataaaggaaaattagtattcagattctcaattattgtagagaaagtagcataacagatttatagggtcaaaaaaagtgtgaaaatgtaattaatcaatgagagcaagattgcttaaaagtacatcatttttcactttcaaggagatagcctatgtaattgttcacccaaagagcatattgtggaaattttaaaagaaaaatcattcctagtcttttttttcatcaattccaatatgttctggctgtcatttactttttcaggtagaagtggaagatggaactggaaagaaaagaaaaaattggataaatatttatttttctatattttgatatatgttttagtattactttcaccagttattcttatttcagttattttgtctgtgcaatgttaacatcatggattaataaggtattttccacctcatgcatttttatgtatgtcattaatgcagcagcatttgttttatagttttctgttactttgaatttgcaggctatatatactgaacattttgggaagtcagtagaaaatgatagtgatgaagtagaagagagagctgagaattttccacgaacgtctgaaattcctatatttttaggaactcccaaagctgtgaaagcacctgagtcattggagaaaataaaattccctaaaacccccccgttcgaaatgtaggattttaattaataactattgttaaattatttgtatgttgaattacataaataactgataggaatagtaaaatgcttagtacctttaacaagtttttattatgtagtatttcagacatgcaaagaagagaaagactaatataacacacctccatttacccatcaccctgttttaacaattattaatacctgttttaacaattattaatactctgctgttcctgtttcatagaccctcttccccatttttcctgcaacatttagctgaagatggcataaatcccacgtacttataaagcaatagtgtgtagatttgagatttttccaaaggataaagaaaatttaaaatgtcaagctaagcctagcatagtggcatgtgcctgtagtcccagctatttgggaggctaagggaggaggatcccttgagcccaggaatttgaatccagcctgagcaacatagtgagactctattaaaaaaaaaaaaaaagt

SEQ ID NO: 9179 - DNA, 1214 bp, Homo sapiens
gttcttttctattctttcagttgaataagggccagttggtatgcagcccatgtatatgtgaatggagtaagataaaccccatgatctccttgcacagaattgcaaatgtcttttgccataccaagggccagactcagaacccttggagtcatgtggcagaatttccctcttacataaaccaatgcttgaaaatgctgcaaatgaccctctaatgatccctgaagatcaaaacaggggtaaatgactccctgcaaaacccaacccatgctgctggctgtgggatttttggtgtaagcctatctatgcactctatcagccagaatttggcatttagctcttagttaaatctagtaaaggacagtctattgtttaaagagaaggtgcatttgttcctcaatcaagcaagagcacctgtgttgtactgctttatatctcatgtatatttatagtaatgaaaagactttttaaattgtacacgtttcagtgcctttcttgtgttatgaaaggcaggtagatattatagccataggtaaaaatccatagttaaattgcacactgaccttaaatctctctgtgtatgcccttgtatcttgcatgttaaaagttggattattgggcatgtgtggcagcctgccctgctacatgctagacaagtgtgctttagtacatagccacaagttcttcattctttaaaatgttttgacagatcatctcataataaaaataattcaggaaaactatggggaaatagttacatttcacaaaagatattttaaactctttgtaaaacttagataatagagcctagcagttactttgtatctaattgatacattttatgttaatttaccaccatacattttattaatcaaaattgtatagcatgtgactcttttggctttcagagttctcaaaaatattattttgttgcatgtactgtatgtttagaggcaaccaattatatactcaatatggttttactgtgccttacacaaagagaaactctatacagaatgtatatcatggggtggggtaacagagtctttactgcactgttaggtgatggcacacagagcatgtcccagaacatttctgtgcttaattacccaaccaaagagatctgaagtatgtatgtcgtactgtaatgggggtttatgcctggacaattaagtgttttatttgttttctgaaatgatgtgaacttatttttctaa

SEQ ID NO: 9180 - DNA, 1808 bp, Homo sapiens
tttccaacaaagttttactttttgtaggattttaaaaataatgatttttaccaggaatctattaaggtcaatattaataacactgaaacaggaaatctaactcccaatattggaattttggtactttttttcacatccttgttctttatttagcaactctgattcatttaaatatgttttttatagaattctatgtgcctttttacctcgtggcctttttattggtagtaaggtacagaagtgtcaacagaagcactgatggttcttttctactatctaacagggttaatttcaccacaaaattgctttaaatctgaagaacttaagtttcactaaataatatatatgacatttatcacacaaatggataaacaactaattattgttgatacttttcattacaaggaaaataagttataaataccatgtcaaattgattatacaggctatgaaaaccattttaaaggaaagaaaatatgtaaattctattgagcaaaattctgtcctgttgaaacttagttctaaaggttttgaatcagttgttacactctgacacatgactgttgtttgcactatattatcatgtcttctttaaaagtaaatatttttggtttctgtaagaagcttgtttaataatgttgtaagccgtggctatagttttatcaagactctgaacacaagatgtaacaatgcaaataaatttatgtagtgagtaaagttgctctctagtctctgaaaagcaaaaaaagtgagaaaataatttcttcagagataacttcaagttgttgaacataaaggtgttagatgttagcacatcttgctttttttttttttttgagatggagtctcgctctgttgcccaggctggagtgcagtggcacgatcttggctcactgcaagctctgcctcctgggttcacgccattctcctgcctcagcctcccgagtagctgggactacaggcacctgccaccatgcccggctaaatttttgtatttttagtagagacggggtttcaccgtgttagccaggatggtcttgatctcctgacctcgtgatctgcccgcctcggcctcccaaagtgctgggattataggcatgagccactgtgcctggccacatcttgcttttttttttatgatcagaacaaagggcccactctagttctctacatgtcaatcaatcaagcatgttgaataagggacatagaggatttaacttttgttatcataaatggaacttgcaggcatatatcaagaaccctatgaagaattcctctcccatcattttgataaagaactacatcatttttgatagaattggtgaatgttcctaaactgctgaagctacatgttttttgttttgttttacaaagtcaggtgtttgagagttcttttccactctactactactcatagagcttgttttttctttgggtgtgtgctgatcctgttactgagattaattacatggctctgcagtgtagtttacataaaaatgatgttttccacttgattgctgcagatatcaagagtttgttattttcaaatacccatccaacaagagagatggggaggtttttagttatatatgctatatatatatatataactggaaatgttttatatgttttccgaaaatacaataagcctctcttttattcagtgttcttcctcttttctcccttatgaaaaagaaaagatagcacaaaacttaagacttacctaggaaacccattcatattcccaccatgatgtaattataaccctacaattacttcaggtagctacacaatataccaggtaagaa

SEQ ID NO: 9181 - DNA, 1457 bp, Homo sapiens
tgcaaggaatgagacaatatattcttggaatattaaagtacttttgaagtaactcatacgttttctcccctcttccatttgtttagctattgagggtttgctttaaaacaaatttatgtagaaatatcagtactataatagtattgtgatactgtgtatttcttaagcatatgccaggaaggagagcattagttaggtgtccaaaaaacagccaacaaaacaaatcagctctgaaaatcgtgaagcagtgaatattttagaattatttttgaaacctctttcagaactgtttttagaccccgtggtaatttgctatgtaatttaatactagtttaggcactccatgtacagttggtatgtttccttttgaaagataataatctatttataataaaagtctgaatatttcaatctcggaattcctctttaaaacttgaatcagttttactattgctttttaaaatgttacctatttatatttgctttgtatatcaatgctacacttcttgttttgttttaggtatttaaaccatgtcagagctgcctcaccacaggaccttgctggaggctatacttcttctcttgcttgtcacagagcactacaggatgcattcagtgggcttttctggcagcccagttaaccatttataagatttggaccttggagctgaaccagggagctagcaaaagtaaagcagacttataaaattatagctatgtgcagctgcacaacacagtccttccactagcagctgtgttaaagtatttataaggagaaaatttcagaactaagttgagtaatataggggatatatatttgtgaaaaataatttttacttatatttttcagaggatttgacacgataagcctcatctgatggaagagaggaataaataattcacctatatgtgtttgaggttgtgacagacttataaaatctttttaaaaaataaagctataatttatattaagttctgtggtttttctcttattacagtgttttacttgaacacattttaaataccattttgattacaacatttactgttaatatccaagtctattatttcttctcataaaatgttcccctttttcctaatgtcttgttaatactagtccagacaagtggatatatttcctttgaccaagttatggcaagaaaaacctgacccatgataatgtcattccctcaatactaaggactcaatgcctgttttaagcagtggaaaatgaggcaaaccttgatcaaggtgttatagttcccagctgtgagccacactcaggataaaacaaaacccagcattaacctgctttagtgacacattcaaagaagttaataaaatttaatacttaaatgatacctttcacctccaatgtaagctcattttatgatgaatcctttggagactggagaaggtacattttaagtacagttccctatgtataaattgtatac

SEQ ID NO: 9182 - DNA, 1121 bp, Homo sapiens
aaaattgagtgacacatctaccatggctcccttttacaaacacaaaactaaataaggagggaagcttgtttgctgcatagaagtactgtctgcaacttggctacccagcatgaagatatgggtggtgtgttgtttcaaaattgtaggtcttgccttgtctatctggtgacataagagtataattaagccagttaattggcctgtctgaaaaattcctcatgtgatatggtaactactttatggccatggccctataggattgagatggagagccatttggctttaaagagatgactttttctcacgaataagtctaatgcagtatattaactggccttaggaatagcataaacaccaggagtctaattaaaatgcctttaaatgcactgttgtttggctcttacagtagtaaacttaaatgtgtatgtgtttgcctgtgtgtatacacaacctatccaatatcaatggttaggatttaggaccaaggaaattaaccaaaaagcataacaccttttttcaggttcgagaaaacaactacacctatgaatttgatttttcaaaagtctattggaatcctcgtctgtctacagaacacagccgtatcacagaacttctcaaacctggggatgtcctatttgatgtttttgctggggttgggccctttgccattccagtagcaaagaaaaactgcactgtatttgccaatgatctcaatcctgaatctcataaatggctgttgtacaactgtaaattaaataaagtggaccaaaaggtgaaagtcttcaacttggatgggaaagacttcctccaaggaccagtcaaagaagagttaatgcagctgctgggtctgtcaaaagaaagaaaaccctctgtgcacgttgtcatgaacttgccagcaaaagctatagagtttcttagtgctttcaagtggcttttagatgggcagccatgcagcagtgagttccttcccatagtgcattgttatagcttttccaaagatgctaaccctgctgaggatgttcggcaaagggctggagctgtgttaggcatttctctggaggcatgcagttcagttcacctggtaagaaatgtggccccaaacaaggaaatgctgtgcatca

SEQ ID NO: 9183 - DNA, 1472 bp, Homo sapiens
cattcctttttttggacactggtggctcattacctaaagcagtctatttatattttctacatctaattttagaagcctggctacaatactgcacaaacttggttagttcaattttgatcccctttctacttaatttacattaatgctcttttttagtatgttctttaatgctggatcacagacagctcattttctcagttttttggtatttaaaccattgcattgcagtagcatcattttaaaaaatgcacctttttatttatttatttttggctagggagtttatccctttttcgaattatttttaagaagatgccaatataatttttgtaagaaggcagtaacctttcatcatgatcataggcagttgaaaaatttttacaccttttttttcacattttacataaataataatgctttgccagcagtacgtggtagccacaattgcacaatatattttcttaaaaaataccagcagttactcatggaatatattctgcgtttataaaactagtttttaagaagaaattttttttggcctatgaaattgttaaacctggaacatgacattgttaatcatataataatgattcttaaatgctgtatggtttattatttaaatgggtaaagccatttacataatatagaaagatatgcatatatctagaaggtatgtggcatttatttggataaaattctcaattcagagaaatcatctgatgtttctatagtcactttgccagctcaaaagaaaacaataccctatgtagttgtggaagtttatgctaatattgtgtaactgatattaaacctaaatgttctgcctaccctgttggtataaagatattttgagcagactgtaaacaagaaaaaaaaaatcatgcattcttagcaaaattgcctagtatgttaatttgctcaaaatacaatgtttgattttatgcactttgtcgctattaacatcctttttttcatgtagatttcaataattgagtaattttagaagcattattttaggaatatatagttgtcacagtaaatatcttgttttttctatgtacattgtacaaatttttcattccttttgctctttgtggttggatctaacactaactgtattgttttgttacatcaaataaacatcttctgtggaccaggcccctttgatcagcttttatgttcaaatattaataatatttgcttcaacacctccaactcataaaattgtttaccaacaatttaagcacttatgaaaattacatggtactggttatttctacatttatcttagtgccatcaccttaatgtatgttgagtccctaaatgtcatgttaaataataacaaccataatatcccattgaaaagagtatgttgttagaaaagaaacatcatttttaagtttctgagcctattaaaatgctcaaacacaaaatattagtatttttaaaatatgaatgggatgagtgaagca

SEQ ID NO: 9184 - DNA, 1121 bp, Homo sapiens
aagacgaaacaactgactttaaaaatgctggaacaatgtgataaaaaataaatttgtaacaaatcttctcctttttagcccttgtcattttagccctttagtttcaactctgcattatatttagtttatatagtgtaaacttttgtttgccattaattcatctttttaggtagaagacattaaaatcacaggtttatgaagaatctctgctcattggaatgaaatgcagtcatttgaaatgagaaaggccaggatccttttttgtaccttaccctgtcttcaagagtaaaggtgaacacttacagctctcctccttgatgtcaattttgtatgttgatcattccaaactgagaagaataaagccacattttagacatatttatagaatcaattaaagctatatgtctaaaattcgtagggcaacttctgagaagaaacaccgtctttttcttttttaatggaaagtgacaatgtgacattagtcatgttgtgtgcggtgacgcagagtaactgaggtaatctgactgttgcactatgtgacatatttcaggacgtacttgctgcatttgcagcagccctctctctctgtcccttcccacaattctgctgttgctgcaacttgagttaattgtgacaaatgcatctttgtgttatattttgtttgcttcataatttccagaactatatataaatatattttttaaatagcaaatattgtagttagtgagtgatgatcactccaaccttatccttaccatattggtttcagggataggattaagagtgtctttggaagagaaaaatacacacaaccctgtggtttagaatgacgctgaggccttaggctgtgggcctagaacaactatgtgagtgaattcacccatctcatactttgaatcaagcatgcattcctgtttctcattgtgaagtatccccagttgttttccttcagtgttgagtttttgtccttttaaattttattatattttgctctccctaacatttgactgttttttataaaagaaaagaaaaaaaaagaaataaataataccctcgatgccactggatactcacaagcagggttatgctccttcatcttgggcttgtttgcctaaatgaaa

SEQ ID NO: 9185 - DNA, 1527 bp, Homo sapiens
gaattgtggaaaaaattggaggatctggagttaaagagaggtcttagacgtgatggaataattccaacttaacaaaaacaatgacaacaacattactaacctgtggagtcacacgtttatgtagtagaagatggagcaacagttttctgtattgtgcaactttacagtagatttcacctttgtttcattattacagcagcactgtatatacctgtctctaagtaaaggaaaaaacaaaataaggacttcaatccaaagtttggacagtagatggacttctcagaactttgcaaacataatcattgttctcaccctcttttaaaaaaaaaaatcggtcttcaaagatctgttgatgaaattgctatgttaaaattccattatcgggagttccttatttatcactagcagagagtatgatacaattttcaaatgtgaacaatcttaaatttagcttgtctttctgctaagctgttaaatgtatttatagtaaaggaagaaaaaaagactgtcatttccttataagtttgtgtaacatcctcctctggataacttgactgtaatttaacatctttttcttttgcacatcttcctgagttgaatgtccacgtggaatggggtcatgaattataaaagtccctgataaaagttttgtttactggggtgaacatctttccagtaaccaggtagtcctggtactcctttagttttaaaattaggagttaagagagaagaggtgataaacatagtagggaagggaatatcggattcatgcatcagtttatggtgaatccaaatcaatgtcttgaatcctttgaaaacaggcactgggacatcacaggcttcagtacctgaccagtattagttgcatatatcattgaacacacataccagagatgttttagaaatgtgagaaaaacatccttttggaccatttgaaataagaaagacaaacactaaacaatacaaccatgaaattgatcaccgggattgcaaatctaattgggaaaagagttgagcaaacagcttggactgtttggagttgttgccttactttttaatatgtatttataaagtattccagcaaaagaggatgtagcctctgggaaaaaacaaacatgttacagtgttttttgtagattctcgttctatatctcatcacagcgccagccctgtttttagccggaaaggattcaggataaacattattatgcattctgaattggatgcatattcctaactactgtatttgttaccaaaagtggttctacaaatgctactgaaaaaaatctggaaattcctaatgtcctgagtattaataataaagtttaaaaatgcttttatatcaaaggtgcatcgtgaccaaattgtttaagaaaaaaaaacaaaaaaaacaaaatctagggctgtattttatatatatatatatatatatatatatatatatatcttattggctctctgctttgtatttaaatgaagaatcttacatcttgggtaggtaaactgctgataaaatttgtgtacagt

SEQ ID NO: 9186 - DNA, 1563 bp, Homo sapiens
taggctggagagaaacatgaaaaagaaaatgaagaattcacagggcaactaaaagtggctaaagatgttgaaaaactcattggacaagtggaaatctgggaggcagaagccaaatctgttttggatcaagatgatgtggacacctcaatggaagaatctttgaaggtatgtgtgtaaaagtattaagagggtactttcatggttgtgcatttatgttttaagttaaataagaagttttaaagtaagtagtaataagcctacagttttaattttctttgttgggagttttaaaaatgaatggattttatccctggatcatttgctgttattttgcttgaaagcagaggatagattaggagaccactgataatacctatgaatgttaagctcttggacttattttcttagctataacatgggggttaaaatattttcttgcaccagaggacaatgaggagacgagtgagttcagtctcattatagctcagtgcagagtacacgtaagagataatataatcaggctgggcgcggtggctcacacctgcaatcccagcactttgggcggttgaagtgggtggatcacaaggtcaagagatagagaccatcctggccaatatggtgaaatcccgtctctactgaaaatacaaaaaattagctggacgtggtggcgcgcacgcctgtagtcccagctcctcgggaggctgaggcaggagaaattgcttgaacccaggaggcggaggttgcagtgagccgagattgcaccaccgcactccagcctggcgacagggtgagactccttctgggaaaaaaaaaaaaagaaatcatacaatctatgctttgaaagttcaccctctgatgaagccactctcctttccttactcaatgcagggagagtgactcatgttgttagatctccattctgtctttattctcaggcagtcaactcattgaaaggcagtgaggcaagagtgtgtcttaatatcacttagttctcctgggagttatcattgaggtttttactgagttccagctcagctgtaaaacctacagagcataagttacaacaagatgggaagttcctggaataaaaaggaacatttatataattttttaagcctacatttctgaaaggtgtatatttcagcattttgtgttttcattgtgtgatagtttttattgctttgaaaatattatataaatctatcatgccatctcatctgccagtgcttttctgattttatttttagtatttatttactctatctggaatttattttcttgaaaaaaatgaggtagaaattaaatatttaaaaattttttaaataatttaaaaattttagtgaacatacaagcacactgaaatatatttctattaagaaagaattaagtagatattcattggatcaaaatattggatcaagatgtattctaaagtaagaaatgaaagttcctaaactgtgtggataatgagataatgtaatctcatttgtggtttttaaacagagttgtatttttatatgtaatacatttatattcatagaaaaatatctgtaaagatatacc

SEQ ID NO: 9187 - DNA, 1148 bp, Homo sapiens
atcacaaggtcaggagatcgagaccatcctggctaacatggtgaaaccccgtctctactaaaaatacaaaaaattagccgggcatggtggcgggcgcctgtagtcccagctgctcggaaggttgaggcagaatggcgtgaacctgggaggcagagcttgcagtgagccgagatcacgccactgcactccagactgggcgacagagcgagactccgtgtcaaaaaaaaaaaaaaaaaattaagcacacttaacctgggtagtcaagaccttctccacttgctcatctctttcttctcattcttcctcacacctgtgactgggacgttactgaaataaaagagatgactttatattttccctctgggaagtattcttccttccgattccaaatcaattccataccgttgaatgtgtgatcccactttgaagcaggattggcagctcagctcacggtgtcctggtttccacagggcactccagtgtttgtccatgctggcccgtttgccaacatcgcacatggcaattcctccatcattgcagaccggatcgcactcaagcttgttggcccagaagggtttgtaggttagtgttttttgcaaaaccagtgaatagactgtatgtttcttttaacatcaggggaattgggatggcatttttactgttgctttcctctttacagtgacggaagcaggatttggagcagacattggaatggaaaagttttttaacatcaaatgccggtattccggcctctgcccccacgtggtggtgcttgttgccactgtcagggctctcaagatgcacgggggcggccccacggtgagtggtgggttgaagtatctgattatcggcagtgtgctgacggccaaaaggaagttggatgacttctgcctgtttcttcattgagttgctcttatcctcgtgattaacaggcagcaaaagcaagggacgggcagacagcccttgtgttggctgccttatcactcacaggcaccgtcagcgctcagcattttaagagggccaaaatcggctgcctggcctacctttcggaggacatctgacaatatctaaacccctccaaggacgtgtactcggctagccccacaaaaaactgttttacgttcagactgttctttttaaatctgcat

SEQ ID NO: 9188 - DNA, 1128 bp, Homo sapiens
tcaaaaaaaaaaaagttcttccagctaaaacctttattttttgactacatctccacaaaatggagctatactgttagccagtatcctaatagtatagtgcagtttgcataatgattaccaagcttgaaactggaaatgtcatatgcactttcgtgtgtatcaggcagatactaaacattttccccttgagtcagcttaaaatttttccttcttttgaaatctcacgcagttgttttctggagaaaaatagagactgttttagtatttgttcttattagcgtatcatcagaactcagcacagtctgccttataagaaaacaaaaaatttttttatttataactcttgagattgttacttcttgctctttctgatttcccatccgtaaagtgggtgtaagcaatacttacctcacaggggtgttgtgaggatttatattaaacgtgttaagttctctcagtattattgattaaaatcaaccatataaacgacatttattctgtagctagacctattaactttagtatttcagcctataaattctaaaatgttcttaaaagcagtaatgtactatctaatattcaataactaattgacagaactcattgttattttttacaaataactagaaacaatactgttgctagaattcctgttctactgtaatttaatcatcactgtttctttttagccttcagtaaggaggatactagttctttggcattattgggaataaaactttgtcaatttcagctttattgaaagttctcccaaatatattgtttttgtttacacaaaggaaaaggaacaaaaacaataaataaatacctttgtttttttttcttttttgagacggagtctcgctctgttgcccaggctggagtgcagtggtgcgatctcggctcactgcaacctccgcctcccaggttcaagcgattcttcttcctcagcctcccgagtagctggaactataggcacgcaccaccacacccagctaatttttgtatttttagtagagatggggtttcatcatgttggcaaggctggtttcgaactcctgaccttgtgatctgcctatctcagcctcccaaagtgctgggattacaggtatgggccactgggcccagcct

SEQ ID NO: 9189 - DNA, 1221 bp, Homo sapiens
ttcatcaagtaatggtccaagaaagaagcttgagggaccagccaaattctctagagagcaggcaactgcttcggtaacctataatcaccaaggaggcaccctctgtccttcattctccttgctagttcaagttatggctgagacaatttaggtttccagattcttgttttaaataagagacctcactgcatctttcaagaatgaccttgaaatttttttaattaatttaaaaataattttatgttgtacatttctattaagaactaaccccactttttatcttccttaaccctgaagttcagtgggaaataattataaagaatctgtccaccctctgagcaactgggacccccctgcatccaaccccaaagccccagtgacatggcagcttcagggttgtgtagttccaacctagcagcttatctgaagcgtgcccataaatgaagcccatcccccactttgtcctccttccccctatttcttccagggtaccagccttgtgacccccaggtcatccaggaccgcatcagccacttggagcagtgctttgaggagctgagcaacatggcagctgggcggaaggcccaactggagcagtccaaacgactctggaagttcttctgggagatggatgaggctgagagctggatcaaggagaaggagcagatctattcttccctggactatggcaaagacctgaccagtgtgctcatcttacagcgcaagcacaaggcctttgaggatgagctccgtgggctggatgctcacctggagcagatcttccaggaggctcatggcatggttgcgcgcaagcagtttgggcacccgcagatcgaggcccgcataaaggaggtgtcggcacagtgggaccagctgaaggacctggctgccttctgcaagaagaacctccaggatgctgagaactttttccagttccagggcgatgcggatgacctgaaggcttggctgcaagacgcccaccggctgctctctggtgaagatgtggggcaggacgaaggggccacgcgggccctggggaaaaagcacaaggacttcctggaggagctggaggagagccgtggggtgatggagcacctggagcagcaggcccagggattccccgaagagtttcgggattccccagatgtgacccatcggctgcaggccctgcgggagctctaccaacaggtggtggcccaggcggacctgcgtcagcagagg

SEQ ID NO: 9190 - DNA, 2148 bp, Homo sapiens
tcccccacttctctttctctgacccctcccctccggtgcgtttcgtatcaaagctcctcaaaccccgtcccccgtgtgtcctgctgtgtgcagctcgctctttccttccttcctaagctatccaaggggatggacccaggctcgtggggaggttccacccttggatccaggaagaaccctccaccctgcctcgtgggtgggccaaaggctacagggtgcttcttcctcttcccccacccccactgtccctcatgtgccatgggcctgcctccccagtgacctgcgaaagtggagcatcgaggtaggagggaaacggcaaccagggagtcctcgagcctggggctgccctacctctacccattccccgaccagagctttgcccttgcttggctgcccgcctgcctctttggggaactgagctcagaggcaggtgcttcagagaaggaaacaaaatgaggggtggcagggataaaaagtcacctccattctctacctcccatgcagcatgaacacaatttctctccacctggctcccaaatttaaagatgtggaccaaggcctgtgggtactccaggggcaaggagagccctggggtcagtgacactgtcaggccaaccatgcactccacaaaggggagcatttggaaatgaaggactagctcctatgtatcaggttaagagcaagggagagctggccagggacagcagtttgcacagcagaggggaatgtagcaacagcagggcctcctaggccccatcttccatttcttaggtaagaagagcatttcctcagactcccaggcggaggactgagcctagccttcagcaaccaaggttctcctgggacccaaagtttatgggagaagggcaaagacttcatgggaagagagaaggaaggccctgggtagaaacgcttggtgctgttctctttggcctttaagacaaagcgctcatcttgccctctacctcctgataggcttgagggtttgccaaccacactgtggctacaggtggagggaagaggactccttcctccagagtgctatgttcaggaagtttctttaaccccatatggcccaagagtagctcgtaggaggccctttaaagacggaacaagtaatttaccagttctactggggttcctgcccaccgtcccaaggtgggcgaggcctaggaagagggtcattcttaagccacacattagctgcactgcgtggctgcagccaaaacaaagaactgggtgttgagtattcatcaactaagaaccaaaatccagggcactcatatgtgaaggataagaacctcacttccttactcctccaaaaagaagtggggaaagaaccatcaaacctttcctcctgacttaccaaaccaggaaaacagcaggagagggtggctcaggacttagggacagggtatagcttagatggtggaaagcaaaggagagcaggaagttgtaaatcactggctaatgagaaaaggagacagctaactctaggatgaagctgtgactaggctggagttgcttccttgaagatgggactccttgggtatcaagacctatgccacatcacactggggctagggaagtaggtgatgccagccctcaagtctgtcttcagccagggacttgagaagttatattgggcagtggctccaatctgtggaccagtatttcagctttccctgaagatcaggcagggtgccattcattgtctttctctcctagccccctcaggaaagaaggactatatttgtactgtaccctaggggttctggaagggaaaacatggaatcaggattctatagactgataggccctatccacaagggccatgactgggaaaaggtatgggagcagaaggagaattgggattttagggtgcagctacgctcaccctaaacttttggtggcctggggcatgtcttgaggcccagactgttaaccaggctctgctggcctgtttactcgtcaccacctctgcacctgctgtcttgagactccatccagccccaggcacgccacctgctcctgagcctccactatctccctgtgacgggtgaacttcgtgtactgtgtctcgggtccatatatgaattgtgagcagggttcatctattttaaacacagatgtttacaaaataaagat

SEQ ID NO: 9191 - DNA, 1878 bp, Homo sapiens
ccttttcttctctttgcagcagcccactcacccagtgtacaacattggaccagacaaggtgatccaggccactacatactttctacagaagccagtcccaggttttgaggagcttaaggatgagacatcggcagagcctgcaaccgactagaggacctgggtcccggcagctctttgctcacccatctccccagtcagacaaggtttatacgtttcaatacatactgcattctgtgctacacaagccttagcctcagtggagctgtggttctcttggtactttcttgtcaaacaaaaccaatggctctgggtttggagaacacagtggctggttttaaaaattctttccacacctgtcaaaccaaaaatctatcagcccacgtggtgtggttggtgaacagtgcatgccaggaggaagcagtccctcctcaccagctctccagccaggacgatcacacagagatgaatggcatctgagtattacggcatccagagccactgctgactcccacttgcacgccaccattcagtcaccagactgggtgccctccgatgggtggaataagtctgcttcatgccaaggctgggctttgggtcccaccaagatgagttctctgtaagactgtggtggagttgcaccaggaggtgcctctgcctctcgacttgcaccctggtcatttgtaagggaaaagagctggaggtggggagagaaagatctccttcagttgggagtccttccacttcaacactggagaactgagccttgcatctctccagggtccaaggccacgcttggtgcacaggcaagacttgcttcagccccaggtgtggtgacttagacctaggaaaccaattatgagtggaaagtgaccctctagttcaactgtgccagaggaaacagccctccagtgcccacctgcctcactcctccctatcatgtaccgtgaaaaccccctctgatggcctcaaggcagtgcctgcaggccgaggcccttctgggggtttctatctttcttccaccagactccaagcccactctcctccaagactgtgttgtcttttctcaccaagagtattaacactactaagtctttcaccttaacttatgactcaggatttattcacgtcctgcccactctaggctcacaggaataaaatcaagtgctagacacactggctgctactaaggcactagcctctgtagctggtggtggcagcgtggggtgccgcccagcgtgctgggtcctggcagtgcctctgctgtgctgcacattgagccctttctcagtcagtggagtatcaagttgggccatctgtctactgacctggccttcatgtaagcagctgtgggctgcgggcagacaggagctcagagatgcagcatgaggcgcttagaaaaacctggccatttgctgcctctaattcccttttgctttgccatattgggctatgtattacctccttgaaataataaaagaataacattttctatgatgtctcttatttgtgatctgtaccaagaaaatgcccaatggtaggagctactaaaggttgctcagggatcgtcagtctcctgtgtgcaggattccagactgttcacatcggtggtgacagaggaatgaccgagttccatcctcacatgccgtctcctccagtagaggaagccgtgggcctaacagagagtgggaagagatgttttccaagctccctggggtaattcggtatgctatgtcccagccctccacacactgcacttcatggtctgtctccgacagacagcaaggactgggcctagtagccccagagcaggctgacttagcaagggtgggtggatgtctggccagaggcaggggctgtcacagggacaggctggaactc

SEQ ID NO: 9192 - DNA, 1878 bp, Homo sapiens; identical to SEQ ID NO: 9191

SEQ ID NO: 9193 - DNA, 2153 bp, Homo sapiens
aaaagagctttgaggtccttggagtggaatgtgctgtgtaagtaccagagactccaggtgttcagggacagtgagccctccccattgtcaatggtagtccaatcagggcagcctatgggctaggcccatgctgttctcaatgctcacacccgccttttcctacaaccacaggggaaagcgagagctgatcaagttctttgttcctggggaattcacttctcttcctccctcatggaagatgcaagtaaaaggaaatgcaagtaaccacctgggttagaaaacctcaaataaaataaaataaaataaattaaatgggttgaccttccaggctcaagctgagctgaaccaagggatgggcagtgggtggtgtcagtgggttggttactgggccaggcagcctgcatgtaggggctatttgaaaagcccaggtattttatgtgtattggtgacttgcttccaagtgtccagcttgtcattccaagtggatcttgtacacgagagctaagccaaaactgttctttggctgatacgtcttatgtcatcctttcctgctgttgtgtggcctcacaccttgtggagcctcatgctcctgggccagcttctcctctgttattgcactgctgaatcccacagggagctcacgctccagtctctccacggggcttccacggcaggacggtgacatcacaagccttctcttcagagttgggtgggattgcagagtgtctgctggctcccaggtccagctgggaaaggcgggagggaaatgaagtgtgtgagtgaacagccacccgaagggagctacttctgagcatcttgagcctcgggggccaacaagcaagcccttaggaagaacaggctggaccctgagtctgagactcggttactccccaagtctccagaaggcagtaacacactcccttggttgccttttagtccgtgcactggagaaggcgaggtcaagtgcccaactgcagaccaactacccctcctcagacaacagcctctacaccaacgccaagggcagcaccatctctgccttcgatgggggctcggactccagctcggagtctgagcctgaagagccccaaagcaggaagaagctccggatggaggccagctaagccactcggggcaggccagcaataaaaactgtctgtctccatcgtctcatcctcctttcagttcgttggtagagccctcagaaccatttaagagactctttatttttctctttctcccttttttttttaaatttttatttttacgtagaagctcttggacaacagctctcgttctccttccccatttccactgtatattttttaatgtattcccttcagggattccctgtccccaacaggaatttttaaaccaaaacaccccaacttggcagctttttctgtggaggacagacggccggccggacctctgagcacatagtgtcctgcccaccctaccagctcctccagccctgccgggcacatgcccgggggacgcctgccctgcccaggtggcctcctggcccgccctcacctctgatagactttgtgaatctgaactgctctactttgagaagatgaccggtttggagtaatcagaatgaaccctcctcctttttaagggttttttttttttcctttttctaaaaagctatgtatcgctcctattgaaagaccagatccttagagaagtttgtggtataaaaaggaagtggggacagattcgcagcacagagtcgctggcatgtttcactcctgcttctctcagccagctgtttaagcctgcggcgccagcctcacggagggccgtgtgacactctcgtggtatgtatgggagatggcagcagtgaagcagcagccaccagggagtggccatttggggttgggacagggagggtgttttgggtggcatagaggttttgtattgagggccagtgatgatgttttgatatttatttcctgctacttaaatttgaatctgagtgaattgtacctatttctgatgatgtcggtcttgcaaagcgacagattcataaagtaatgatgaaatctttctttcttcccgtgtgtatttctaagaaatagagccaactgattttgtatgtaaataccaagagcaatttacctggtactaaacccgcaccccagtgc

SEQ ID NO: 9194 - DNA, 1188 bp, Homo sapiens
agttaagtggtataatggcagctgaacaatgagggaggagagtggagttgagaactggtagaaatgaaatcactcatacagggaacatgttttttcttgagataatgaacatatagcccaaaatatgtggttgagtacattttgtttttgattgattgttcaaagatataatttttaagtcttcatatataagttaatgtataattatgcaagaaggaaaagaaagtgatgatggcactttgaggactttcaggcttagagctaattagtctgttatctggtagagcactaatgtacatggctgatttaatatacagattaacagatttaaagcttttaccctttacttgttattaggcagttaggttatcttccaacttgttggccagtcaacaccaatgtgtttcctccaagaatctcagtatatgctattttatataccttaaataatttaaatacatttcttactctttccacagcatgtagagcgcatgaagtacaggacaataaagcttcctacacatatcaccaggaggatctctttgaaagattcactgcaggactaccagagagaataatttgtctgaagcatcatgtgttgaaacaacagaagtctattcacctgtgcactaactagaaacagagttacaatgttttcaattctttgagctccaggactccagggaagtgagttgaaaatctgaaaatgcggccatggactggttcctggcgttggattatgctcattctttttgcctgggggaccttgctgttttatataggtggtcacttggtacgagataatgaccatcctgatcactctagccgagaactgtccaagattctggcaaagcttgaacgcttaaaacaacagaatgaagacttgaggcgaatggccgaatctctccggtaggtcctaaaatactgaatgaagaatgatgaaatattgtactttgtttttaggtgtagggcttcattccgctaggaaaaatagttaattatttttataacctgctgtctttgccacaacttagcatgacagttttctatctctgtgtatttaatacagaacaagcttgtccaacccacagcccatgggccacaggtgacccagaacagctttgaatggggcccagcacaaatttgtaaactttcttaaaacattctgagatttttttattttttttt

SEQ ID NO: 9195 - DNA, 1429 bp, Homo sapiens
agtgtttatatactaacaatttcttttaaattctttcccaaggtctgtcgagttgcttatgaaattatgcaaacactacatcctgatgcctctgcaaacttccattctttagatgacatctactattttgggggccagaatgcccacaatcaaattgccatttatgctcaccaaccccgaactgcagatgaaattcccatggaacctggagatatcattggtgtggctggaaatcattgggatggctattctaaaggtgtcaacaggaaattgggaaggacgggcctatatccctcctacaaagttcgagagaagatagaaacggtcaagtaccccacatatcctgaggctgagaaataaagctcagatggaagagataaacgaccaaactcagttcgaccaaactcagttcaaaccatttcagccaaactgtagatgaagagggctctgatctaacaaaataaggttatatgagtagatactctcagcaccaagagcagctgggaactgacataggcttcaattggtggaattcctctttaacaagggctgcaatgccctcatacccatgcacagtacaataatgtactcacatataacatgcaaacaggttgttttctactttgcccctttcagtatgtccccataagacaaacactgccatattgtgtaatttaagtgacacagacattttgtgtgagacttaaaacatggtgcctatatctgagagacctgtgtgaactattgagaagatcggaacagctccttactctgaggaagttgattcttatttgatggtggtattgtgaccactgaattcactccagtcaacagattcagaatgagaatggacgtttggtttttttttgtttttgtttttgttttttcctttataaggttgtctgtttttttttttttaaataattgcatcagttcattgacctcatcattaataagtgaagaatacatcagaaaataaaatattcactctccattagaaaattttgtaaaacaatgccatgaacaaattctttagtactcaatgtttctggacattctctttgataacaaaaaataaattttaaaaaggaattttgtaaagtttctagaattttatatcattggatgatatgttgatcagccttatgtggaagaactgtgataaaaagaggagctttttagtttttcagcttatttactttgttttttttcctgtttctgatatagtaactaattcttaactcagagacattggtccattttaatactgaaaaccaattttcattggtacacattacaaaattgctaagaacactgtttgggagctttcattctcatattttggacattgttttaattgagtgaaataatcataactccttgctcccagagaagctatcacctccatttctaaaaccatttcaggttt

SEQ ID NO: 9196 - DNA, 2068 bp, Homo sapiens
ctatcattaactatctttaaactgtcccaagtgcacgttgtacctgaagttgtcataaccggtaggacataaaaactttaagcattcagttcgatcggtagcgggagcggagagcggaccccagagagccctgagcagccccaccgccgccgccggcctagttaccgtcacaccccgggaggagccgcagctgccgcagccggccgcagtcaccatcaccgcaaccatgagcagcgaggccgagacccagcagccgcccgccgcccccgccctcagcgccgccgacaccaagcccggcactaccggcagcggcgcagggagcggtggcccgggcggcctcacatcggcggcgcctgccggcgggcacaaaaaggtcatcgcaacgaaggttttgggaacggtaaaatggttcaatgtaaggaacggatatggtttcatccacaggaacgacaccaaggaagatgtatttgtacaccacactgccatgaagaagaataaccccaggaagtaccttcgcagtgtaggagatggagagactgtggagtttgatgttgttgaaggagaaaagggtgcgaaggcagcaaatgttacaggtcctggtggtgttccagttcaaggcagtaaatatgcagcagaccgtaaccattatagacgctatccacgtcctaggggtcctccacgcaattaccagcaaaattaccagaatagtgagagtggggaaaagaacgagggatcggagagtgctcccgaaggccaggcccaacaacgccggccctaccgcaggcgaaggttcccaccttactacatgcggagaccctatgggcgtcgaccacagtattccaaccctcctgtgcagggagaagtgatggagggtgctgacaaccagggtgcaggagaacaaggtagaccagtgaggcagaatatgtatcggggatatagaccacgattccgcagaggccctcctctccaaagacagcctagagaggacggcaatgaagaagataaagaaaatcaaggagatgagacccaaggtcagcagccacctcaacgtcggtaccgccgcaacttcaattaccgacgccgacgcccagaaaaccctaaaccacaagatggcaaagagacaaaagcagccaatccaccagctgagaattcgtccgctcccgaggctgagcagggcggggcttgagtaaatgccggcttaccatctctaccatcatccggtttagtcatccaacaagaagaaataatgaaattccagcaataagaaatgaacaaaagattggagctgaagaccttaaatgcttgcattttgcccgttgaccagataaatagatctgcattatctatgcagcatggggtttttattatttttacctaaagacgtctctttttggtaataacaaacgtgttttttaaaaaagcctggtttttctgaatacgcctttaaaggtttttaaattgtttcatatctggtcaagttgagatttttaagaacttcctttttaatttgtaataaaagtttacaacttgattttttcaaaaaagtcaacaaactgcaagcacctgttaataaaggtcttaaaaacaaaacaaaacaaaacaaaaaaaaaactttaagcattcagaacccagatacaaacttctgcaattgcctcagcaatagtctaggtcatgtggtacccaatccagtgtttttaaaaatgctactaaactacaataaagaagcatctttaaagccttcttacttggaagaagcaaaaggccacacatcttttttctagttcttccttctattgtgaaaataactgaaatcagatgtggaaaagaatatggctgcacacagaaatgaattactttgtcagccaacgatattaaaagatgcatagaaaacattgttgaaggttagaagaaatgcgtctagaacaagagtgggaggtttgtaagacttggggatgaaaagatgttatctaaatgaatggtattgctaggttctgtttccataatgactgtagaagaactgacttcgtgagtcaataaaaaaaaaaaagaggcatgaaagaagacatat

SEQ ID NO: 9197 - DNA, 1159 bp, Homo sapiens
tattggagagaaaaaggtattaaatatatagaaataggtttttaacctaacaaggtctgcctcttatgacgagaatgcaacagcttggtaaatcataaaagaaacatttaagctaataggattttcgtactgtctctatagctgtagctttaaaattcaacgtatataattggcatggaaacttaatttgcagtcttttcaagcctttaggatagtgtgatgtgtaacaaacaacctcaaatgtgaatgccttgattttatttttatggtgactttagctacagcatttcctatacccagagctaaacactggaataatactgacatcatttaatttaacataagcaattatgtttaaggagtaatttgtgtcatgtacatatttgattgattttttttcttctacataattttatttgaacaaatgtagacagtttatatgtcgcctttttctgttcaaatttgcatggcctattaagttggctggagagtgttttatgtggaaatattttcaagataatgttccttaggaagaaaataacattcttgggttgagggaaggaatgccatacactactgtctcttcagatctgaaatactccagtttagagccaggaaatttcacaggtcacaccgatttttagcattaaaaactaaggaatatacttagcacttacttaatcttttcagttttccagtttacgtctcaggaatgaagtgtagtctatggttgacaatggagttttgtgatcctgcttattgtaactgacaactgttttcaactccaagagctaaactattggcagttcatgttaagttagagtgagggtgtaggtagtgtcagtgagtggctcttgtgcctgctgtagacattaggcctgcactagggccatgtgctgtcaagattcaggaacatggctttaacaagcagatcttgtatcaaggcagaggtgatgccatgccatacttttaggaagtctgagatgataaatatttcaaggtcagtgaagtctatcaatcattctccccttcctcatcagcaatggtagatagaaatgtcctaaacttttctaaatcctagtgatgaggatgtgctgatattcaacatagtccttaaagtgaaaactgagttgttgctgacctccacaaaagaatatgg

SEQ ID NO: 9198 - DNA, 1340 bp, Homo sapiens
taaataaattactgaaaatgaaattaataaaagtaccaggtttttttctaggtatgtgtttattatccttgttacaaaactcaaagaaatcaaatctacttaatattgaaacagtgtttaaaaaatccacccccacctgtattttacaggttaaagaaaatacaagagaagaaaaagattctaaaggaaaaatctgagaaggacttggagcaaaggagagcagctggagaggtgttggagcctgctaatcttctggctgaagagaaggacgaggatcttctatttgaataatctttcctgttctggttctttgagaaaccctaacactggcttcattttaattcacagtgtgtaggtttgatttgtgtggctatttattttttggcctaagaatttcactggttgtaaaatttacctagatgtctatttatgggattacttttgcagaatcataatttagcaaccatttatcatggatgaaagagatctgtaaaacctgcccaggaacttacagaatttactttgcagaagcgttatcatactccatttacatctgtgttacacgtgatctgcttaccaagcatattaggaaatacctcttaggaagcattagcggtctcaggccaattactgtggagcagctttcattcctacccacttgcaaaccttggcgctgttgtctgagattgctgcagccattcttgttaccatggtacttctcaaactttgtgaaaacctgcacttttccttgcatgacaggttcctgtcttgtctgtcatgggagccattctgccaatttaaatgcgactgtggtataaacagtaaaatgatttaaaagtaagtcattccgtttttattaatttactgttaagtcatgttctcatgctcagatcagtagtgtcagccagagctttctctgcagacatgtaggaagtgggtagctatttttcccactccatgtattagagttttacaaaaaggcttacttttgagacaactgttgcattttggggtactaataaatgattgccgatgagttatgagggcattataatacttccttatttgctaattaagaaaataactagttcctattttagagtaagaaataaggtaactttttactatttataagtgataaaaacttgctttcatatatgaagatgaagcatttgagtggccacatcaggtgtctgaggtttttagtactgtttgatttggcatgagccatccatggggactcagtctttctcgcatccatttccaggcatttttgacatgattagccatggaataatgtttagttctgaaattgtgacactgtctttattaatactgta

SEQ ID NO: 9199 - DNA, 1297 bp, Homo sapiens
caatttaaggaacacagagcagcgcttcctggctgtaaatcctagacttgaaagttttccagtattgaaaacttcaaagctgaatattttttatttctaagtatttaaatgttctaacagatcagaacatgaaatgccctcctaaatgtcagctgttgtcacacagtagctccaacactttgagcatttttaagggagtggcctcatttcactagagacaaatctttaagaatagttctaaaattgggcttgtgatttccatttctgatgtctccagattggcacccctttctagttcaatgcctcacgagatttgccaggggcatccaaggcaaacaatcccaatctttctatataaaatgtattcaagcaaacatcaaataaatttctgggatatttaactataggcttcttccttcttgtcaccagttaaaagcattttaatactaagaccctaattcttttatctttattttagtcttgatgtggaactgtaggagcaggtgaataaaggatctctataacagatcctttcaaaagaagagttttagagaaaataaatttaactttaaccacagtgaaagttgacccttagcgggacaaagccttaaaatgcattgaaagaattagatcggttctgtgccttttatctatttgagattgatgacaacctgtgtgagagaatttatcacaccacgtccttattggaataataagctacttgccttgagtttataattcagggtggtaaagtatgtttttaaattttaaaaagcagctgcattttttatttagttggaatatcacccaattttttatttttattgctattaaaatatccactagatgccacctagagctccagttctttataacaaaacagggatctgtttgaacacttactgttgtttttttttttttacatgtttccatcatttctgtctttaagaactaattcgtacataataagtttcataggtaacacattatttgaagttacagctacagtagtcaggtgtagaaaatcttgagttgctttggtctgcttgtcttcataaatttattctcttatgatacttgaggtaccagttgtatttaattttattcattatccctagatagctattaagatacttagattagacctaacccaccatagtcaatccaagactagactactcaatattaaagggtctggaaaatagaagagtgtgttgggcaggtagtttgtaccatttatgaaggtttgttcctttgttaaatttagcagcctgtactagcttttgaaatccagaag

SEQ ID NO: 9200 - DNA, 1193 bp, Homo sapiens
tacctgattctagacatagacagggatgatccactgttactgagggcatcagtgctataagttaaggctttctgcactggtactctcaaggaagctaattttctttctggggggggcgggggacacagtgtcactatgtcacccagtccacagggttcaagcaattctcctgcctcagccttcggagtggctgggattacaggtgtgcgccaccatgcccggctaatttttgtatttttagtagagacggggtttcaccatgttggccaggctggtctcgaactcctgacctcaggtgatctgcccactttggcctcccaaagtgctgggattacaggcatgagccatcgcccagcccagaagctaattttttaatattgtatatggtcttatttatacttgaagttttgtgaacgtcgctaaacaggataggactaaaatttccaattctcctacactctgtcagaagcctagaactcactaaactgggctgcctttcccaaatgggaaaggtgctgacagagttggagaaaaaagaatagactcatttttccccattattggtatgtaggcattggtacagccccttctggggcagtctttgcaggataacatgctatacctgctaagattcaagctgttttcctcacactggactttaggccaaacccagtaccacgcaatgtgcaagcaagggcaggaggtaggtccaatctgacccctccctgtctcattttaatgactggacagcgctcggtgaaggctgtgttcactgtagtgggccatcatttgtttccttcttcttgtaaaagaccaagcaaatgcactctgctttttgctgctgtaagaccaccaaaaatgagtcagaaacacagaagactatttcaggcatgtgggcctggatatgctccttgagacttctggcaaacttctgctgggaattagtttgagggtgagggtacatatgtgacatttgccctagcctaagagtagcaggtaaaaaaaagtttctttcatcttttgccttactgataataccataatccccctcaattcagaccttctgattgagtgcagaggagactagacagtctcctctagacaggttgtagacacaccctcccctaacaaaaacaaaacgaaagagttcatactctgattttccaacatctaggaaactgagttttatttcc

SEQ ID NO: 9201 - DNA, 2323 bp, Homo sapiens
agtgatggcgatgccctccacctctttcctccagtggagtgggacttctctggctctgccctaggttggaaagagttggattggaccctacttgccttcccgggcaaggataggacctttcacgcaagtgccatgtttctctaaaattgtggaatctatgtgtgtttgtctggagatggccagttctttctacctcagagtgagtgagtgagtatgtgtgcacacacgtgtgcatgttcctgtgcgctgatgtttacgcccaagcatttctgaacaaatgaaactcttctccatttaaaagaggcactttactttagacttgccactctgaaaaccttccctgcgttttggttcttgacccgggttgtcctgtttgtatagtcccccctctgtggacgtgctttagtagctcctcttacctagagggcttttacagagaattagagcaacaccaaaaggattgcctcttttccttccttcccattccaaaattcagagatggctttggggcaagtgctacctgtggaataaacctgttttccaggtgtctcttctcccaagcacaagaagtcctggagtctttggaaggtagtctgaatagaagggttttcaggtgcaggcatctgaaagctgtgggtatgtgtataaatgatcaggtctgtgaggctaacacgggcaagagggaaagaaaggctaaccatccaaacagggatacaggggaggcggtggggggtggtggggggagcgggtgctcacaagcacagagctgcctgttgtgaatgtccctgctgcaaagttggtgggtgagagaatgggacttcctctttgagagtctggggagagaaaaggtggccaggatcctaggactgaatgactcgattttacctatttgagctgcagtcctgtttgcgctccttgaattggttaggaagctgcttccttttccctcctgcttcccttcagtctcttcaggaccacaggatggatatgcagacatgtggggtcattgggaagggagtgcgcttcttttctctgtcttagaaaagggagtcaagggttggctttggaattgggcctctggacagagtcagaatgagggaataatgaataggtcacatctggttggtggaaaactaggtgaagtgcttctttaatatgcactgtcttgtcttcccacgcaagatgtgacaatgtttgagaaaaggtgtgtcatactcagtgacttcaatttgcaaatgtggggcctaaagaaagctctgcagctctgaacctctcactggccagagctcagcctattggtcccatccatgatgctgagacaaacagaaactggaagctgaagtcagtgtctctggtgctcagaaaccctgtggatttccctctgaaccaagatttttagtagtaaaataaacaactcatggacatctgtcagatgagaagttttggtcctgttagagaggagaaagactgtaatgaaactactagacccatttgggctaaagtttggcttttccttccttgagtcatagaacgtatccatctcccaggaaatgtccttctctggcgtctgcttgcccttctgagtctgccttttttgcactgaacataagcactttatactaatgggtcacaaatcttgcagcccttaatttgggataagaccagattttcctgacattttcctctaactcattgaactatcaaattataggcaaccactgactagactgatatgagatgaggctaaaagcctttgaacaccacgctgtagtctccaacagaaaaacaccaccaaaacagatacccatgttgaggggttgaatgttttactacaaacaagccacaataaagtgtctatcaacatgtttcttggcttcataacttcttggtgctgtcttgctcctaccctttgcatcctttttccttgtggaaagaaaagggagtggggaagatcagatggccttcaattcagacttagtctaaataatccccataatgactaatgactttgcttaggatttatctcatttcctatgtgtttaaacactgttagtgcaccctctaccaccagaaaacttttttttttgcttcagttgggggatgggtagagataggtaatacgtttataaggtgcaaaaggtaagtgaaaagtcccttccaccctgtccacccagcccagtcccctcccagaggccaccattgttatcagtgtctagtgtacagttccagagcaaatgactaaagtgttccactgtgaagctataccacaattatttaaccagtttctaatgatggacattttatgttgttgccatctttcgcc

SEQ ID NO: 9202 - DNA, 1199 bp, Homo sapiens
ctggaggccaactgaggagagttttttctcaattatttttaaaaggcttttcaaggaggaagaagccatctctgtcaaaagctgctgattgatcagatagaaaataaggatcaaggattaactgttagatttacagtttagtggtcactggtgacctaaggggcagtttcaatgggaattatgggtgcagagctagattagagtgggttcaagagaaaaatcacaggagggaattggagacagtgagggtagataaccctgtctaggggcttctctgtaaaaggaaggagagaagtgaagcagtcgctagaatgagattctcaaaggtatctgtgacacataaaagattaagaagcactgcattgggaggatgctgaaggttcatcaatagaaggaaattcagagtggatcccagacagtgccagaaccaggctcaagacttctgacttctcgccctgccctgctccaggagagtcctccagaagtttttatagaaggcattttccaaccaagctataaaagtgggaagctacacactttggagaacttgctagaatccattgatccaaccttggagagctggggaaagtacttgattgctgcctgccaacatttacagaagaagaactactaccacattctgtatgagctgcagcagtttatgaaggtaatggcagccccttcctgccttctacctctgttgctggtgccccaccctgcaggagaggcagtgcacgatgagggaatgagactgtcattggtccctggccttgctgtttggctgaccctagagcaaatccatgttgctctccagtattgttaaataatattaggatttccatcctaagtttgggggcagactttaatcctgtcaataaaggcattcttcagaaagcaagaaatgaacaggtaaaaaaaagaaataaatggtagtttcaagataagcatgaggcgtgaatgtagaattcataaggaatgatggaaacgttagtgtttttagagaaaatatgtgaagggagaaggaacacgttcctcccaatctgcctgaggatagtcagtactaaattgaattatttaatgccaaagtacaagtgaagccaatttgagtggagaatcagaaatatcttcttttagcatctcttcggtggtggaataatgtcctacccaagagctccaccagtcagtgcacttcaggatct

SEQ ID NO: 9203 - DNA, 1220 bp, Homo sapiens
acacacacacacacacacacaaaaaaaaacaattagctgggtgtggtgctacacacctgtagtcacagctacttgggaggctggggcgggaggatggcttgaacccaggagttcaaggctgcaatgagctatgaacatgccactgcattccagcctgggcgacagagcaagaccctgtctcaaaataaataaataaatagaaataaataaataaatgaaaaggagagtagggcgggttttatgagtagaagttggctctgggtagtcataaagaaatggcactggctgtatttggagaaggggacttgattttgatgcactggttctcttctatttagtcatctggtcccatacatattatctaatacctcttcaatttaaaccctgctcttcatctttcagcacatcctcttggctccgctttcgaaatacattcagtatctgattactttctaccaccttcattgccatcatcttggttcctggaggctaaaagtactggctttggagttagacgttggtttgaatcttagctccactatttgctaattttatgaccttgaataagtatttatcccagctctaacctttcgtttccatgtttgaaaaatgaggataacaatatctgactcatagggctgtgagtattaaatgagataatgtctgtaatgttcttcacaatgtttggcatattcagtaaaaagtagcctttaattattaattttactagttacctcgttccagatgcctggtgtattttatctctttcctcctaaaatattttttaacaaggctgcaagtgcctcagaaggaagaatcatgtcttattcactattgtatccccctctgtctgtcttactggtggatgctgttactgcctgaaccctcctttatctggttaacttacacttattttttggatctcagactctttttgtctttccttttcgattccacctacagcacttgtgtccaaaactccatgctaggaacaatgggataataaagatgaataaaacatagtatttgcccttaaggcttctacaaataaggtaattgtagaggcaaatcgctctctgtgatataatggagaataaaataagtatcttgtctactgttcctttcctgtttcttaaaatatgtaagtagcttgtaagtaacttctctgtctgtcctttgtttgggactatagattacacagagggaattaaagggaggta

SEQ ID NO: 9204 - DNA, 1484 bp, Homo sapiens
agactctctaagatctcttctgtgaactttagctgtcttcttttctctgaattttcagctccttctcctcacttcagggagcctgttggattccacctgtgttccctcttcatgcaacacaacctagaaattctcttaaggtaatggcctgaggaaattgtagaactttccttttttttttttttccctcatctcttaccagatgtccagtgtcttgaaaagacattgttctgtttgttttgtttcttgaaaagtattgttggttgttttaggtggtagggtaaatctggtccctgttacttaatctttgtcaaaagcaaaagtgctcagagatcttcctttaagttttcattggtagttctagaaatgaccaatcacaaaacagggaatctctaactgaaagatccatgacatttcattatagagagttaggaaagagaattaatctgagaattaccattatctagtcttcctcccactcatattcttcataaacatttgcataacacaattttttgtaccattgttgaccatatcaatgggtagattactgaattttggggggaaagacatgtacaagctactagaatggtaagttttgttgaacatgttatataaaaggaaattacgcaaggggagctgggttggtatcatagtatagtattatatttcttttttttttttttgaggtggagtctcgctctattgcccaggctggagtgcagtggcgtgatctcagctcactgcaagctccgcctcccgggttcacgccattctcctgcctcagcctcccaagtagctgggactacaggtgcccgccaccatgcccagctaattttttgtattttttagtagagacggggtttcaccatgttggccaggatggtctcgatctcttgatctcatgatccacccgcctcggcctcccaaagtgctgagattacaggcatgagccaccgcgcccggcctatatttctttatagaggtaaaataggtgtgagatttttgtttttacttattttgctttgttatttgggcttcactggggaaccaagtgatttttggcaagagaagaagcacaaaaaatacagaaaagcctcttcttatggttcctataatggcaaccaagtcaataaatggttgcaaaattcaactagattgcgatagggtagttactgctactgctttatccttttataaatagtcagtttgaaaagtagaaaagttcatgggtaaagagcagtagctagaatgcaaatgtgaatccaggatgcaatatacaaaggtttttgcagttttcagcaagtgtgaagaatttctgattgatgaggccctcagagcagaaagagaccctcctctgtctatgtgtaagattagtaacacatagagacgtggtgttcatctgcccagtttatgtggctaattagcatttagagtttcttcaatagaagctagtgaagtaagaactagataatatcttggaa

SEQ ID NO: 9205 - DNA, 1443 bp, Homo sapiens
cacctaacataaggacaagtcaatttgtcagtagcttcttctggcttgaaaccccctccctggattttatagcccacttaccatgcataacagacaagtcccatattttgtcagtagatgcctttttttttccggcttaagccttaagtgccaaatcacaagagaaaaagcagtaacagtttacagaagcaacttagtgccttgtaatctaactttgtcactgtgactacattacctcttcagcgccagagggcacccgtgggcctcccggagcctctgcccatggcggggtggagacccggaaccagcagccccctccactggcgacacaactgcaccttccctcatttcagtctcccgcacacttattcctcctcccctcttcccggtggcacctctccacctgtacccgcccccccaccccccccacccctgccccttggaagagttgttgccagaccagggttttgggggaaacctgtcttgacattcaaaacctttttcttcccgatctgaacccctgttgactaatcttgcctgggtttgtgtaggtctgcaggaaggaaggctgaaaaagcggacgaagattttgacttaagtgggactttgtgatttaattttttcttttttttaagtggggaggaaggggaagctagatggactaggagagacttgattttggtgctaaagttccccagttcatatgtgacatctttttaaaaaaaataacaacaaaaaaaaaatgagagaaaagctaaaaaaaaaaaagtaaggggtgagcagttaatggtattcattccacatacaatatctgtgtaaaacgatttcctgtagaagtagctttaatggtttttgctctagaataccgtaggtctatccttagagcactcacgccatgctttcttccctgggttttaaacttcatataactttcagaaattggagagcaaaaattttgcttgtcactgcacatcaatataaaaaagcttatttaacttatcaaaacgtatttattgccaaactatgcttttttttgttaattttgttcatatttatcgggatgacaaatccatagaatatattcttttatgttaaattatgatcttcatattaatcttaaaattttgtgacgtgtctttttcctttttttccacagttttaatatattattcttcaacgacattttttgtaactttacacttttttggttattttattttaaaaaaatgaaaaattaatttaaaaaaatgcaaaaaactgttggattatttattttagaaattcccccctttgtgttggactgcaaattgagtttctttctctttaggcctttcacaactaggactgagaatgtatgtaaaagttctgtgacagtacagaaggaaaacaactttttatgtatagcttctaaaaggggaaaaaaaaaaaaagagaaaccctttg

SEQ ID NO: 9206 - DNA, 1629 bp, Homo sapiens
tgagtactgcatcgcgcggatggccccctacaccggccccgactccgtgccaggtgctctggactacatgtccttctccacggcgctgtacggcgagagtgacctctaatccaccccgcccggccgccctcgtcttgtgcgccgtgccctgccttgcacctccgccgtcgcccatctcctgcctgggttcggtttcagctcccagcctccacccgggtgagctggggcccacgtggcatcgatcctccctgcccgcgaagtgacagtttacaaaattattttctgcaaaaaagaaaaaaaagttacgttaaaaaccaaaaaactacatattttattatagaaaaagtattttttctccaccagacaaatggaaaaaaagaggaaagattaactatttgcaccgaaatgtcttgttttgttgcgacataggaaaataaccaagcacaaagttatattccatcctttttactgatttttttttcttctatctgttccatctgctgtattcatttctccaatctcatgtccattttggtgtgggagtcggggtagggggtactcttgtcaaaaggcacattggtgcatgtgtgtttgctagctcacttgtccatgaaaatattttatgatattaaagaaaatcttttgaaatggctgttttttaaggaagagaatttatgtggcttctcatttttaaatcccctcagaggtgtgactagtctctttatcagcacacacttaaaaaatttttaatattgtctattaaaaataggacaaacttggagagtatggacaactttgatattgcttggcacagatggtattaaaaaaaccacactcctatgacagctctttgcctgctccttgcttgatgttttctggaagtgtgtgtggggtcaaggatggtgtggggcacctgtatctactcctaatgtttttgaccctgctgtgttcaatcttcttacacttcagtttcttcattttaaaaaggaaaaggtaatttcttcacagtctcctatgagttggacagaaagtcatggatgtgtaaaggacttcttgatgataagccccaccttcatttttccacggcaccaaacagccctgtgacatctgcattcaccccactcgttttatttttgctgcagtgaacagcttgagttgtctcttaagagtcatctcatcccttgctattcgagatgacccacagatggcagctgttcagcatcacctgggagttcattggaaatacagaatctcaggccccacccctgaatgtcgaatactgtgtgtactgctctagcttctccagagtaaaagatagtctctataggatgccgtctgctctggcaccaggccccctgagcccatgccttttatctgacgtttgttttgcaacccattacatcacttgcccccgggcatcctttaaatttcatccttggctaattctcattgtaaccggttccagcttgctttaaatgattgggtggatggaattctccccattgacaattgacaggtggcaattaattgttcatgcctcagtgggatgaatccattacatctctttcctgcctaatatttttatctacctccgacttttttgtagggactttgttgatatcctcatga

SEQ ID NO: 9207 - DNA, 1155 bp, Homo sapiens
aagagcatgggtactgaggaggtgagtgaggtctgccgaggctacgaggatcctggttcagtgggtccctgagatggacaagacttgggaaagggcatttgaatggcaagcagaggagtgaatatttaggttagaactgaccctgcatcccctttctgaggctgacaggtacccgagagttggtaggtatttcatccaatgataacagtgcttgttatatacctctgtggtgctgtttccatacctaagagcacccatgctaaaagtgtcttactaattaccagtgatggcctccttagggctgggatgggaactgagaatcatttgagggcttaataagtgattttggaggccccagtccccaccctatgggagcagagtgaggtggtctgacaaggtgcttccttcccggtgagcaggagatcgggaggatctccattgagatgcatgggaccctggaggaccagctcagccacctgcggcagtatgagaagagcatcgtcaactacaagccaaagattgatcagctggagggcgaccaccagctcatccaggaggcgctcatcttcgacaacaagcacaccaactacaccatggaggtgggtggggctggccttgttcctcttcgggagcccgtggccccttctgctctttctcctgggtggggaagtctccaagggaacaggtcatagttggaggataaattaacttcacccctgaagcctcacatcttcaatttttagtaccttctgctttcccaaggaatgtgttgagaatgcacatttctaggccccatctctagaatttgcttcactaattctggggtggagttcagaataagcacttctggtggttctgggtgctggtgggctccaaacactggctcaggcatctgctttgaaaatggctacttgttttaactgtgcaagagtgtgtgtgtgtgtatgtgtgtgtgcgcgcgtggctgtggggttggaggttcggggaatcacacatttttttgtctcaatctttcctacccccaaatctgccctccttcctgacctgacccccattggcaagtcctggtttctttgctctcccaggcagaggctgccaccctgccccttggtcatctagggtccttgtcctagtaggttgtccttgtcctggttc

SEQ ID NO: 9208 - DNA, 1104 bp, Homo sapiens
ccccagatcaaagtggatgacctctcctcctccccaacctcgtcccctgagcggagcacttccacgctagagattcaaccaagccgggcatcaccaacttctgacatagaatcagttgagcgaaaaatttataaagcttacaagtggctccgctactcttatatctcctactcaaataacaaagatggagagacctccttggtgaccggggaggcagatgaagggagagcaggaaccagccacaaagacaacccagccccttcttccagtaaggaagcctgtctaaacatagcaatggcccagaggaaccaggacctgccacctgaaggctgcagcaaggacacttttaaagaagagactcctagaactcccagcaatggcccaggccatgagcacagcagccatgcttgggcagaggtgccagagggtacctctcaggacactggcaatagcggctctgtagagcacccttttgaaaccaagaagctcaatggaaaggccctgagcagtcgggctgaggagccgccttctcctcctgtccccaaggcatctggctccactctcaacagcgggtctggcaactgtcccaggacccagtctgatgacagtgaggagaggagcctcgaaaccatctgtgccaaccacaacaatggacgcttacaccctcgtccccctcaccctcacaataacgggcagaacttgggggagctggaggtggtggcctactcttccccaggacactcagacactgaccgtgataactcgtccctgacagggacactcctacacaaagattgttgcgggtctgaaatggcctgtgagacccccaatgctggaacaagagaggaccccactgacaccccagccacagatagtagcagggctgttcatggccacagtggcctcaaaaggcaacgaattgaattggaagatacagattcagagaattcctcctcagagaagaaattaaaaacatgataaatacaaagggaaaacaaaaagctacaaaagtagccttacaaaaaaaaaaaaattgtttagtgaatacagaggaaaggaaaaacaagtattaaaggcacatgaaaccagggcctgaaattttgt

SEQ ID NO: 9209 - DNA, 1711 bp, Homo sapiens
aagcccagggtggcactgggttgggtggggacggatggtgtcttggcagcaaaggatgggtaatttgcaaatgaacatggatagaagagcagcaaagcaccaaaagaacaaggtctcttacccaggacacagtcccttccacactttaccagccccagggtctgagcccgacgctgcctcttccggtcctgtgcctgtgggtgcccacattcttagcaagaggctgcagagggatctttaggggaagattcgggcgtagtttattaaacagactccacttctatttggccatgtgtcaggctgagacctctctctcgggcattaatgaacagctagtgccctgtccctgccgccaggacccactgaaaggacgggtagccacacacatccctgagtagtcccagcctcatttgtcatttttgactcctgctttctcaaaggtttttgcctctgtcaatacagcatcatgggtggttggaaagaagggaacttcccttctggaccaagaacagcccctaagtcattagggttcaacctcacccttattcccctccccgctacaggagcccctaagtcattagggctcaacctcacccttattcccctccctactacaggagggattttcttgaagggtcagctattgcactgtgctgggaggctggctgtggctcctgtttgtgaagagaactcccagttccttttcacagccgctgagaacacatccacacatctaccccacggccttgtcttggaactgctcctgctatccccacaccctgcttcctcaccccactggctcttgggcaaatgactgttggtaccaggaccctgggggtctcccctacaaagcagaccagcctggggcagatatacctaccacaggagccccctgtctttcataggccaaggatccacatacccatagagttcatggattctagagggtctaggaatctcttgaaattgtccctaaaatactgcatgtgtgtgcatacatgcattttcctggggaaaaagtccatggcttctaaaagaggtccctgatccccaaagggcctgaacctctgctctggattgaagccactgtctgcccaagctgccaccccctaatcttcctccctggcgtgctcaaactgccatcgcctgctccctccacacggcccttggggtcagcagccaagtgtctgtggtccgcagcacctgctctggagggctctccagcagtttcgcctcctgactctcaccagcgtcctctcggcagcactcccgtgcccaagtgcacccctctggacttgccagcgcaggccccttcgctcccagggccatgctttgcctgtcctctgtcgtgatgtttcttccgcagccaggtgcagcctcagatcccctgttcatctgggaagcctcctgccacagcttaggacagaactgggcccagggcaaaggcctctccccagaggatggactagaaggcctgggccacactcgggcatggacctttggggctggggagccggggctgcgcctgttgaatgtaagaggactgctgaccagagggccttcaagagggtctctctgtcctttgctgtggtcagatcaggctctgcacttatcagccggtcctttgtggcaacgcagccctgttctgtttttgcttttcctcttcttgaccaaagcatgtgccactagctgtccttgaggacctcgtctt

SEQ ID NO: 9210 - DNA, 1242 bp, Homo sapiens
ttttagtagagacaaggtttcaccatgttggccaggctagtcttgaactcctgacctcaagtgatcacccgcctcagcctcccaaagtgctgggattacaggcatgagccactgcacccagccaatttttttgttgttgttttttaatcactaaaggaaccataaaaatagaaactatgtaggaggaagaacacatggtttctggtcatactctgtcaagaagtagatatgtaacatattgggcatttaacttaaaaattctaagtcatgttttctttttccactataagattgtactaggtgatataaagttcatgtcacttaaaattcaacgactgtgtaagtagctctttcagcttttcattaagttcatttttggaaatgtgcacatctatgccatcattgggcagttataatttggggatttaaacacctggcagtgattgaccactgtgactttgcttattccctttctctcctcagttaccgagctgatacccagacataccagccttataacaaagactggattaaagagaagatctacgtgctccttcgtcggcaggcccaacaggctgggaaataattgtgttggaagcactgggggggttggggtgggcttggaacacaggtgtgtacagcgtgctgtagtggaagttttgtatcatagtaatcctgtttccactttgttatactctagccaagattgactgtattagatgaaatgtgaggatcttgttcaatcggaaacccccgttacctcctctttttctttctctttctttttttttttttacttaaacatttttatgatgatttagatggaagttgttcttcgtcacttaatgttggttccagtccttcaactgttcatatctactttataacattcacatactaacccttcttcaagatggggtggggggtggaaatgcagtttagccatgtcctcaagataaagtcttggtaaaaataaataaatgtcctttagttatattttctccctgagtgctttttttttttttgtctttgaacattgaattttcttgcaaagcattttttcattttaagtttaaaaaccaatagctgctacacaaagaatttgaagaaagtttaagtagtgcgcaacacattttgctgtgaagctaataacacttttacctcacttttccagcataattaaatgaatcttaattatagctccaaggtttgtacctactattgacgcaaacgttataaatg

SEQ ID NO: 9211 - DNA, 1168 bp, Homo sapiens
tttcatctcagtcaggcacagtggctcacgcttgtaatctcagcactctgggagaccgaagcgggcggatcacctgaggtcaggagttggagaccagcctgggcaacatggtgaaaccccgtctctactgaaaatacaaaaattagccagatgtggtggtgcacgcctgtaatcccagctacccgggaggctgaggcaggataatcgctggaacttgggaggcgaaggctgcagtgagccgagaccacgccactgcctcaagcctgagcgacagagcaagattctgtctcaaaaaaaaaaaaaaaaaaattcatctctttgttttacttggcattactcatgcaattgatcatttttcatcttcgctgtctattgtagatgttggtctcacaaatgagcagctcacagtcttgattacagatacttgagaaactttttcccattaattaatcaaagtttgcaattatttcttttgctttctccccaggaacgactgaagctggtgactgttttgggtgctggccttctctgtggaactgctctggcagtcatcgtgcctgaaggagtacatgccctttatgaagatattcttgagggtgagaaagggaagagcattatttgagatatgttattgacttggagggttagcaggatgaagcttagtggtatgttttctgagcacagttcatgtttaccatagagttctaccctgagaagatttgttgagagatatcttgatatctttgatattgacacatccttagcagtttgtcaactgaatgtcccaattcatgaataccacttaatgtttatttgccacagtgcatgaatgagtcattttaagttatgacagttcttttttaatgcttactcaaacacttcccaaatcccacatgatagtggctgcattttttgtttaatttaaaaatatatagatataaatatttaaatttaaggaccctttacagtaaactttatagataattgatgaggacccatgcagtaaaggataactgaaaaaattaaagaggcctttcctgaccctaatagcaacaagcagagggaacagtatagctgtgtgagagtaaatgcttggtggtcagcttggcttactcaccagcaaagtaatttggtccttcacacagctgaaaagcatacttgattcaca

SEQ ID NO: 9212 - DNA, 1115 bp, Homo sapiens
ataacttaaagttgctgtgttctctagatgtccccagtgtcctagacagcaccagttaagaacagtgagtgttttttaactgggacttcttcctgaccctgaattttacttgacttagtttttcctctttctctcttctaattcacagagcagtaaagaagccctttcagaggtgaacgccacgggagtggccatgcttttctctgccgggacatttctttatgttgccacagtacatgtcctccctgaggtgggcggaatagggcacagccacaagcccgatgccacgggagggagaggcctcagccgcctggaagtggcagccctggttctgggttgcctcatccctctcatcctgtcagtaggacaccagcattaaatgttcaaggtccagccttggtccagggccgtttgccatccagtgagaacagccggcacgtgacagctactcacttcctcagtctcttgtctcaccttgcgcatctctacatgtattcctagagtccagaggggaggtgaggttaaaacctgagtaatggaaaagcttttagagtagaaacacatttacgttgcagttagctatagacatcccattgtgttatcttttaaaaggcccttgacattttgcgttttaatatttctcttaaccctattctcagggaagatggaatttagttttaaggaaaagaggagaacttcatactcacaatgaaatagtgattatgaaaatacagtgttctgtaattaagctatgtctctttcttcttagtttagaggctctgctactttatccattgatttttaacatggttcccaccatgtaagactggtgctttagcatctatgccacatgcgttgatggaaggtcatagcacccactcacttagatgctaaaggtgattctagttaatctgggattagggtcaggaaaatgatagcaagacacattgaaagctctctttatactcaaaagagatatccattgaaaagggatgtctagagggatttaaacagctcctttggcacgtgcctctctgaatccagcctgccattccatcaaatggagcaggagaggtgggaggagcttctaaagaggtgactggtattttgtagca

SEQ ID NO: 9213 - DNA, 1334 bp, Homo sapiens
catgtctcttgtctcttcgtcttttctttgcttttcttctaacttttccctctagcctctcctcgccacaatttgctgcttactgctggtgttaatatttgtgtgggatgaattcttatcaggacaaccacttctcgaactgtaataatgaagataataatatctttattctttatcccccttcaaagaaattacctttgtgtcaaatgccgctttgttgagcccttaaaataccacctcctcatgtgtaaattgacacaatcactaatctggtaatttaaacaattgagatagcaaaagtgtttaacagactaggataatttttttttcatatttgccaaaatttttgtaaaccctgtcttgtcaaataagtgtataatattgtattattaatttatttttactttctataccatttcaaaacacattacactaagggggaaccaagactagtttcttcagggcagtggacgtagtagtttgtaaaaacgttttctatgacgcataagctagcatgcctatgatttatttccttcatgaatttgtcactggatcagcagctgtggaaataaagcttgtgagccctctgctggccacagtgaggaaagtagcacaaataggatacagttgtatgtagtcattggcaacaattgcatacaattttactaccaagagaaggtatagtatggaaagtccaaatgacttccttgattggatgttaacagctgactggtgtgagacttgaggtttcatctagtccttcaaaactatatggttgcctagattctctctggaaactgactttgtcaaataaatagcagattgtagtgtctggtttggtttggacagtagtgctttctatcatattgttgtgtgcaatggtaatttgttctactggccaaagcctctttcagcagtgccttgccatcatgcttaaaagtttggctagtatatcttgctggatggagccttgaactccggcaaggattgaaccatctgacttccaaatttgccttcccctctggacctcactattaacaagcaaacctttcagggccctcttagctctcagaagctatgtatgggctttcccagattttaaagctgctgcctcgagaactactcatttctctcctggtcagcagacagaaatagccatactaatctcatagggctcaaatgcatcttcaggcagcagggaaccaagcagcgtggcacaggccttcttgactggaggaagagcttgctggcatggtgggcagtattccaggagaggccatgtccgtgttcacttcttggcacatttcagttccgttttcctcttgtttaaaact

SEQ ID NO: 9214 - DNA, 1424 bp, Homo sapiens
ctgtaacacatttgaaaacattggcaatacttaagttgctgccatgattacagatggaattattggctaccaaagagacgcaattgatgatgagaagcatgattcttgcttccatataaccaaagttaatcttaattgcaatttgactccgtttccttggtagggatagactttcttcagattccaagtgctctcttaaatggcaaattaagttaaagaatactactgctccattcccctcacttattctccagttaattgcttgtcagttccatttcaagaaagcagtgatgttccaggtttgattcagttttcctgtgcacactattgccaaatttttttttagcaaagattctgcactggaacgtagacagttggaaacagtactacctacctagaggttatgtgttttctctttctccccgctttcacctctttctttcccaattcaaaacagccaagtgagccctgttctggtattttgaatcattagagaaaagaaagggagtggctgttttgagttgtcctttctttgcagaaaggagaaaatgtgattgtgttttttttttaccagcctacttctaagtgtcactgcctggtttttctctttttcaaggattagaactaagaggacacaccagcatcggagtgtattaagcccctgaaacacatggtagctagggactgaacacaggaaccgtatgacagcagcacaaacccccaaaggatgttcctgccttgtgggcccctgagccccttgggagactgagaatcatgaccagattcatccagaactgctgcagtgttaagtgaaaatcctctgtagttgttctgcagaggaaccttccttccattagaaaatttctgctcaatacagaatggtccacatcacccaaagtgcactgttggagatgctgtgaaattaaaacctctttgtacctgagacatctagattcacctcaggaggcctgaaggaaatgtgtaacttgtgggaaagaactagacaaccatttaggaattctctagatatactcagcctaacccagtggcttaacacaaggagattggctttgatctttttttcttgtggcatcttccagcaagttagaagtctcatgggataagactgcagttcccctggttcaatagctggaacagtgattttaaatgtccctttttctggatcccttgtaaacatgaaatcattccatggatggctgccttataattttgtctctttccactttaattgtgaatggttaaaaaaatgctgttttctgatattaaatttttattagtgcataccttaatctgagtggctcattacttatccttttggcagtttgtttgatgaccagaattgacctgtatttgaacatcagaaaagagaatgaaaagttgtgatggatggtagaaagatgtac

SEQ ID NO: 9215 - DNA, 2629 bp, Homo sapiens
gctctaattggggtgagagtgtagtccctgggcttgccctgggttgaccctggtggcatatttccttggctgaggatggaagatttggagaatcatgtccatgctggcccaggacccagccatctggcccaaaggcacaagctcctggccctgttgagttgagagtttccaagaagcatccagaagatcccaagggagagaaggaaaatggctgataatgattgtcttcctaatatgcaagttctcacttcctacttccagcatcggccttcctggccttgtcttttttttgtttccctggagtataatgggaagttgcatgctgcctcctgggttttatcccagatagctctggctttcttgctgcccacaggggcctggggcaggaaggagacttgctgagatgccatggagtgcccatctggtcactggcagtctgggcaggttgcccctttctgggtttgtggtgacggaggggaggccgagaggcacagaccaagtccccgggtggctgcaggcagctccagcccggtcctgaggatcctcctcaccatggtcacgtgccttagtaactgtgcccaggaagtggcctgctgcttgctgtgctgctgcttttcctacttctgcccttccctgccacccctcgcatgtcacagctgacaagcaattccttgtcttccctggccccctgggggaagggctgagaaacagtccgtgtgcaccccaaccttaatggcctgaggtgggcagaggggtgtggagcagcctggagtacagggccctgggggaggagcccactgatgaggggcgctctcccatagccatgtgttgaatgctaactaggctggggtggacgaactctgccaactgctgtcatcttagaagatagatgcagcagtaaggaatgtttgttttgcttttttctgaaattttctgaagcactgtggctgggaaacttcgaagcggaccctgtgctgcatgtctgctcctcccctgagcctgtctgcttgggggtggtaaaaataaaaatcccagtttattttcagtaccttacctaacagggttggctccaggcgtgggtggcctagaagatgaggggagtggtcttctcccagccttttaccctcttgcctcctgcctccgcgcttacacacgcactttaccacccggtcattccctggcctcttgctgccacttgtagtcttccttccttcctctcagggtaagggcagtgcctgctgtgcctgttggccactcccacacttcccctcccccaggagccctcatctgctgtgctgagtccaggaaagcatagttaggtagggagctggttggagaaggtgctagaactagaaggcagatgagactagcatgggcccacctggagggctgtccctaatggccccagtcgccttacctcacccacagcagtgcccttgtcttcctccaaaacagaaagcagtgacaaaagggggaggggtggtaatctgaagtctcactgctgagccttcagcttttatttttcactgtttcaaaacccgcattctattctagaatggtttttaaaatggaagatcttacctttttctatcttgttactctggggttttgtccccctaagagattgcactttttgtttggggtttattcagctgcatagatgaccagcttgatccctggtgaaatgaaaagccttccttctcctgaagcctctttccgccctgccctccactaacaacactgaggagcacaagcccaggcttgcccacctggtaggaaaggaagaaattagaacaatgggagccttggctcccctctcgtctcctcccctccttcttgtcactggctttgatgaggcccacttcccagaggctcctgggcctgtgagtgcaggagctcattctcccctcactgctgaagtctgtgacagcttcttcctccagttatgtctttcttccaaagcaatttcttaaccatcagccatgtgctgctatttctagggcttctgggctttgtcccttactgagagattagggactccacagctgccttgaggtagggcctggctgagagacaagggtagcagcaggtggcaggctgttaaaagacaggctgcctgaggagcctggagcaggtggaaacaggtggaagaaaccggccacagccctgctttaccgggctcacctctagggcattccagcaagaggctgatgcaggagaatggccagcaccaaaggacatttaaaagagtttttgggtttttttgtttgtttgttgttggtgtttgtttttttttttttttttttggcacacttgagctgactcagtgcaggtttaatatcctggtgacttgcagtcacattctaatgactttcaagggccagaatatggtgaaaatcacttaaaatatccgtcccttccatgccttagtttagcaggtaggctctatcttttgccatttctgtattttatgtgctgtgttcccgtttcactgggtatgaactgtgaaatcgactgaatcctggccactttatgagtttgtttggttttataaggcatttcaatgtacattctataaatacaagcactccatttgcaaacagatcttaagctaatattttctttccca

SEQ ID NO: 9216 - DNA, 2577 bp, Homo sapiens
cgcaggcgcggtcgaggcgtcgcgagattctggcttccacccgctgtgacgcgcccgcgaggccgccattgggctggctttgcggagggcgcgggcggctccgcccgcacttctcggcctttcctaactgcggcagatgggagggggccggagagcccggagagtgtgcggctgcgcagttggaaaggtggcagtgggcgttgcggttgctgcggtctgggcccagtagcggaccgtgttgggagggagctgggttttcattttgtctgcaggtaacctggcctcattagaggctctgttggcaatctcgttcataacatcactgtgtaaacattttatgccgttgatgtttttgattgtttaatcaggcgtttctctgtgacagtcattgctattatctcgattgaattactttctaataggaagtactagccggacatcatgagtggctgtcgggtattcatcgggagactaaatccagcggccagggagaaggacgtggaaagattcttcaagggatatggacggataagagatattgatctgaaaagaggctttggttttgtggtaagtatttagaactgggtgaattatctgctaagtaggtagagttttgataagcagttgttttcgatcttgagtccgggtggaatatttgccttcagaaaatgttacccagccttatgtctgaattttattgaggctgaaaacaactttaacttgccggctcactggaaccccactcccagtggctccttgattaggtttgactgtatggcagtgtcgttaagatactcttcccattctgtctcctgatttcagtgctcttaatgtgttgtagaatactcttctaaagccaatgttaagagtcttatgcttacattttaggaatttgaggatccaagggatgcagatgatgctgtgtatgagcttgatggaaaagaactctgtagtgaaaggtgagattcctgtgtaactagataaccctgggacatagagcagactgggtctgctggcatatttttctaagtagatttatgtagcttaagtgtgtaacggagatttttcttccctttttgtagggttactattgaacatgctagggctcggtcacgaggtggaagaggtagaggacgatactctgaccgttttagtagtcgcagacctcgaaatgatagacggtatgtgaagggtggatggctgcattgaacaattattgtaggggtagcatttaagattcaggagtcattagcagtgatgattttgggtcctgccgtataatctgttcttctattcccacgttagccagttgttcttgatgaatctatatgagtcatagaacacaaatctattgacggaagtcattagaatggcttgtgatatctgatggcttgaacttgcccacagttgaacacaagtgctgtcattgcatttcttccattgtgaatacgaattttcttcctcagaaatgctccacctgtaagaacagaaaatcgtcttatagttgagaatttatcctcaagagtcagctggcaggtttgttgaaatacagttttgagttattttgatgtggctttttaaaaaagttaatgggtagctaatgttgtattgttttattaaaagtagttttaaattaatggatttaatggaattgtaattttaaacatttaattaaatgtaatttgggggatattttgaactttaatattagtgatcaaatgtaaatgttttgaggatatttttcttgttttttaaaatcaatttttaaccaaatattaaaccctttatttgccagcctgtctgtgtcgttggccttatgacgaggagtgcctgtgggttatcctaatcgttgtcttggtcactcttggttgggcctggttgactttgccagtcagctcctacagtgatcagttggccacctctagatctgtgtttgccggtctagacgttatcggtgcacttccttgaagtgccaggttgcagcgatcccagagcgttgataacgtgatctgatccctaagttgagacctgtcttcctgtaacgcttccgaataagaggtccggtcgaaaagagttgaaagatacgaaattaggtggtcgttggaatcctgatcgcagtaaagtggtccttggtaactgctcgagtagaacatgtctgcatccgccaatagtccgctaatagggagggctgtgcgattaaaggcttccatcgattgggtagtgtccttcaagtgggtggcgaagagccagtcgggcatatgtcatgaaggtttctccgaccgattaatggtttgctgcttgactagcctagggaaataataataaaggtaaagtaaacttttttaatgacatatggggcacaaaataactggtgtcttgtaaatgttctgtttttttaaataaaacttctctactttagtctttactttaaaaatatgtactgtttccttttttgttgtttttttgtttgtttttttttcttttgtactgagctcagcatagactaatactaccttaatgttaaaatctgaatttcttttagcattttgcttaaaagcaatatgctatttgcttatt

SEQ ID NO: 9217 - DNA, 1161 bp, Homo sapiens
ctcgtagccgatcccgttcccgtagtcgcaaatcttacagccggtcaagaagcaggagcaggagccggagccggagcaagtcccgttctgttagtaggtctcccgtgcctgagaagagccagaaacgtggttcttcaagtagatctaagtctccagcatctgtggatcgccagaggtcccggtcccgatcaaggtccagatcagttgacagtggcaattaaactgtaaataacttgccctgggggcctttttttaaaaaacaaaaaccacaaaaattcccaaaccatacttgctaaaaattctggtaagtatgtgcttttctgtgggggtgggatttggaaggggggttgggttgggctggatatctttgtagatgtggaccaccaaggggttgttgaaaactaattgtattaaatgtcttttgataagccttctgctcacatttttgtgaatgtctgaagtatatagtttgtgtatattgacagagctcttttataactaaagcaaatttaatttttttgtactagaaaaaaatttgaacattttagttcttggttataaaaatgttaattcagaattagtttaatgccttaattaaactaattaatagctttggacacttaaaagagctctaaatttgcttgtacataaaggcttaatttgttttccttgttagggtcaagggtgtcctccactctttaacagctgctggacagacacattagagcagctgtttgttattgataataaaatattataaaactactttttgtctgtttgtctgaagaagtcctatgctgattatttctcatccttatacagtagatttaaaacacagaacacatccagaatcctggagttggttacggtctctctttaaaaataatgtttttgacgtctccaggctagtgaaaagatacagaagtaagtgaatgccaaaatcacaattgttgagttttgtgtccgtggcccccctgtcccccaaagttctttctctatctcctgaatttattggcatcaggttacttaagcttccagagccaagaggaggatagtgtgggaagcagtgtttcttgcctaccttaaagattaggacaggtttttttgttttgtttttgagatggagttttgctcttgttgcccgggctggagtgcaatggt

SEQ ID NO: 9218 - DNA, 1293 bp, Homo sapiens
ccaggttcccactttctgtgtcatcatccttcagttgtggcttgctttctcaaggtcacaagatggttgctggagctccagccataacacttgctttccaggcaggagagagggaaaaggaaaaggccctcagtttttttttccccatggtagaagagccttgcattctttcaccctcctggttgcgtccctcctcgggctgcagtttgtctttaaccttcagtttgtgtggctactttctgcttaggagaaattgtcaggctttcccttatttcactaggaaatatccaggcctgtttatttttcactttaaacacaatttgaataagcctattactttcagttcctttgaaaactggaagcttcaaattagaaagtgggaggaacgatggctaatggctggcatgtggagacacagatcatgcacagtttgacaacgaagaagggtagaaaaaacccagattatagcttaaggccagtgagtgtgggggcaaacagctctgcatggcttcaaagcctttggcaccttgattgtgtggttctatctgtagggttgtcttgctgggtaacaaaatcattcctctatctctttccgctctgctagactgtgtgtcttctcctgtgggtgggaacatggtacattttccactgatatccagtgttctatgtactcttatacatgtgaattatgtactccttaccagcttcctaggaagacaaaataagcaaaatatgattggatgtttcagggaaccttagcattagggctgccagataaaatacagggcacctagttaaattcgaatttcagataaacaatgaattggcgtgtgtgtgtgtgtgtgcgtgtgtgtgtgttccaaacagtacatgggacacacttatactaaacaatatattccttgcttttctaaaattcagagtaactagtcattgtgtatttttatttggtaaatctgaccaacctacttggaatacatgagtgtcaggagaaggccctgcagttggtggggtagaattgatttaaatgaaacagcctgggcacagtggtggaaatatttgttgatccgattttgctcttgagtgtgggacttctgatgctcttctgaagcaagaggaaatcaatttcttttcatggctgctaataagctagctcaatacagcagccctgagaaaaaccctggctagagttttaagagtcctaggaatgacatgaggtttatgtttccttatctccttggctcattccttgcctgtttagagaagctttttagagtatatgtcttctgtctg

SEQ ID NO: 9219 - DNA, 1160 bp, Homo sapiens
tgatattctccatgggcagcaaccctgttccataagacagtgataggatttggttcttggtgcttttatttcatccagttggtccagattccacctggcgcatttgcttttcagcctggggtaaccacctctcaggaggaggcagcgtgcatgtagatgcctagtgtagcactcagaaactcattgcctttgactaggctgtagttcttgggggctgctgatgggtttgctaagctcatcatctacagtgtggccacacttattacccaggacacccagccccttcgttggcccaaatgtgccccttcttttccatccccactgctgccttattcaagcttagtaacctcctaagtgtcttctctgttgtctctcatacccttgccaaagatttccaaagctcggatctgagtttgtgttttacttccttcattggctttcagttttttaacaaaacaaaacaccaaagacagctgggaatttttaggatcctctatgatctctccccaacctggccctaggggctgatttcttctatgaagggtcatttctaaactctatcttgaaattactttgcttgtgtacttaggtgtacctgttgtgattctcttagcttgtcctttcaacatcccttcctacttgtgaaaatcttttaagacccagtttatggctccttccctgagaaattctcctggatcctttcagtctgaatttacctctccttctagccctacagaacacagtgtcagctgctctgtccagcactcagcagagccctgaagcataataggtgctcagtgagtctttgccaaatggatggttctttttccttcctccctgcctctcctatcctctcttttcctttctacgagtttgctgtgaccatctcacatcttggattgtctggcatcccattttcccatatcctatctgtttgtttgtgacttaggctttgcttcctggtttcaaaaatgcagccccagtggagatatgtccacatgtcagtctttgcaactagatcagcttgtaggggcagggcctgtgttcttgtttattttcataatcctcaatgtacctagcatggtggcttgtattaaagggggtgggcagagaaatcgccagaaacttctctgagtgcctatgggggtgtctgatgtgcc

SEQ ID NO: 9220 - DNA, 1115 bp, Homo sapiens
ccccataccctccctctacctgatacaaacctgagcacaatttcggtggctgactttgttctgtttgccagcgatgtttgctttttccttgccctggtagagcctttccttttctgggccagttgtctaccctctatttggaaaggagccctgagcaatggttctgtgggctctccccctcatcaggggctcccagagcccctgcataactctgagtcacatagatgttgagaaattgggaattgggaattggcgatggccaagtggcactgagtggtgtgcgtgatggaaagccatggtagcagggcagagtcggcccagcaaatggtgcttggaaaaatgatcctctgggggccacttagcccctcctgtgaaaaagtgcaaagtccacaagtaagaaaaataacctgttcacatagttggcttgaaaccataggtgctaaaaccccctgtggctaaataaacagcaagggcctgctcagtgatgtcccataaatcatggagtgcagcaacccttccctggggcaccacatctagtccctgtgctaatccttctgaaacagcaaagtcagttccttacaacctggtcctatctttctctcttttactcctgcagtgccttcctctgccaaattctcagccaccctacagttctggaacactcccgacaccacactctcacatgctcgcacgctgacctagagaatcctgaggctggagccatgtggtttcttatgcctctggaatttcatgttgtaatttagaaaggttgttttcaacacacagtttgatattttgggttatctttcagcatttcattcatttttgataagagactaggtgggtgtgaagtatttgatggggtttcagggtcactgtaggtgatacaatgctaattttttctttaatattcttggctcagtgggacaactccttttgcaatgaaacccaagtaagtgcctctcatttttcagtctgggtaacattttaattgatttttcccccaagaaaatccagtgcttgatggtctgagggttgagtgtagcatttcccaggatgtgtcaaagggatagatattctttttgcagcctctgtggtctcatccctacggttta

SEQ ID NO: 9221 - DNA, 2290 bp, Homo sapiens
ggggaaattgatggacatagctggatttctcacaagcccaactctaacttcttgcttatatctgcccccgacctttttttttttttttttgcattctccttccttctctcagtaggacgcctcgtctaaggagcagaaaacccaagggcaggtggagagtccagggaggcaggatggatcaccagacacctaaccttcagcgttgcccatggccctgccacatcccgtgtaacataagtggtgcccaccatgtttgcacttttaataactcttacttgcgtgttttgtttttggtttcattttaaaacaccaatatctaataccacagtgggaaaaggaaagggaagaaagactttattctctctcttattgtaagtttttggatctgctactgacaacttttagagggttttgggggggtgggggagggtgttgttggggctgagaagaaagagatttatatgctgtatataaatatatatgtaaattgtatagttcttttgtacaggcattggcattgctgtttgtttatttctctccctctgcctgctgtgggtggtgggcactctggacacatagtccagctttctaaaatccaggactctatcctgggcctactaaacttctgtttggagactgacccttgtgtataaagacgggagtcctgcaattgtactgcggactccacgagttcttttctggtgggaggactatattgccccatgccattagttgtcaaaattgataagtcacttggctctcggccttgtccagggaggttgggctaaggagagatggaaactgccctgggagaggaagggagtccagatcccatgaatagcccacacaggtaccggctctcagagggtccgtgcattcctgctctccggacccccaaagggcccagcattggtgggtgcaccagtatcttagtgaccctcggagcaaattatccacaaaggatttgcattacgtcactcgaaacgttttcatccatgcttagcatctactctgtataacgcatgagaggggaggcaaagaagaaaaagacacacagaagggcctttaaaaaagtagatatttaatatctaagcaggggaggggacaggacagaaagcctgcactgaggggtgcggtgccaacagggaaactcttcacctccctgcaaacctaccagtgaggctcccagagacgcagctgtctcagtgccaggggcagattgggtgtgacctctccactcctccatctcctgctgttgtcctagtggctatcacaggcctgggtgggtgggttgggggaggtgtcagtcaccttgttggtaacactaaagttgttttgttggttttttaaaaacccaatactgaggttcttcctgttccctcaagttttcttatgggcttccaggctttaagctaattccagaagtaaaactgatcttgggtttcctattctgcctcccctagaagggcaggggtgataacccagctacagggaaatcccggcccagctttccacaggcatcacaggcatcttccgcggattctagggtgggctgcccagccttctggtctgaggcgcagctccctctgcccaggtgctgtgcctattcaagtggccttcaggcagagcagcaagtggcccttagcgccccttcccataagcagctgtggtggcagtgagggaggttgggtagccctggactggtcccctcctcagatcacccttgcaaatctggcctcatcttgtattccaacccgacatccctaaaagtacctccacccgttccgggtctggaaggcgttggcaccacaagcactgtccctgtgggaggagcacaaccttctcgggacaggatctgatggggtcttgggctaaaggaggtccctgctgtcctggagaaagtcctagaggttatctcaggaatgactggtggccctgccccaacgtggaaaggtgggaaggaagccttctcccattagccccaatgagagaactcaacgtgccggagctgagtgggccttgcacgagacactggccccactttcaggcctggaggaagcatgcacacatggagacggcgcctgcctgtagatgtttggatcttcgagatctccccaggcatcttgtctcccacaggatcgtgtgtgtaggtggtgttgtgtggttttcctttgtgaaggagagagggaaactatttgtagcttgttttataaaaaataaaaaatgggtaaatcttggcggctgttgcctctttctttgggtggcttcctttaatgaaaaggctttattt

SEQ ID NO: 9222 - DNA, 1142 bp, Homo sapiens
taaaaaaaaaaaaaaaaagagccactctggtcataatcccaatatttccagggcaaccatagcccacagattcctcagtcctcccttttactgtcctctagggaaaagaccagtgcttctaggcctctggttcccccctcctacaaagtggttggcagggtgcccaggctgtatcctcggagagttaccggctttccatatgggctgatgacagggatttgaaagcgagctcctgtcctctgtctctccacccccagacagaccaagggctctgcttcagcactgtgcactacccacgtaggtctgtcccacagtgcactgggttggtgcagctttgtgggttggttttgccttttaaaaaggggatggctttgaaagttgcctaagcatgccataaagcttggaaggaaagcctgagaaatgccttatgtggagtagcctggtccacctctgctagctcggctgcccggtgcttgcctggcttcgcaggtctttgcatcaccgtaactgtcatgccatgaatgtgttgtgtccagtgtctgcttcgagtgcttctctcttgagatgggctcaggcaagacccccagccagcagggccatccttattctttctgtctgcttgccagcttgcccactagttctttctacagttccacagcagcatgtgagggggatgggtcatgtcattgcccttttcttccctggagcatgtgcatttctgtttgtgaagcaggtgggcttggtaagagtcattgcctgtatgtactccaaggttctttggtagaatgaagcaggcagggagaaacgtctccatagacccatggagctgagggtcaagtaagaaaggtaaccagttctgacagtttcctcttttcctctgattcagcctcaagtccctggtagatggatataagcagtggtcgtccagtgcccccaacctggtgaagggcccaaggagtagcccggccctgccagggttcaccagccttatggagatgggtaagcatagctcctcttgagagtcttggctgtctccctgctccctgggggcattcttgcccaagcttctaggaccatttaaggacccctagcactgcttcatggaggaaacattgggaatgtttttgttctagaatgttcag

SEQ ID NO: 9223 - DNA, 1103 bp, Homo sapiens
gtgtgttcatcactgtatcatgcggctcattgagactgatctcgaggggattcgttaatgtaatatctgattacattctgtgtttacaattgaacaatttctctttgctctagggaagcaaaaggcaatcatttctttgtgagagtggtttgatggcacgtatcgtaacatatttagtatgctataattgtaattaatgccagtttctaatgttggatttgatgtagacagtttggaataagagagttatacatattttcaagtagtgatgtggttataaaatagttccaagtatcagacttgtaaatgaagaatgatcgttgtttaccttttttgctatttgctggattaaaaatcagaacctcttagttttgtggaaaaaagtataacttaaaaaattaacaaaggaaaagcattggagtcagaataatgacagttactctttttctcatttttttctccacagtgatcctggtggagggattgaaatgtctgagttcatccgagaggccacacccccagttggttgcagttccagaaattcttatgccggtctagatccaagcaaccaggtaggaacctgcgctgttttattttgcctttttccctcctcctgatggtggtctccgttattctcgtgtctttaagtcggctgatgttttgtcatatctttctgattattatttttaattgcttattaataacatcttttattaatattctttttaagttacttttcacattgattaattacagatttgttgagcattaccacagactcatctttgggtgtatagttttgattatgacagttgtgaatagccttaggaaatttagcttctagcttgcgctatcttcacatcatgtgtattagagaggtgtagatgtctgtggttacccccagtttaaacgtggccaaaaaataaaaataaatgctgaaaatctctcagtgttcaagatgtttaatggtaaggctaaaagtaaaatacaaatttgcttttatcaattttaatgtctttctactatgtaacttttaaaatggtaactcttgaagttttatttcaaaacttggctggacctttgctgctctagtcctcttattc

SEQ ID NO: 9224 - DNA, 1198 bp, Homo sapiens
ccacctgggaacactgcagaaaacaaagaagagaagagtgataagtcagctgtttctgtggattccaaagtgcgtaaagatgttggtggaaagcaaaaggaaggggatgttcgacctaaatcttctagcgtaatccatcggacagcttctgcccacaagtcaggcaggagacgcacaggaaaaaaacgggctagcagttttgattcaagccggcatagggactatgtttgctttcgaggtgtttctggtaccaagccacacagtgctatattttgtcatgacgaagactctagtgatcagagtgacttgagtagagcatcaagtgttcagtctgctcaccagttcagcagtgatagctcttctagcaccacttctcattcctgtcagtctcctgagggcagatacagtgctctaaagaccaaacacactcataaagaaaggggcacagactctgaacacacacacaaagctcatttggttcctgaaggaaccagcaaaaagcgtgcaacacgacggacttctagcacaaatagtgccaagactcgtgcccgagtgttgagcctggacagtggcacagtagcatgtttgaatgactcaaacaggttaatggcacctgaaagtataaagcccttaaccacttcaaaatcagatcttgaggccaaagagggagaggtgctagatgagctatctttattaggacgggcttcccagttagagacagtcactcgatctaggaatagcttgccaaaccaggttgcatttcctgaaggggaagagcaagatgcagtcagtggaggtaagtaaactgtaagaagagatttctgtaagactcactgctttttcatactattaattagagtagtacttactaaaatatgcttctgttaatattcccccttccactgtgttattaaaataagctttcttgaatgaagaagtaggtgattatcttagaaaaggttttggtatgaacaccaagaacatattttttggttgcaatacttgaatacgtcaatttgttcttgatggtgtcaagaacaccagtttctaagccagttgccacctgttaatgttttgctgggaataacaaaaattagccctcttcctttgtatagcaatagcaacaataaaatatataattatttaagggcaccaaaccagttttaatcaactcttatacagtatatgacactgaact

SEQ ID NO: 9225 - DNA, 1214 bp, Homo sapiens
tatagaattgtcttagcaactttgatagaagcagaggtgtttgtcactacctttagtttcaagatatgtaagagcccatatttaagtaattctagtaagtgagttttctaattctttcagatgactgagagatgggggaagcgaaatcaattagtgccagaattttgttactattttgccatataacaaatgttttaaatttaattttctagaaactattttgagattttgttttttaaacataatgtgattctttgtatacatattttatttgccatccaagttggttaactattttgcaacaaatagaatagaaaagcaaatattaaggagagtaacatttttaaaatagaaatttaaaactatattatgtaattgaaactccacaattcactgtagcatgttttatttgtatataagaattcatgttatgtccacatgaaactagtttgttttcagtatgatctaaaaccttgttcaaactcagtaccaaaaagacatcttggcataccatgaacttcatatttatgtcttcccttcccttttttccatttggttaatttcttatacttaagatatacttacccataagtttttctgtccgtagaaatcgtgagatcctggaaaatgtgttagctgtcatcctggctattctcgtggcctttttgggatctattcttctcatacaaggattcttcagagatatctgggtcttccagttctgcctcgtcatagccagctgtcaatactcactgcttaaggtaccagcatctcttcttttcatgctacggaattatatttgtgttaaaaggcagaggattttgtagcaattactgaattatagtaagataattatttttaggcttacttttcttgcatgtttacataagattgtgtagagagcaaaagggggatataaaccttaaaaataattgtatgtaaattagcacttcctaaaaacaagttttttgtattaaaagaaaactgtgtttgttttgtttgttttattttgttttttggagatggagtattgctctgttgcccaggctgcagtgcaatgatgctatctggctcactgcaaccgtcgcctcccaggttcaagtgattctcctgcctcagcctcctgagtagctgggattacaggcgcatgccaccatggctggctaattttcgtatttttagtagagacggggtttcaccatgttggtcaggct

SEQ ID NO: 9226 - DNA, 1203 bp, Homo sapiens
accacgtgtggttggctttggaagatagcctttgtagtatttccttctgggtatatgcagtcattcattcaaaaaacagttactgaatgcctgctcagtgctgtggaggacatagtagtttattacatgggcaaaggcatcaagaaagtaacacaccaaatgtcagacttttcttttgcctaatatatcatgtgttgtcttttcctactcttattattgtatctaaaatttactatgccaagatatcttattcttccaaaaggaacacagtttaccacaaacaatagcacttaaaatgtgaaagaattgatagcctcatgcatcaaaagcaaattattcctcatgtatgagtagagctttagtgccctccccccaaaaacatctgtagctttagtaccaaagacatttagtggccagattctaactcatcagaaagtaataaatctaaatttttctggaataaaatgcaattaataacgtggctaaaaacttttgttgaatttaagttcgttgtctttttccaaaatacgtacataaaaggattatgtgatatattacaaattagaagcatattattctgttaaattcatttttccgcaggattcttgggatggccagcatattccagtacttttctccattttttgtggtttattagtggcagtgtcttaccatctcagccgacaaagcagtgatccatctgtacttttgtaagtgaactcaattgttattgaattaaaagaaatttaagtaagttggtgtttttttcaaatacctttgaagatctctttttcccaatgcctttccaaagtgctttggcctaatctatattaagtttcaaaatataataattttgggttattcaaatcaggttggctgagaatattagtgttttccttcccaattattgaaactatgttttaataaaaatattttcactgtatgcttatttatggtatcctaaacattttagaatttctcatttggtaatgattaaatatactcgaatcatttggttttctatcataaacttcattgcccgtttgaattactggttttcagattatctatgtattttctgtttttttttcttcacataaagctctttagtgcaatccaagatttttccaaaaacggaagagaaaaatccagaagaccctctatctgaagtaaaagatccactgcctgaaaaacttagaaatt

SEQ ID NO: 9227 - DNA, 1197 bp, Homo sapiens
cattttaaaataaggttaatttttaatattatgtggctattttgatgcactatgtaacttacaccatatagatggtcagttgcctccatagtcatccgatgagcctgcccaatagagtaggtacctattgttgagtcaagcattaatatgtttttcatttgctaaatgcagttggtgttaaagtaatagaaatattgagaaactagagaatcagatgtcagaattacaatactattatttttaaaacatagtccttcatataaaggataagaatcataatgaatagtattaaaagggaatagtcagatactttcaggatgtgatttacctagctctatacatcatttttggaagcttacatttaatgtatatattataagcttagtaaagtaaatggtgaattttattttaagttactgtctcttctaatgttttcagtcatgagttgatttgtgttttctttgtgccacagattaggtgctttaatgatcactgttgctggtttgaagttgctacgatcctcttttagcagccctacatatcagtatgttacagtcatctttactgtgctgtttttcaaatttgactatgaagctttttcagagaccatgctgttggatctcttctttatgtccatactcttcaacaaggtaatttatcactgaaaggaatatccttatctataaaaactatctccctgggttatatgctagtcagaatttttcttatatttcatgtgatttattattgtttaagtaataactctcttcaaccagttatttaggagcacattagaatccctaaacaaagatagtcactgtgatttataaaagatatatttcttgctatagctaagaagataaagttacataaaacaattagagaaacattaataagtatattttaaaatatatagaatctctcaaaaggtatatagttttgaataattttagaaacagaagtggtaataattgaattgggctctggcatagcccaatgaagcaggtagaggctgaggagactgaggctaggtgggagcagtcagaaattagcttgatgtgatatttgcagaatactctgaactttataggcttctgctaaaattcattatccacccataagatagatgttctaggccttttacaaataagatggtaaaaccttggtcctctgcctcctaacccaagaatctttttg

SEQ ID NO: 9228 - DNA, 1178 bp, Homo sapiens
ctgttgctatatacagtttatctctgcttaacattagccatctcaatatggctaatattgactaaccagcttctttttgattgtcttatttgttcaaatcttgtattattttatctacttcctttactaaatagtcttttgttcttcttctgaattcttttattttcctcatttctcttccatggttttaattataaagcatattttattgaataattacgaactgttgaagaggtcaaaaagtccttagattgcttcaaatcaaattctcacattttgtgaatgagaaccatagattccgggaggttatgtgacttctaaatctaaattcagaaaccttttccattttcctgttttacttttgtatagaaactgtaagggtatgaatgttattttccttgtcaaataaatataaccccatactagaagtttttaatatttttaacaatcttgtttgtcaagaggacttaaggttaaatttaactttttttaaaatctctttttataggatcagatgacaacaatctgaattccatcttttatgagcatttaactagatccctacagcacagcctctgtggtgatttgctactaggacggtggggaaactacagtacaggggactgtttcatccttgcctctgactatctcaatgcattagtacaccttatagagataggcaatggtctggtcacttttcagctgcggggacttgaattcagaggtaagacattcattcaccttttatttctgtagcatactcctgtggcaccttagttttacatgtttctatctcaaaccagaagttgtcatagaattagatatttgggattgtggaatgagaaaagttgttaaagagtaagtattagattttttcaccccacattccatattccaagaagaatcatgtttgcaatatggctttatatgtaaaggtagtagcattagtgtgtaattgatttgttttcctagatatgttgaatttctgttgttctgtgcttggtctcttgctggtcccttttgtgaccagttgcataaatttgttaggtggctagcagcatggaatgctgaatttttgtgtgaggcagaatagttaactgagttatgttcatataaacaccatgcctttgtcttccaacaattttttttaattgaggtgaaattcacataaaataaaa

SEQ ID NO: 9229 - DNA, 1170 bp, Homo sapiens
ggagttcaagaccaacctggccaaaatggtgaaaacccatctctactaaaaatacaaaaatttatctgggtgtggtggcgggcacctgtagtcccagctgaggcatgagagttgcttgaacccaggagatagaggttgcagtgagccgagattatgccatcgcactctagcatgggcgacagagtaagactctgtctctaaataaataaataataaaataaaataaatagaattgttttgaagttgctttgttgaatttatggttgtgattttaaagtattagatgttttttcatccagtaaggcctgaggtatattattatagtattcttaaaatatatatgtagaatattgagggggaataaaatactttttagtcagactaaaaagtgttttactatttatcattataaataattggaatttatttcattgagtaatctgagttaattgaaattgtaatttaatctgaattcttttttttttgtcttgttcatgttagggtatcatttattatgttacgacctcgtctaagctagaggagtggctagctaatgagacaatgcaggaaggacttcgtctgtgtgctgatcgcaattatgtcgatgtggacccgacctttaatccaaacattgatgaagactatgaccaccgactggcaggcatatctagggagagtttctgtgtgatttacctcaactggatagagtactgctcttcccgaagagcaaaggtagagtttatttcatttataactctttgaatccaggtttttccaaagatgcaaagaatgtccctgttagttcttatgaggtcagtttttcaagaccttcctctttctgatcttctggttaagataacctaactggttcattatggttgggccaaaccagctctgccaaaacaggttaaaggaagtggcctccctctttctttcatttgcagtgtcccagtctcactgtccaggtagcacctccttcatcctgggcatgtacaggcatgcacatacattcacattccatgcattaccctccaaaatctagtccttaagaaattctacctctgtctgccacacttaaggataattaaatgtctttgtcccaaatagaaagtctagaccagtgctggctaatggactttctgcagtgttggaaatatgctgtcactgcca

SEQ ID NO: 9230 - DNA, 1164 bp, Homo sapiens
tacaaccaccccatgaattttgattggcctcctcctgtttacatctatttttctaataaattcattttccatatttccttgcagtctttgtccagggtatttatacttctaatatagtaatatattagattcggggattctaaatctaaactgaatttcctaacatatacatccaaatgaatcagaattaagaaataccacatattttaaatttttttctgtgataactacatgttttccgttaagcttttcttagtttattttaacttataggctctttgcctgttgtttattttcatggactcactattacagtggtttataaataagggtcccaggtcggacaggccctgtctcttgtgattctggttcagggttctgacattagttcctggaatctgtattttcaaaacactcccaggtgattctgatgcacacgcagatgtaagaatcagtgtcatggaagacctttgtcaaaacatgtgaacttttatctccaatcttaacagtaatttagagtcattcctctatggattgcatgccctatttaaaggagatttccgtatttcttcaattcgagatgaatggatctttgctgacatggaattgctaagaaaagtagtagtccctgggatccgtatgtccattaaacttcatcaggtaagaagatgagatttttctaattcattactggtgtttactgatccttcttcacatgatttcaatattagtccattctcacgctgctgtaaggaatacccgagactgggtaatttataaaggaaagaggtttaattgactcacagttccacaggggtggggaggcctcaggaaacttacagtcatggcggaaggggaggcaaacacatccttcttcatatggtggcaacaaggagaagtgccaagcaaaagggggagaaccccttataaagccatcagatctcatgagaactcactcgctatcatgagaacagcagcatgggggtaactgctctcatgattcaattacctcccaccagttcccttccaggacacgtggggattatgggaactataattcaagatgagatttgggtgaggacacaaccacaccatatgagcttccaagttatgtttcttaggaaccttttgagaaatattctgatctgaataaaagaaaaatgt

SEQ ID NO: 9231 - DNA, 1466 bp, Homo sapiens
ttccattataggaatttaaaaagtaattcctctctgtgaaaagcattttgtttgagattacataatttttcatcatcaagaaaaaaatgaattggaaatgtttttatttaccatgtagattgtggatcccagtcaaattctggaagggatcaacctgtctaaaaggaaagagctacagtggcctgatgaaggaatccggttaaaagctgggagaaatagctggaaagactggagtccgcaggagggcatggaaggccatgtaagttcttttacaagctggcggtctggggctctgccttttttgaagtccgcctcacttggatgcatggttttagctgatttatacttaaacgtataattttcagacaaaattgctactactaatcctaggtaggggtaagagtttgtgagtatattccaggtctccagtgctaacttcttgttttattctgaatcattaggtgattcaccgatgggtgccttgcagcagagatccaggtaccagatcccacatcgacaaggcagtgcttctggtccagattgatgataaatatgtgactgtaattgaaactggggtactagaacttggggctgaagtgtgagccagtgtttattataaagacatttctttttccctctcaattccaaggcattggaaaaagagaggaacaagcagaagatgcctgcaggtatcactttgatcctatgtgggagcgactgaaaatagaatgagcttggttaagcacctctcctttgcccttcaccctgactcctgtcactgtctccatccccaaataaagctgaaatatttttttaagttagctgccgagaaaacattttgcatgaaggataaagttctgttaaaatacatccttaaaaaaagtttttcctatgcattgcctatgctttaaatcaacaaactcttcatttctaaactatgatctcatatttttctaatttctttgccaaaaataattgccatgttttgtcatagaacatgaaattcatttaccttgatttttaagaacagaccagtgtagaaatgttccttttgacttatagcagtataaaagtttaatgtacagtgaaagagactatgaacagacatagatttatcttattccttgagcgctaaaaactttaataaaaaaaactgcactaattttttacagcaatgcactaaagtctgagatttctcagaacatttatttatatataaaaataaaataccattatttaaattgcctttgggattagccccttccctttccttataaacacaggtagcaggaactgtgctgctcatttttctgttagtagtgtgtacttcatgccaggacattgggtattttctttaaagtgaatatagaatctcaagatatacgtagcttcatcattgacatttcccagagccaatagtcagcggatcggtcttgtgaacaccactgccagctcctgtgtctaca

SEQ ID NO: 9232 - DNA, 2026 bp, Homo sapiens
agtcattcatccagcactgggccttttaagctgaagattcacccagtgtctaaagttgtccttttcttatagctagctttcaagcatctttcctcctaaataaatatgtgacttgagaaaaaggtaataatgattttgtcagaattctttgaatttatatttactagctacttaaccataaactgctgtccagattgttaatttcatttatatttattttaattaatttgtcatgaatatggacaaagccttttctggggtgtgtgtgtgtgtgtatgtttgttttttaagtcgtcattattcattcgtattctttttctgtgtaatgtaatcatataaagttactttggacagagacccagttaattttctcttttgataggatacatggtttagataaggtataaagtgtccctttttattctagaggcttttcctttaattcagagattagtggagataataacgtcagtcaaggctaatgtggtacatggaacttgctaatggaggttggacattctgtttcagtcttacatggatattgtttcattggtgttgaggaagaaaaaaattagatactaccatgcattgggacagcataattctaatattacattgaatatggctttttaaaaataagtattaaaaagccaatcgttttctccatttatctatcttttttgtttgtttttaatttggttgattgatatgcacccaggccgtcttatttttacttgttaaatgtctgtctaggaagaactgtgattggaaaggaattaattattatacaaataaatctggtaggatatgagtggagtaagtttgcttgaaacagaagtatattttctactttgaatcacctcaccagagtcatctgtcaagaattatgtataacaatttatctttattgcctacatacaacatactttttctgaattaagataacttctatttgtgagttgaacttcattatctgccattttgtggaatcaaccttacattctttggtggaactagagctgattgtcaccacaaggttatatgacaactctgttctaagacttatacctattatatagggttataccttttttcttatgcctcagctctgtacctgacaatttatgattcagtggagccaagctagaaggaacaaaggtcatctaacactgtgatggggatgaattcctgagttttacctgcacaatgaggtggtgccccggaattcacaacagagtagtgatagagcataagatggctgctccagatgactcttgggtttagtgtacttgtgattgaacaagattttttatctatgaagcttgattctacaaccaaaataatagaaatgggggggggggggggaatcatgtctgcttatgctttttaaaagcttatagtttaagtaaaagtaaaatgtaaaaactgattaaacctatacaagtctggcaatgagctctgcatgaggaaatggaaggaggaatattgaaaatgattctaggaaagtgaacgtaagaaaggaaaatgggttttccttttctgatcatgggctctggaaagtattcatggcctttaccagcattcagtataaaccagagataaggacatatgtacttacgtgtgtctgtgagtgtgtgtgtgtctgagtgttattctgaacagcttgtaaatattgtagttgtttaaaatggaaaataaaagctgagttcttttggcaaatatattgcatcaaaaatacagtattgacagtggataaaacactgaggaaataaattttttttcattttgccttctgtccattttttgtcaaactgagaaaaattagagtacactatattaagttctgtatggcatgttcacacttggttctgaaatcattttaaacaagctttggcctgtaaacatgtgcttcaacttgcaatagatcaaaagcgtacatcatacttcatgttaaaacatggtctgtttcacacttttcttagtgcaagggttgtagtttgtcttctgaatttatctcgatgttaca

SEQ ID NO: 9233 - DNA, 1589 bp, Homo sapiens
acaagaccgtcggagaacatggactccagatttctcatgcctgaagcctaccccagctcccccagaaaagctcttcgcagaatacgccagcgaagcaacagtgatatcaccataagtgaacttgatgtggatagctttgatgaatgtatctcacctacatacaagactggaccatcactgcacagggaatatggtagcacatcttcaattgataaacagggaacatctggagaaagcttttttgatttgttaaagggctacaaagatgacaaatctgatcgaggtccaactccaaccaagctcagtgactttctcattactggtggtggcaagggttctggtttctctttggatgtaatagacgggcctatctcacagagagagaacctcaggctttttaaggaaagggaaaaaccactcaagcgacgttcaaaatctgaaactggagactcatctatttttcgtaaattgcgcaatgccaaaggtgaagaacttgggaagtcatcagatcttgaagataaccgatcagaagactctgtcaggccctggacatgtccaaagtgctttgcccactatgatgtccagagtatattatttgatttgaatgaggcaattatgaacaggcacaatgttattaagaggagaaacaccaccactggagcttccgcagctgccgtggcatccttggtctctggacctctgtctcattcagccagttttagctccccaatgggcagcacagaggacctgaattccaaaggaagcctcagcatggaccagggagatgataaaagcaatgagcttgtaatgagctgtccatattttcggaatgagataggtggagaaggggagaggaaaatcagcctttcaaaatcaaattctggctcctttagtggatgtgaaagtgcctcctttgagtctacccttagttcccattgcacaaatgcaggagtggcagtacttgaagtgcccaaggagaacttggtgttgcacctagatagagtgaaaagatacatcgtggaacacgtagatctgggtgcatactattatagaaaatttttctaccagaagggtaagtagagatcctttatttcttacattttcttttgcagtactttctgaagaaaagtactgtatattaagatatttattaacaatgtgacataagatttgcatgtcttatctttcttgatggtaaaatagctaaataaccatttgctcaatttatttctttttgcattttttgagttactttctcctttcagatatataaatgtcttgtatgttaaatagtacttttacaaataaaaagcccctttgacttagcgattgaaattatagtctttgttgtacagtagatttgctgtgtcacctttagggataaatataccaagttgaaaatatttgaaatatagctgttgtttaaggattgcaaaacagttttaatgctactttcattttttatcacttccacagtaagtacaggaatcatttctttgctgcttcaatgttgtcatcagtaggtggtaattataatatattcctgtccatttacaggaagtattgtgaaaacaaattacattatttga

SEQ ID NO: 9234 - DNA, 1142 bp, Homo sapiens
tcttgttgaaggagtacatcagtgtcagatgtaatttatcctctagcaccaaggtgtggcagagctgacctggctgtcactcagccgcttatcaccgggtagtttccatttggctgcctaatgcattcctgacttcactgtggctaagtctcaggtggggagggggtggagggggagtactttactaaagtatgctatacagctgatattatatgtaaaaatcatatttggctgatgaagctataatcactttattattatgttgtttttataaacattattttacaaatttagacttcagaggctattttagtccaacatagaagccaggtccattgctggaaaaatactggatcagtagaggaatcccattgtttgtatttagtaaaataagcaacatgccattgatgcttttctttccagtcctttctcatgcccacttctctttgccattttgctagtgagtgtatgtttatattgagaaccaggattaaatgacagtaataatatagctaacatgcatcatgttacttctttgtactttattgagttcctcacttaatgcccattggacattaaggtggatctgtactggtgatagaagtccaagtgatagccacatcctccttatggaggcacagactaggcagtagggctgcattcagattaacctgaattacttatcttcctttgagtatgtatgtgttttgtgttatttatttatttatttatttatttatttatttatttattgagacagagtctcactctctcacctacgctggagttcagtggcacgatctccgctcactgcaatctttgcctcctggattcaagcgattctcgtgcctcagcctcccaggtagctgggattacaggtgtgcagcactgtgccaagctaatttttgtatttttagtagagatggggtttcaccacgttggcaaggctggtctcaaactcctggccttaagtgatctgcctgccttggcctcccaaagtgcggtattacaagcgtgagccaccgtacctggccttttgttttcatttagatagtcaccatgatcagagtactaaggaaatttataagtggaaaatactaagttatagaataattataatgttgcctatatcctgcatagct

SEQ ID NO: 9235 - DNA, 1146 bp, Homo sapiens
gctctttcctctgagctcctactccaccatacacaggccacctgggagcagagtgctgcccagagactcgcagcacacatctctctctccaatccagggacatcttttttaatctggtggaatccccctttcttcaaactctgttctcaatatgtttagaatgtttttgaaaaacaaaaactaaaaagccctggcacaagccttctcttaggcaaggaagtgtgcacaaatgtagcctatttaaatggtgggagatagggagaaaatacaaatttattttgagaaatagtagagtagtaatctgtagagtagtaaaaaactcaacaggccacccgtgttcagtgttatcttctctggaactaaacctgtgtagccaagtctttgtttttataactaactgaagaatattaatatttgttaaatgtttacattttattgataaaatttctgagtgacaaccttaaatactgagcagaatgtaacattttcaaagtgttaggtagattttctaactttgttttgtcttattttacctaagaacactggaactattttggggctgatgagaatcttggtccagtggctgtgagcattcgaagggaaaaaccagatgaaatgaaagaaaatggatctccgtacaactaccgaataatttttagaactagtgaggtaagtcgcaaatgagagaggtttgaggtttaactgaaatggggaagaaagcaaatagtagcagtagcaaagcaattaaatttaatagcacatggttacagctgtctttggagtaagcaaagtcccctttcatttattctggtggagatcgaggtggacaagatggttagatctggacctcttcttttcatcagactctgaatagatgcagtctatgaatgaggagttttgattcagagaaagatatgtccattaagtgtggcccaaggaaattggagccctcagatccccactgggatattgtgtatcctgcttagggctactggaaagcgccaagccaacttgaggagccaggatattagatataagagaaggccactgaagacttaattcactcttccaagctcttgctgagctcatgtcttcgcccaagaagaaggagggaaagagattcttgacttcttccactatctttgg

SEQ ID NO: 9236 - DNA, 1145 bp, Homo sapiens
cttattagaggcagattcagggctaaaggtcagattttccagctgcagatttattctgctttgagtggcattttagacattagtgttttctttaatccttaagcatttcagtgtctaaggtttgtataacatcaggttggtttctggtagtacgttgattgtggagagggcccagaagcagaaaccacagtctttacatgatagttactcttatctgaggtttggcctttattgaatggaagtctcttgttaaagaagggtatgcattgaggcaagagtcttgccaacttttcaaaaaaaaaatgggaacccctgggctccttggggatggctaatgacaatgattatggaggaggctgcaaatgtgaagtactttataaatcctggaggtgtggcagtagactgtgtgtttctggggagacagatttttgcatacattatcctctggacacttctgcctttggtgcatgcttgtttttataaaaaagcttgttttgttcctcctgtagaaatgagcctatcatctagagtcatggtggttttctgtatgtgtgagcttatgcttcagttacactgaacactcgtactactgcaaaatcgaattcagtgacattgccaatatcttcgctctcagtagtctttaaatattcttagccctgggaactggcccaagaaactgcttattcttttccctgtatcacttagcatataaatcctgaattactgctgactgaagatacataaagtacaaatcaataagtattttgtttctatattttggagaatgagacaatgagtgaaagagaacccctcaatgagggctttaaaatattgtcattgttctatggattagtagagctgcggctactattttacttacccactggccaccaggtactcacactgcagtgaaaggattcctaaaaacatctttattaagatattcacatactatacaatccacccatgcaaaatttaccattcgacgttgttggtatattattactttgtaaaaatcatggccctatgcacaacatacaacttgccactttaatcattcttaatgtacggttcggtggcactaattatgctcacagttttgtgcaactgtcactgctacctatttccaaaactttttcatcatc

SEQ ID NO: 9237 - DNA, 1173 bp, Homo sapiens
ggctgagatgggaggattccttgagcctgggaggttgaggatgcattgagccatgatcacgccactgcactccagactgggcaaaagaacaagaccctgtcttaaaaaaaaaaaaaaaaaaaaaaaatatatatatatatatatatatatatatatagtttatttatttatttatttgtgtgtgtgtgtgtgtgtgtgtgtgtgtgtgtgtgtgtgtgtgtgtatatacacacacacttgcctgagatcacatagctggtaggtgatcgaggatcggagccaccttacctccaacagtatactacctccctgatatcagtactattcgtactgtaaacacgactactgggaacgttaacaaagatgcattttcggaataaccacttgtgagccaggcatcccagctgagtctctcttgcaaccacaaaacccagaatggggccaaaggtatagaccctctgagcagctatgggcatatttggatgttttccgaacccagtggtccctggcctgcctagaaggcagccacactttacattctcctatccccttagcaggaatagaccggcctggcatgctctgcagtttccggatccctggtgcctggtcctgtgcctggtccctgaatatccaagcaaataactgcttcagtacaggtgagcctggctccccaggtgcccagagaagaggccttaacaggccttaaaaccccatgtagttgtccctctccccagactacatgtgacataatcttaccagcccatctctgtctccgccaggcttgtctcggcgggtcctgttgaccaacgtggtgacgggacaccggcagtcctttgggaccaacagtgatgtcttggcccagcagtttgctctcatggttggttggattgggacaggcagaatataaaagtttgccccatgtagaaatttggccagattgaaattggactcctctgtgtgccatctagtactctttgacaggggagaaagagcatcagaaaggatcagtgggttcctttgtaagggtgtctgagccgagtgaaagttggttgatccagaaaggctggcctgagttgctctacacaacctctcatggaaaggtattgtgagcagttcttgggtacttggatttacccagtaggacaaaccatttttaaaatgtataagccaaac

SEQ ID NO: 9238 - DNA, 1191 bp, Homo sapiens
gcagtggcacaatcttggcttactgcaacctccacctcctgggctgcagcaattctcctgcctgagcctcctgagtagctgggattacagatgtgtgccaccatgcccagctaatttttgtatttttagtagagacagggtttcaccatgttggccaggctgatctcgaactcctgagatcgggcagattgcttgagcccaggagttcacaaccagcctgggctggtaaaaccccgtgtctattaaaaaaacaaacaaaaaacaaacaataagctagcagagtgtttcctgtttcaggcctgctatgagagaggcgaggaagtcagtgtagtgcccaaaacatctgcttccactgactccccctggatgggtctcgcaaaatatgcctggtctgggtgagtttaaacaacatggctcaaggttttctggtgcgtttgtctccccaggcacctggctgggtaacagtattgatttgctttccttgtaggtatgtgatcgaatgtcctaactgtggcgtggtctatcgtagtcggcagtactggtttggaaaccaagatcctgtggatacggtggtgcggacagagattgtgcatgtgtggcctggagtaagaactgttggatttctctgtttttctttatcttgtgtcgttcagtttttcatgtgtatagaaaactggaacctgcttaaaattaaggttaaccatgaatttcagaatgttggcggtttagaaaggcatgatctggagagcttttttgttctctagaccaaaattgtttttattttttcttgcatatatattagaagtacaactttaaatgaaataaactaaaaatctatagttttactcctttggcaaataaaacgtttttgcatgttctactcattcattttctatatgtgtatgtttttctagatgcaaatatttacatgcctttttcctgctttttttcctcacaatgctattttatttagttttatttccacctttttaaaaagatcattaaaatgctagtcaccatcttcgtgtaagaaagccatttttttgttataggaaattttcttgaagtatattctaagaagtgggattcctatagacgcttaatctttttttttttgagacggagtttcgctcttgttccccaggctgaagtgcaatggtgagatcttggctctcttggctcactgcaatc

SEQ ID NO: 9239 - DNA, 1232 bp, Homo sapiens
tgcctcagcctcccaagtagctgggactacaggcgcccgccaccgcgcccggctaattttttgtatttttagtagagacggggtttcactgtgttggccagaatggtctcgatctcctgacctcgtgatccacccgcctcggcctcccaaagtgctgggattacaggcatgagccaccgcgcccggccaattgactccttttaatcatgaatttcattgactctgctaaatattttattagagcttctaatgagtagcagtttgtctgatttgaatttttcttcctctctgtttttccctttttttcccctttggttgtttgaggatactaaaagtgaaatggttatcaaagggaattggtggacaggggtggaattatgaattgagtggtctttgtattaaaacatttggactctagtgattctacttttccataattttttttcttttgtaagtgaattggtatttcactaattgttttcatccattgctagccttcggattctgtgagtacaaggagccagaatctaccctccgtgcactcagattattacatgacctgcaaattggagagaaaaagctactcgttaaagttgatgcaaagacaaaggcacagctggatgaatggaaagcaaagaagaaagcttctaatggggtatgttttctgtcgtgttatcttttctaggccagactgtgctatttcagtgtagtgcttctcattataaatgaatctaatatggggcttcaaaagatcatcatgtatgtgcttgtggcttaatgtaggagggtattttatagtttgtagttattttaagtcttatctgcccatagtgggtggatgactgttggtttgcttgttccaggttgggatgaaagtagtaagggaggctggacaaggttaacttgccagagaaagcactggtacagactattccaaacagagctaattcattaaggcagctttgtaagtaagtacaaaatatatttcaacctacacaatttttattagtttccctctcttttagaagtacaccgactctaaaatgaatgaaagtctgattacttgccttaggttgggggctttatccaagctctactaagtgaagctaaaataaaggacattgttgtatattgtattttaatgtatacattattacctcctcagcaaagtgaaacatagctaaaacttgagtatatatttccttcatttctcttcttagttcctttttggc

SEQ ID NO: 9240 - DNA, 1206 bp, Homo sapiens
agtttggtatatttagcaatctgatgtttttgtttgtttgtttaatctacatacaattttgctttttctgagtggtagctatcacaattaacttaaaattgtattttgcctttactacgtaactgaattttcaactgtttaaaagagtcgttactatttgtgtacctattgagcaaaacagtctgaaaacttgtgaatggtttgcagatgtgtcgtatagtgtgctagtcctgaaatttagggaccagaattttttagctattaagaaaaagaaaatgaaaatgaagtagtatctcaggaatagttaaataaaaaaatgaagcttttctgatgttaagaacaaaaccaattctgtgtttaataggactacagagatgtttttgagaaaacatgtatgtttattaactcttgttgtagagtgattttgattttcttgcttgatttttctttcccctgaatttgctgttttgtttaagaatgcaaggccagaaactgtcactaatgacgatgaagaagccttggatgaagaaacaaagaggagagatcagatgattaaaggggctattgaagttttaattcgtgaatactccagtgagctaaatgccccctcacaggaatctgattctcaccccaggaagaagaagaaggaaaagaaggaggacgtatgtgttctgacaacaacatatcatttctaccgtttgttttttatgatatcactcttatactttgattacatgtcagttttcttttttcttttcttttttttttttttttttttttgagatggaggctcactttgtctcccaggctggaatgcagtggtgcaatctcagttcactgtaacctccgcctccggggttcgagcgattctactgcctcagcctcctgagtagctgggactacaggcatccgccaccatgcccggctaattttttggtttttagtagagacggggtttcaccgtgttagccaggatggtctcaatctcgtgacctcgtggtcgacccgcctcggcctcccacagtgctgggattacaggcgtgagccaccgtgcccggccacattttaaacttttttacagagacaaggtctcactatgttttctaggctggtctccaactcctgggttcaggttatcctcctgcctccgcttcctaaagtgccaggattacagtcatgagccactgcgcccggcccctattttac

SEQ ID NO: 9241 - DNA, 1152 bp, Homo sapiens
attagtatgagctctgtttttcttttttaaaaaagattcttggtggattttttcacagattttccgcagatttccagtggccccactgatcccttatccactcatcactaaggttagtttaaattgtaggctttgacaatacctgtgtttactgctgattgttgatttgtcattcttgtctatctgatttttcactatttaactttagattgttagatttgttattgtggatattctgtttacttatttactctttgagacctatacagaatatctaacctttaactgtttatattgaagtagggtgttctttattcattccctcctgtgcccgttttcttttaggaggatataaatgctatagaaatggaagaagacaaaagagacctgatatctcgagagatcagcaaattcagagacacacataaggtagtattcttgtcttttcacttgataccaatctagactttttacagaatccaaagcaaagagacaaaaaaaatcaaccttaaattagaatataattttaaatgttttttataggtttaattgatatttagatagaaaaaagaaacagaagaccaataccatattaaagtggtccttgacatgttgtgcttagttttttcagttactgactattctgcagtcatctcactttaatatgaatagaagctaattttatttttagatttcaacataaacatcaaggtcagacttaaattagattcagggggcagcaggataacatacactgtagtgtatttctgggggcagttatttaacttgatcttaggaataccttttctttagagctgagattaaaatttacattttatatttgtatagatttaagttgagtgggggagattttaaacagtaggtcagtggttaccagacttaccaaattttagatgcatggaagaactgtaaattcccataaagctaatctattcattgacccccaccattatgatagagatcatatggtgactaatgcaagatgaaactctcagcttggaaagtaacaaggaataggatgtaagtatgagcttctgttttttattatatttatggatgccccctcagaaaaatatgcaaaggggtaactggcttggaaatgggtatttatgcatagtaaatcccactcac

SEQ ID NO: 9242 - DNA, 1159 bp, Homo sapiens
ttaatccatgcaacatgtcagaattctgttttccacatgtgccagcacttactccttgatctctagtaagctaaactatctcttaacatattcattagtccttcatatttcttttgggaattaagttttccttttttctgttttacaccatcaggggattgactattatttcagtatatgatgggcattaactaaccattcattttaatgatttataactattttatattcagattgtatttgttttctgacataccagtaagcattaggtattagaatgcattttaggatttgggactgcaatttatgtctttctgatgagtgtagaggaggttacatagttttatggaaatcaagtgctagattctggcctgtgagattttatattatttcataatgtatgttgtcctcctttactttggtcttgaaaacagaaagtagactgacagatttgtaaaatattttgtttacattagagaaaaaagcagagatcgtgaaagggaacgagagcgggaaagagagagagagagagaacgagagcgagaacgagaacgggagcgagagagagagcgagagagggaacgggagcgagaaagagaaaaagacaaaaaacgggaccgagaagaagatgaagaagatgcatacgaacgaagaaaacttgaaagaaaactccgagagaaagaagctgcttatcaagaggtaagttgagaaaatgcctttattcttaaatcttggtatcccttaataggttaatcaatatttatagaatgctatgtataaatttttaaagctttgaaaatttaatttttttagcgccttaagaattgggaaatcagagaacgaaagaaaacccgggaatatgagaaagaagctgaaagagaagaagaaagaagaagagaaatggtaagattctaggctaaaataagtgatttttcaggtaaaaagtcagattgtatctttactgctaactacaagtaacttaataattgaaatgcacaagcttctctattcatgtataatttaatttttatgtattttgagtaattttgagccaatttaagtacaccaaaatcttttttcctcttcaaatttttgctgcatctaaagttatctttttgtataccatcaaagtaaatttgtcatatagtaatatttaagt

SEQ ID NO: 9243 - DNA, 1148 bp, Homo sapiens
ggcaatgtataacgtcaacattctgagaagtaatgaactgctagataggagagaacctctgctttctgttgattctacactactttctgagataatttttacaagtgaataaattgaggatacagaactctcagtgctactaatgctacttgatatatttttttaggttggtatctaggaaaacgaaaattatttgttgggtattccttgtgaaataggcacaaagtgtgagctctctttctgaaagtgactattttacttgtttagacacttattagaatgactttaagaatgaagggaacatagtgataaatgacaagataatgcttgttatacatttacatgtagagagcacactctggtgtgttccgtagatacagaacattaagacattctttaacctcttagcatgcaggttgtaatgttgaaaagaggtgctgttggagatgtcatgtttacttctcaatgatcggagtattaaatgaagccttttatcattcacttttacagaggaagtgctcttcagaaaaggttgcgtgatagagaaaaggaaatggaagcagatgaacgagataggaagagagagaaggaggagcttgaggaaatcaggcagcgccttctggcagaagggcatccagatccagatgcagagctccagagggtaagatactgtaccatctggtcgggcgcggtggctcacgcctgtaatcccagctctttgggaggccgaggcgggcggatcacgaggtcgggagatcgagatcatcctggctaacacggtgaaaccccgtctctattaaaaatacaaaagattagccgggtgtagtggtgggcgcctgtagtcccagctactcgggaggccgaggcaggagaatggcgtgaacccgggaggcggagcttgcagtgagccgagatcgcgccactgcactccagcctgggcgacagagcccctgactcctgggttcaagcgattctcctgcctcaggtacccgagtagtagtacggattacaggtgtgtgccacctcgcctggctaatttttgtatttttatttttatttatttatttttttgagatggggtctcgctgtgtcgcccaggctggagtgcagtggtgtcatcttggctcactgcagcctccacttcccag

SEQ ID NO: 9244 - DNA, 1157 bp, Homo sapiens
gtgatccgctcgcttcggcctcccaaaatgctgggattacaggcgtgagccaccacacccggccactaaaacaaccttaaaatcttaactagcatttaagtaataagtgcttattgtcagtggatgaaaaacttttttatactggccactgtttttggcagatgttgatgattgcttctcttacatgtgttgctgttttgtttcctctttaggtacttgatgaagaagcagaagtttttatagtcaaaatgtggagattattgatatatgaaacagaagccaagaaaattggtcttgtgaagtaaaactttttatatttagagttccatttcagatttcttctttgccacccttttaaggactttgaatttttctttgtctttgaagacattgtgagatctgtaattttttttttttgtagaaaatgtgaattttttggtcctctaatttgttgttgccctgtgtactcccttggttgtaaagtcatctgaatccttggttctctttatactcaccaggtacaaattactggtatgttttataagccgcagctactgtacacagcctatctgatataatcttgttctgctgatttgtttcttgtaaatattaaaacgactccccaattattttgcagaattgcacttaatattgaaatgtactgtataggaaccaacatgaacaattttaattgaaaacaccagtcataaactattaccacccccactctcttttgatcagaaatggcaagcccttgtgaaggcatggagtttaaaattggaatgcaaaaattagcagacaatccattcctactgtatttctgtatgaatgtgtttgtgaatgtatgtgtaaaagtctttcttttccctaatttgctttggtggggtccttaaaacatttcccaactaaagaatagaattgtaaaggaaaagtggtactgttccaacctgaaatgtctgttataattaggttattagtttcccagagcatggtgttctcgtgtcgtgagcaatgtggtttgctaactggatggggttttcttattaataagatggctgcttcagcttctcttttaaaggaatgtggatcatagtgatttttccttttaattttattgctcagaaatgaggcatatcctaaaaatcctggagagctgt

SEQ ID NO: 9245 - DNA, 1191 bp, Homo sapiens
ctgacttcctatctcatcccgtaactaagagtacctaacctcctgcaaatgcagcccagtaggtcttggccttattttacccagcccctattcaagatagagttgctctggtccaaacgcctctgacacaaggattttaaagtcttattaattaaggtaagatagttccttgcatatgtggtctgaaatcacagaaagctgaatttgaaaaaggtgcttggagctgcagccagtaaacaagttttcatgcaggtgtcagtatttaaggtacatctcaaaggataagtacaattgtgtatgttgggatgaacagagagaatggagcaagccaagacccaggtaaaagagaggacctgaatgccttcagtgaacaatgatagataatctagacttttaaactgcatacttcctgtacattgttttttcttgcttcaggtttttagaactcatagtgacgggtctgttgttaatcccaggtctaaccgttaccttgattctgctgagaatctgatttactgaaaatgtttttcttgtgcttatagaatgacaatagagaacggcaggagcacaacgacagacggagccttggccaccctgagccattatctaatggacgaccccagggtaactcccggcaggtggtggagcaagatgaggaagaagatgaggagctgacattgaaatatggcgccaagcatgtgatcatgctctttgtccctgtgactctctgcatggtggtggtcgtggctaccattaagtcagtcagcttttatacccggaaggatgggcagctgtacgtatgagttttgttttattattctcaaagccagtgtggcttttctttacagcatgtcatcatcaccttgaaggcctctgcattgaaggggcatgacttagctggagagcccatcctctgtgatggtcaggagcagttgagagagcgaggggttattacttcatgttttaagtggagaaaaggaacactgcagaagtatgtttcctgtatggtattactggatagggctgaagttatgctgaattgaacacataaattcttttccacctcagggccattgggcgcccattgctcttctgcctagaatattctttccttttctaactttggtggattaaattcctgtcatccccctcctcttggtgttatatataaagttttggtgccgcaaaaga

SEQ ID NO: 9246 - DNA, 1854 bp, Homo sapiens
aaatgctttcataattatgtgtgaatgtgtgtctttcccatcttctccacagggtttgtgccttacattattactccttgccattttcaagaaagcattgccagctcttccaatctccatcacctttgggcttgttttctactttgccacagattatcttgtacagccttttatggaccaattagcattccatcaattttatatctagcatatttgcggttagaatcccatggatgtttcttctttgactataacaaaatctggggaggacaaaggtgattttcctgtgtccacatctaacaaagtcaagattcccggctggacttttgcagcttccttccaagtcttcctgaccaccttgcactattggactttggaaggaggtgcctatagaaaacgattttgaacatacttcatcgcagtggactgtgtccctcggtgcagaaactaccagatttgagggacgaggtcaaggagatatgataggcccggaagttgctgtgccccatcagcagcttgacgcgtggtcacaggacgatttcactgacactgcgaactctcaggactaccgttaccaagaggttaggtgaagtggtttaaaccaaacggaactcttcatcttaaactacacgttgaaaatcaacccaataattctgtattaactgaattctgaacttttcaggaggtactgtgaggaagagcaggcaccagcagcagaatggggaatggagaggtgggcaggggttccagcttccctttgattttttgctgcagactcatcctttttaaatgagacttgttttcccctctctttgagtcaagtcaaatatgtagattgcctttggcaattcttcttctcaagcactgacactcattaccgtctgtgattgccatttcttcccaaggccagtctgaacctgaggttgctttatcctaaaagttttaacctcaggttccaaattcagtaaattttggaaacagtacagctatttctcatcaattctctatcatgttgaagtcaaatttggattttccaccaaattctgaatttgtagacatacttgtacgctcacttgccccagatgcctcctctgtcctcattcttctctcccacacaagcagtctttttctacagccagtaaggcagctctgtcgtggtagcagatggtcccattattctagggtcttactctttgtatgatgaaaagaatgtgttatgaatcggtgctgtcagccctgctgtcagaccttcttccacagcaaatgagatgtatgcccaaagacggtagaattaaagaagagtaaaatggctgttgaagcactttctgtcctggtattttgtttttgcttttgccacacagtagctcagaatttgaacaaatagccaaaagctggtggttgatgaattatgaactagttgtatcaacacaaagcaagagttggggaaagccatatttaacttggtgagctgtgggagaacctggtggcagaaggagaaccaactgccaaggggaaagagaaggggcctccagcagcgaaggggatacagtgagctaatgatgtcaaggaggagtttcaggttattctcgtcagctccacaaatgggtgctttgtggtctctgcccgcgttacctttcctctcaatgtacctttgtgtgaactgggcagtggaggtgcctgctgcagttaccatggagttcaggctctgggcagctcagtcaggcaaaacacacaaacagccatcagcctgtgtgggctcagggcacctctggacaaaggcttgtggggcataaccttctttaccacagagagcccttagctatgctgatcagaccgtaagcgtttatgagaaac

SEQ ID NO: 9247 - DNA, 1156 bp, Homo sapiens
aaaagccaaaatctttatttttatgcatttagaatattttaaatagttctcagatattaagaagttgtatgagttgtaagtaatcttgccaaaggtaaaggggctagttgtaagaaattgtacataagattgatttatcattgatgcctactgaaataaaaagaggaaaggctggaagctgcagacaggatccctagcttgttttctgtcagtcattcattgtaagtagcacattgcaacaacaatcatgcttatgaccaatacagtcactaggttgtagttttttttaaataaaggaaaagcagtattgtcctggttttaaacctatgatggaattctaatgtcattattttaatggaatcaatcgaaatatgctctatagagaatatatcttttatatattgctgcagtttccttatgttaatcctttaacactaaggtaacatgacataatcataccatagaagggaacacaggttaccatattggtttgtaatatgggtcttggtgggttttgttttatcctttaaattttgttcccatgagttttgtggggatggggattctggttttattagctttgtgtgtgtcctcttcccccaaacccccttttggtgagaacatccccttgacagttgcagcctcttgacctcggataacaataagagagctcatctcatttttacttttgaacgttggccttacaatcaaatgtaagttatatatatttgtactgatgaaaatttataatctgctttaacaaaaataaatgttcatggtagaagcttttgcccatgaagggctgttctttcccctttcctttattagtaaatgaatttatttttcgttcttttggtcttactctccattctactgctgctgtaaatccctagtttagtgactagaaaaatacccttaagattcatattttcattcatactttaatcctgagtgtatctctaaagtcagattcttgctgctcaaagtgtggtctgtaacagcagcatggacttcacctaggagctggttagaaatgcagaatctcagcggggtggggcagtgcttctcaacctgggctatgcaatagaatcacctgaggatatctttttaaaatcctaacgcctggcctatattccagaccaattaaatcaaaatt

SEQ ID NO: 9248 - DNA, 1170 bp, Homo sapiens
tcagttagtggttaaaatgactgtcatgatcatttctttgactgataatgtggcaatgttactcatgtggacctcgccttaagcacacattttggttttatagttccttatgtgtttaaagcattagttatatttgaattcctagactaaatgctggccattgatgtatgtcaaaatttaccctaattatttggtctggtgaccctcattgttgggaaaagtgactaccatggttataagtaagggtataatgaaacttagtatttcaaaatatattttttgagaagttctaagttaaacagctcttaaaatgtattatgtacgtggttgtggagggaagggagatgtttcattatgagatcccaggcaaatggcaatatgtttgaggattgtctcctacataaagcagtgtaggtgatttaacctcaaaattgcaaagcaatagttagatgcagaggttagaatttatcatgtaaacaaaaaatccttcaggaaaatgtaagacattgtagtcagtaagcagatgaggtcataggaggccatggctggatcactattagattgcagaaaagaagtcaggggccctctgccaaattgtgcctaaagtccctcagagactgttgattctggtttccccatctacttgtgtgattttacttgcataaaatcacagtgaaagagggaagaatcatctttaaaaagtgattgcataagtagtcctgggtttcagaagatttcagctatcatttacataggaattacttgatttttctaagttactctgatcaaaagggaccactgctttgacaatcaactctaaatacaaacaagaggccaggcgtggtggctcatgcctgtcatcccagcactttgggaggccgaggcgggcggatcatctgagatcaggagttcaagaccagcctgaccaacatggtgaaaccccgtctctactaaaaatacaaaaattagccagtcctggtggtgggcgcctgtagtcccaactactcgggaggctgaggcaggagaatcatttgaacccgggaggcggaggttgcagtgagccgagattgcgccattgcactccagcctgggcaatagagcgagactccatatttaaaaaaaaaaaaaaaaaaaaaagaggaaaacttggtctaacacccttttagtttt

SEQ ID NO: 9249 - DNA, 1470 bp, Homo sapiens
tcattctccttggtgatgttttaagttccataaactgagagggaagatgatcttcttaaagtttgcacttccttcagtaggcaagcttgaagccatgttgatatggatatgttttctaaaagtaaccctggaagtgaatataataggaagtaagtgatttcatattgaatttatttgtaaaatggcttagagttttggtgtttgttttttctgaattctgtaatatagaaactggttctctttctccttgtttctcaatgacttttaattacaggtagttctcagacaaatgtaagatacttttctctgtccatttcatgcaaaattcatattcagtatcattcaacaaatctttgaatgacttctatgcatccctgttcatggaacccatgccattagaaaatggcagttgggatgtatgaagaaatgtaggatattctctcaaatcattccctaaattatcctttactgctgcaaatttagctgataaaactgcctttggtttatgcctcttggatcagatatttgacctatgtggaatagattatctctgtgcttccggtttaagacattacgccattttagtggatcatttaaattttttctattctgtttttttttgtttgtttgtttgtttgttttaaacagagtctcactcccgagtagctgggaccacaggcacgtgccatcatgcctggcctatttttgtatttttagtagagatggggtttcaccatgttggccaggcttgtcttgaactcctaacttcagatgacctgcccacatcggcctcccaaagtgctgggattacaggcatgagccaccgtgcctggccaaatttcttctattcttgtaagtgatggtaaaactctggaatcagtccagtattttagtttttcacagcaaatttgattttagtctaccaaggagtttaacttttctatgttccctaactctaagattagggctgtattacctagacaggccttaaaaggtttttgtgttgttctctgttaataagaatttgttcctttaaaccagaggatcaaccttggaactattaacattttgggattgataattcattgttgttgggggctgtcctgtgtgcttaggatgttcagctgcagccctggcctctacccactagattccagtagaccccctcctcagccatgacaacaaagatatctccagacattgccatctgtcccttgggtaggagggtgggaacaaattctcccttagttgtactttttataccaacatcacttgtgtccagggtccatttattttcagtctgtagccatgtgccacttgaattgttatatgagagaaggtgatgtattcagtaatcatggatggaaagaaatggtcactggtattttttgtaatgctcatttttttttttttttgagacagagtctcgctctgttacctaggctggagtgcagtggcgcaatctcagct

SEQ ID NO: 9250 - DNA, 1169 bp, Homo sapiens
ttctttccacgcagccaagaaacccccaaaccagtcactgcccctgcaacccttccagctggcattcggccaccaggtgaaccggcaggtcttccggcagggcccaccgcccccaaacccggtggctgccttccctccacagaagcagcagcagcagcagcaaccacagcagcagcagcagcagcagcaggcagccctaccccagatgccgctctttgagaacttctattccatgccgcagcaaccctcgcagcaaccccaggactttggcctgcagccagctgggccactgggacagtcccacctggctcaccacagcatggcaccctaccccttcccccccaacccagatatgaacccagaactgcgcaaggcccttctgcaggactcagccccgcagccagcgctacctcaggtccagatccccttcccccgccgctcccgccgcctctctaaggagggtatcctgcctcccagcgccctggatggggctggcacccagcctgggcaggaggccactggcaacctgttcctacatcactggcccctgcagcagccgccacctggctccctggggcagccccatcctgaagctctgggattcccgctggagctgagggagtcgcagctactgcctgatggggagagactagcacccaatggccgggagcgagaggctcctgccatgggcagcgaggagggcatgagggcagtgagcacaggggactgtgggcaggtgctacggggcggagtgatccagagcacgcgacggaggcgccgggcatcccaggaggccaatttgctgaccctggcccagaaggctgtggagctggcctcactgcagaatgcaaaggtgagagtggcatgcagtggagccacacctggcagagggcatcaggctgataggtgggcggctgcaggatttgcttcttgcctagggaaagccagactttgccctagccagctgcctgtgggaaaacagtacaaagaccacccttcaccttgccacagggttcttgcttactttcttttgcagaaatattttttgaataattagatactatttcagatacagatagatacagatcaccgggttcaagtgattctccagcctcagcctccccgagtagctgggattacaggcgcctgccaccatgcctggctaattt

SEQ ID NO: 9251 - DNA, 1171 bp, Homo sapiens
gcttttgctgcctctttctcagctgggctggaggggcttgggctggatgtcagctccacctgtgccttagaatgtgcctatgcagtgcacaaataacacagacagatgcaggcagtcctggagcggaaccaggagggtgaggtggtgggacaagagagtcacagtgccctgggagatgcagctgattctcctgccctcctggcagctccccaaaagtcctggctcctgcctcaccaatgctgctctgtgacttggggcctgtccctgtgatatgaggtggtgggaccgaaggcccttggagccccttttcttacacttgtgctgatgttcggggcatcctgggaggctgtggctgacactgtcactgctcttccctctgcaggtgccagaaccctgtggagcatcatgaactgggaagagtagctgagccccagagcctctctggaagagaaaggaagagccagcagttctttctcccagtgtccgacctcactgtccagcgtcttcctctgcccctgctctgccctccctggctcctggactagagcccggcttccagcaggacgtttccccaggggatgggcgactgttgaaggggatctcaccgccagggctcagttggccacatcatgaacctccaggcccagcccaaggctcagaacaagcggaagcgttgcctcttcgggggccaggaaccagctcccaaggagcagccccctcccctgcagcccccccagcagtccatcagagtgaaggaggagcagtacctcgggcacgagggtccaggaggggcagtctccacctctcagcctgtggaactgccccctcctagcagcctggccctgctgaactctgtggtatatgggcctgagcggacctcagcagccatgctgtcccagcaggtggcctcagtaaagtggcccaactctgtgatggctccagggcggggcccggagcgtggaggaggtgggggtgtcagtgacagcagctggcagcagcagccaggccagcctccaccccattcaacatggaactgccacagtctgtccctctacagtgcaaccaaggggagcccgcatcctggagtgggagtcccgacttactataaccaccctgaggcactgaagcgggagaaagcggggggcccacagctggaccgctatgtgcgacc

SEQ ID NO: 9252 - DNA, 1108 bp, Homo sapiens
acagggagactccttggtgttgtgcagagtccccaggtgggtggcagctggagagcccccggcgtaccttgagttcgcaggttggagcctgctgaagctctgcccgacagaatgcgtgtggagggaggcccagacccagctggggccctggttatctccagtgtatatttgctaaaaccaaatttcagaactgtcaaagactggagtttgttcttctgtgatcagattgaagtaggaccttgtggctggaggtgtgccagggtcagagagaaaatggagagtatgggctcagggcacgcctggatgctcattaggggtactcaggccagcttcatgtgttccatggcaagtgatggctgtgtgtgtgtgtgtttggaggtggggctggtgactgtctctgtgcttttctagaatatcgtgtttattcctagatgccccaacctcatcttcacgccctacagtggcattgagcctggttctgatcattgctggtcatgtgaatattaagtgccatagtgtctaaggaacaagctgccttctcgagcccaggccccagcaataactgttcctctcagttccctaatttagagaccacgtgtgtgccccagggttgtcagcagctcggttttttgaagcttgaaacacatttccatagaaacaatgctataaatggtggttgggtacctaggctagcccacaaagagccctggtgtcacctcagaagttgctgaaataaggtattagtgaaattgagagcccaaatgcagcagtcatagttagtacccaggacgctggaggttaattggtgtgggtttatttgtgtaatttcctttctttggtgagaggtgtttcaaagctctctagataagggatgctctgtaggcactcccccgcaccatccccacccagtcacaatccctcctctcccggtttacattccttcttctttcctcatcaagccaggggcctgggcctacctgccctctggtatgtttatgatgaggaaatcctgttcagtggcccttacatcatcattgtcatcatcaccatcatcatcatcatcatcatcgtcatcatcatcatcaccgtcgttactgttatataaatc

SEQ ID NO: 9253 - DNA, 1196 bp, Homo sapiens
aggcaccagagtgttgggaatggaggctgttctttccctctgaggagtctgtggtcattgatctcttgcctctcatttttctcctttctgctcacaagcttccctttttgcatggtagccattcctaaccctacatcagaactattcagctccagtgtgtgccccatactgaaactttccttattgctctctagttcaaatatcaggagggcctggctgagtttaactcatggctggcacctgttcagtcatgtccagctttggctctgttggctgaggctgatgtgacagtgcaggggctccacctctaggggctgtgagtgaagcaggcctgatggaattatcctgccacacaacaatcagagctggaggaaactttagggagcagagaaaaacttctgaagcagtttatgaagaggctggaagacttagcaggctcatgtgtccatgcagataggtgcagatggtcacaactccggagtacggcaggctgttggaatccagaatgtgagctggaactatgaccagtctgctgttgtggctactctgcatttatcagaggtaagatcctgagctgccatctggggactttattcataggcactaggtacttcacagagaaacttttctcctctctgttgcaggccacagaaaacaacgtagcctggcagagatttcttccctctgggcctattgctctgctcccggtaagaggtccttctgaccagtccgcccacatgcatgcaagcctttcctcttcactttctctcagcctttttctggtttcaagggaatctgcccaggctgtttgtaagttccctttttgtctttttatgcttgagagtttccaagtgcagcagagtcttagccgttggtattggtgttcttttgacacagctctcagacaccttgagttccttggtttggtccacgtcccatgaacatgcagcagagctagttagcatggatgaggaaaaatttgtggatgccgttaactctgcctttgtgagtatcaatttacccagctgatgatgtgctgcagggggagatacagaaaggtgttgtttttttttttttgaaacggatccttgccaggctggagcgcagtggcgcgatcttggctcactgtgcaatctccgcctcccgggttcaagcgattctcctgcctcagcctcctaagtagctgggactacagg

SEQ ID NO: 9254 - DNA, 1123 bp, Homo sapiens
ataatttaagcctaggagtttgaggctgcagtgggctatgatcacatcattgttactcagactgggtgacagagttaagaccagtctcttgaaaaaaaaaaatgaatagggatttctaatgatgaagatgtttaagctccttttgctgcttgactagtttcatccctgagaacttccatttaaagatatgttttttctgatgggtgcagtggctcacacctgtaatcccagcactttataggaggctggggagggaggattgcttgagcctaggagtttgaggctgcagtgagctatgatcacaccactgcactccagcccagtcaacagagtgagaccctgtctctaaaacgtgtgtatatgtatgtatatttttctttttttagctgaaataaaacaaggacacttgggaagaatacctacgtgattattatctacaataattattttcttcaccttactgtgttaagagtttcattcacttttattttttctccaggaacagattatggcctttgcaagcaaatgagtactcctctcctaaagaaagattacgttgatgaaaaagaacatcctgcccaggacccatcatacatattttcaagatcttatttaatttaataaacttactttacattaaaattctctttttcttctttgcttaatgggcctgtggcacccaaataatgaatgataatttgctgtgaggagcgtatattagccagaccaaaggaaaaaacttcgaaggaagacttacaatttggttgaaaagagctttttattactaaaaaacccacaaggtgctgtctcactcatttccagttaatcatttctaaagagaaaatttacattttgtttttgttttaatgttggtcataaatttatacagttgttttttgatagaggtaagaattagactcgatgcatttttgttagaattgctgtttaaatgttaacatcagaatgcaaattaaatataaattgctttaacctttgttacaggtatactggactttctgaaaggaaaaccaggtctcattaatgctagttattactttatcacagcaccagatttccattttatttatggttcctctctgggacaccactgtcggtttaataa

SEQ ID NO: 9255 - DNA, 1192 bp, Homo sapiens
tcgtcattcccatctcctgaaacaggattccttaagtctagatctggagtctccccatgctctagagaccctagccatgtgccagaatctgacaggagctggtagcagagtacctcagcccttaggtgtgaacttcaccacagcaggttcatgtcagctcatctaaggaatggagtgggaaggctcctcctagtttccagtgtatgtccaggtagagtttatcaggtttaaaaagttacaggatcctgatttgagctggcagggttaaatatatgcctttccataggtccagttcacctatacatttagatggtttggtttagctttacttaaagtcaaaggaatctctgtgtttgtgtttttgcaagaaactggtaatggcttgcctagtttcttctctagtttcttagggcaaaggaatgagttttgccaaaattttatctaggaaaaatggagtagttttctaagtcttacaggacactgtcaaaatatggaaatctattttattgccttagggaattctttttttttttttttcctttttctctaggtaaaggagatcttcaggaagtcacctttcctggtaccaaagggcagtgttagcatcatggatggatccgacgaaggtgggagaggtgttgatatgcgttccagggggagaggggcaggatcagtgaaagatctaactaaaggaactggggccaggaataaacagaaggaatgagatagcaggaaatagaagacagggagaagggaacatgtgctctagacatggaatttagagaggaaaaaaaaaaaacaaggttggggccaggaaagagaaaaaatgctctgggatctaatccttgtctttctttctttttaggcatattagcttgggttactgtgaattttctgacaggtaatacatcctcaagtttatctttagagcttaactagcttttacatgcatagtcagaggagtaaaagccttttctttcattctgtattgtttcttcttctttaaaaaaggaaaagaggctgggtgtggcagttcatgcctgttaattccagcgctttgggaggctgagttgggcagatcacttgaggccaggagttcaagaccagcctggccaacatggcgaaactccgtctctaccaaaaatacaaaaatagctgggcatggtggtgtgtacctgtagtcccagctact

SEQ ID NO: 9256 - DNA, 1319 bp, Homo sapiens
actgcctagaaattcttttcctatatatccacttgatgaattcctgcaactccttcaaatacttgtttaaaaatcactttcttattgagatctacttaatactataacctctcaccttcacatgctcccacctctacctgctttctcaactccccttactctgatccacttttcttttttccacaccacttatcacattctaacatactggaaagcttactgatatttattgtctgtgttcctctgatagaatataagctcctcaagagcagaaatctttttgtttactggtgtaacccaagaacctagaagagcgtccaaggtggaattcaataaaaactgacaatagaaatgggctagggtttctctcagccttagcgccattttcttggaaacctctgcatcatgagagctaagtggaggaaaaagcgaatgtgcagtctgaagcacaaaagaagaaagatgaggcagaggtccaagtaaaccgctagcttgttgcaccgtggaggccacacaggagcagaaacatggaatgccagatgctggggatgctggtacaagttgtgggactgcatgctattgtgtagagcttgtctcaatggatccagaacttcaccgccctctgatcgctgatcacctctgagacccaccttgctcataaccaaaactgcccatgttggtcctctgccctggacctgggacattctggactatttctgtgtttacttgtggccgagtataacaaccatacgataaatcatctcttctgctgtcttagctgaagaatcaaaaaaaaagaaaaagaaaaaaagaaaaaaaaaattggctgggcatggtgcctcatgcctgtaaatcccaacacttgggaggctaaggcaggaggatcactggagcccaggagtttgagaccagcctgggcaacacagcaaaaccctattaaaaaaaatttttttttaatgaaaaaattagccaggcatggcagtgcacacttgcagtcccagctacttgggaggctgaggcagaaggatcacttaagcccaggagttcgaagctgcagtgagctagaatcatgccactgcactccagcatgggtgacagagcaagaccctgtctcaaaaaataaattaattaagtaaataaatacatgtattaagcaataaaaatatttattatctcatcccttttttatttttttgagacagagtctccctctattgcccaggttgcagtgcagtggcgtgatcttggctcactgcaacctctgcctcctgggttcaagtgattctcctgtcacagcctccgaagtagctgggactaca

SEQ ID NO: 9257 - DNA, 1183 bp, Homo sapiens
ccaaatattgaagagatgtcatactactaaattgcaaaatgcaaactagttttgtttcagactttttatacagtgcttttcttgtccttgatgttagtcatttgaattgatgcccaatctttaatttaataattggaggctattattaataacaataactgatttacttcttgtccaagcctttattagattcatgggatgtaggtatacagagatttctggggctgttctgggctattggagatcttgtagacctaaactattcaaagcagtagccactaactgcatgtgtttgtttgaagttaaattaattaaaaataaaatttaaaatctaattcctcagtcactctaggaaatgctcagtagccatgtgtcgctaatgactaccacattggacagcactgctctagaccaaaggtcagcaaactatggcctgcaacctgtttttgtattctctgagctaagaatgttttttacgtttttatgggggctgtaaaagtaaaacaaaaacaaaaaacggaagaatctgaaacagactgaatgtggcccacaagcctaacataacatccttacgtcccattcatacttatgttatgttaggcttgtgggccacattcagtctgtttggttctttacaaaaaacctttgctcagccctggacctatgcttcctcttggtgacgttttggctttctgatcaaattgggttaggactttccataagtcatcagaagactaaatctaataagcaaatagacaaatttcagataaagtttcttactatagatagactatggaatgagtccagagcatacacaaatcagttccctgaagctaggacaagcgggatgtgcatttgaaataggaaaatagtttatagtataaattatcaatttcctacaagctttgtgcataacacctatagtttaacagaacatctttcttattttgtacactattttgtgtcttctgtgttctatactctcctatcttactctgacagaaacagaatgagcctgggcatagtggcttatgcctgtaatctcagcactttgagaggccaaggtgggaggatcacttgaccccagagttcgagaccagcgtggacgacatagaaagaccctgtctctgccaaaaaataccaataaaattagccaagtgtggcagtgtgcccctgtggtccc

SEQ ID NO: 9258 - DNA, 1618 bp, Homo sapiens
cccaccaggcccacctccaacattggaggtcacatgtcaacatgaaatttcaaagggacaaataaccaaaccgtatcacttcatttatatgccattgatctaagagagaagagaatgctttagaaattacatttgataaattaaccaagttagtatgtggtgctgctagcatcaaatcacaagtataactttgttcactctcttaaggctgtaagctgtgcccacatgctaagcagccctcatgatttaagaaaaaaagtatgaggagttaggaagtttgctactgtacatctaggattcatagttaaaccaattatggatagaagtcaggtcctattttcatttttctcaattatttttctctttctccagataaaactggtggtggagtggcaacttcaggatgacaaaaaccaaagtctcttctgctgggaaatcccagtacagatcgtaagtctatctgggggtgagagggcatgggtggagggaagaaagtggaggagaaatcagactgaaactaaatcagtgccataagataaaaggaatttcaagactgctgttttatgcctctcaacctctaaaagcatctgagaccctatttcctgagagctcagaactgttgcctttgtaatatcctttgttaaaaaaaaaaaaggttgaaggaaagaagagagagtgagactgtagagattgatttaactgtcttcattggtttttttctgtcggagtaaggaaggtccagccagacaggacctgaaggaggttgcttaggaatgtctgataacttgccctagggttattgccctgacagtggaggaaaggttccaaaccacttccactgagctgggacattacatccacaggtttctcatctctaagtgcctcattgagttcggtgcatctggccaatgagtctgctgagactcttgacagcacctccagctctgctgcttcaacaacagtgacttgctctccaatggtatccagtgattcgttgaagaggaggtgctctgtagcagaaactgagctccgggtggctggttctcagtggttgtctcatgtctctttttctgtcttaggtggtttcattaaatgcagcacttggttagcagatgtttaattttttttttaacaacattaacttgtggcctctttctacacctggaaatttactcttgaataaataaaaactcgtttgtcttgtcttctgcatgtgggctgtggtcttctcctgctcctttcagggtacattctgctagaaccatggaaggcaggcccccagttccgtggtcccagagtgcactgaagacatgactttttcagaaactctttttcctcctttttgtccagtaagaccatatctattttatataaaatggccttgttttgctttatttgacacaatcttataccaccaagcatgctcgaaagaagcagtgaaagtaaaaatcacctagttgaataataacgcctgaaaggttgaaggaactgaatttggtggggagggcaggtaggggttagggattacaggttaggatgaggcatggtgatcttttgggaacactgctgtgaagaaagcctagaagcttaaaaatgaaatgtgaagttgtagcaagta

SEQ ID NO: 9259 - DNA, 1618 bp, Homo sapiens; identical to SEQ ID NO: 9258

SEQ ID NO: 9260 - DNA, 1259 bp, Homo sapiens
cgcccgtctcacagtgaggatgcagtaaaggtttgttgttctgaatcaaagtaactaagttataggagcaaaattgatctgcccaggtccattgggtagtcggtagaaagtcaggccggactagattccaggcttaagtccctacacgtttcccagtatttattccattgaatcattttgcctcaaagaaaatcagcacctgttaaaggtaatggggaagctccctctgtactttagaaaacagaggatgtgcacctctgggctcagggggtgtcttttttgtgtttgcgatactccttaatgccttcctcctgtcttttcagggtatttgaacagggtggggcaagagtggtggttgactctgatagcttggccttcgtgaaaggggcccaggtggacttcagccaagaactgatccgaagctcatttcaagtgttgaacaatcctcaagcacagcaaggctgctcctgtgggtcatctttctctatcaaactttgatgtgatgactggtgactctgggattgtcaccagttgtaccaatttgaagaacctggaattagtagaattctagaagtttacttctaatcatgtccctctcaattttatttcccgcagtccaggagtgttatgttttgccactattattttcagaatgtgaagattttactcttggcttaatttttccctccactcagtgctaaggctgagcctccagatgctgttacctcagatttaatcactggttgaaactccgtataatctgtagagcctccatggctctaaaatttggaattaacttctcttgccttaagagctgcttgtacatatgtggatagctatgtataaaagcttcattttaaagaaggttcttattgtgttgtggatcagggtcacagattgggtagcttggacaccagttattagaggatgagaaaagtaaatgaaatgttctctttttcacttcaccctgccagaatgtgccacttgacttatctttattgtctatgcaacccatttgccacttcctgtttgataggacagatacattttactctcatgctcgtggatctgctatgagtcataaaaccaagagcccgttacccagaaaacttggaccaaaccctcactgatagtgaattatttcaaaaatagcctccctactcatacagacattttaagattctgtgacaatttaatgactgaatctttttaggatatgttgctttacctgccttctgttgtaaaatggctctggtctc

SEQ ID NO: 9261 - DNA, 1170 bp, Homo sapiens
aagaggtatttgagggagctgtatctcaatcctatgtcatgtggtaggaaccttgacttcctttaattcacctgattactgaatcatgataatagctaccattttttttttttttttttagctcttcccatatgctaggagctttagtatttattgtctcattcacaacaaccctgcaaggtatgtcttgttttctccattttacacaaaacacagttgaggcacacagaggataagtaactgccaaggtttcttagctggcaagtggtagagctgtatttgaacatgggtctgtttcgtgtcgaagcccaaactccacatttctggtttgtctctagcagattagtttagactaagaaacagcccaggcactgggccactgtgctcgctgactctgccttgttcacttggtgatgctgtgtgtgacagattaacactttataccttggcttacctatcagtcacttggggatttgggatttatgggaaaaggccctactcatgcagggtagagagattttaagagatacagctattagtaatggctttagaatcttttgcatgtagaaagttccttagactaccaactaatgagcaaagtgacttccaagtttaagtgaattctatataaagaatacaagacacccttgaggatataactgaggaaaaaggccctgaaattttagtatccttgctttggtggaaactcaataggtatcaaatgaaataatgaggtcagatatgttacataataccctgatgtttatctctggtaattaagtctgcagaaaaagacttattggaataaatcttttgtctctaaactctgctcatatgaaatagcaccatttggcaaaggccaaattcctggtggatatctcactgaggaagcaaacattttcaagaatgccagagttaaagggagacaacacacaccctaaacaagactgtgaagatactatgaaactattctgttgaaaccataagcatagtatcttttccagggtgagggggtttctgtaactctcttgagtgaagtcgctctttctgcaaccccccacttcacctgcattatggatttgcacataaaggagtttttctgaatcttcccttcttctacagaccaacaatgtttcctctctcctcagaactcccacttgagggagttgc

SEQ ID NO: 9262 - DNA, 2007 bp, Homo sapiens
ggatcctttagcattctactgaagaaaattttgtagcaaaagattagaacagtaagaatagtatgccagcaatccctgattctctctctgcttggtgttctctggcagcactaagacaaaggaacagggactaggagtttacgtgcttatcacaggtccttggcgtcaggacactagggatgaacatggaggtgatatgttacacagtaaacacctgccaacccctgtactcccctttgctccatcagttatcaggaaggagaactaaggagggaggaagcttattaggttcactgttgaatgatgattgaagagtacctgctgctgtatcttggaagatgacaacatcctttttcattactgtttgattgaaaataatttcaagattcaaaatctcattgacttcccaaatttgtgtttttaagaaggctttgctgcaagctaccattcccaatggggcagtcaactctgagaatattacaagccatctttattgccaaaaccagcaagtacacagagtcctgaaacaaggcaggactttggcaatgccttggcctcctggaagcatgtctgagccctcctgttcgcagggatcatgaggaacaagccctcctgagctgctacagttcctgcctgacctcagtctttcgcagtcatcatttgtcctttcttggcacatgggtgctgacctcactcatccttggggtccgggatccagcatcagggtctctataccccaggatcctccatgccacatggtcactgctctcctcagggaccaggacaaggtgctgctgcttgcccaaatgttttcccatgggatatgtaccggaaggtttatcaccaccctgggaaacataatgctgccccttgggcccagaaaggggtttccagctgggggcacgtggactggttctgctgtttttggcagtcgcttttctgaattctcccctccggcagccttccagagactgatcctggagattgagttgattgtcttggctagacctgtcattttaagctctagtcatagcactttttcagagcatcttaggcaccattgcaacccaaccagggaagctgcatccctgtggtggtccttaggcaccagtctttgttaaacaaaaccctttggcactattgtggttttctattctctgtctgaactctattcaaaagtatctttgctctcttgggccttttcttttactgttttgttttttttttttctaatcctgctttcatactagccagtgtggggaaaaggtacaatatgtcaaagagatgagagagtgttatttcttgggcaattttctattagtgtttcttattttggccagttcttttatttatgtccttgtgacccaggtacttggggggccagctacccttctggccttttagcgtctttgaaggagaccagacatgagtgaatacctaggagagtgtcagcatgtttctggaaaattggcagagaccaagccctgctgcagattcgtcaggccaggtgaaagggccaggcagttgcagctgatgatgtaaatattttgtacagtagataaataaatgtttaaaagaactaaggagtgagtggctgctttaaatggagattcatggcttgactggaaggtggggaaggaaaagatttggaaatgattttgcatttccccaggaattcctcctgaagtggtcggctcggggtagagtgtacacctggagtcctggcctgtcccactcttgccctttcacccttccctgattgctgtccatggtgccaggcagggccactgtctcagccatggggagacgaggacaagtgtttatgctcagtttctgaagaaggaaccggttaatcagtctttaaacaataattcattgttgttttactacctagaaattcaatatagaaaatttggaaataagaaaaagaacaagggaaataggtaagttgctatccagaggtaatcaccgttaacactttgataaatagccttttgattttcatat

SEQ ID NO: 9263 - DNA, 1146 bp, Homo sapiens
tcttcctttgtttcttttcctagctcttcttgaaattagcctgttatggcctggcatggtggcttaggcctgtaatcccagcactttgggaggctgaggtgggcggatcgcttgagcctgggagtttgagaccaacctgggcaacatggcgaaaccctgtctctacaaaaaaatacaaaaattagctgggcatggtgtcatgtgcctgtggtcccagctactggggaggctgaagtgggaagatcacttgagcccaccatgtcaaggctgcagtgagccatgttggcgccactacactccagcctgggtgacagaccgagattctgtctcaaaaaaaaaaagaaattagcccattagactttacaatattaaattaatatttaacaaatatttaattaatatttaacaatattttaaaatattgttaaatgttgtttatcttggatgcttacttggtctttgagtagtttctagagataactcaaccatctgaatttttcaatagatggctgatcactgggaaactgcacctcgtcacatgatgcgtctagatattcgttctttgctgcaagatgctgctattgaagaggtgagtatcctttggttcaaatgcaatgcaaagtgatgttactttttcacctttttactttgaaaaacttaaaacctacagaaaagttatatgaatagtattcatacaagaacacctactgatatgcctttcattgagatcacggttagtattttgccacatttttctctgaatgcatgtattcttattaacattcttgttaatgatgtcactgtttttgtggaaccatttgagagttaagttgcagatcttataaaccttcacccttaaatacatcagtaggtatcttgtaagaacaagtacattctcttttgatttgatgacagttatcaaatgcaggaaatttagtattgataaaatactatattaagtaatataaatttcctgaattaaatttcttgaattatctcacatatagtttatattcacattttaccagttgtccctataacgtggtatatagaaattttcaaaaatctaagattcaatcctttaatataaaatatagtttctcagccttgtcattgtcatgaaagataaagaatttatgaagagta

SEQ ID NO: 9264 - DNA, 1164 bp, Homo sapiens
tttgctaaatgttaactcagtctttttttttttttttaatggttggtataggtagagatggaagattttgatgcaaatatcgaagaacagaaagaagaaaagaaagatgcagaggaagaggaaagcgaactggtaggagacagaccaaccactttgaacagtgtctctttattaaaattcttaaagaaggtttaaattcagatctgtggttagacaactactgttgatatacactttagtggtaaaagtttccataatcatcttcaaggagacttttggatactctttatttttccccagaccaaaagaaccctctaatgtggtgttaagagaaagttttaacagagtgctaagaaacttacccttgtactcatctatttgtgggtggttttaggggagtataccttttaagaaaatcaattacatatgaaagggcattcttacattccagcagatatgtggcacagcctacccaacatatgcataattgtctcttctttgctacaagatctccaaatttgagtttctgtcaacagaggcagaagaacttattgaatggggaggcagagggttgccactggctgctagatttgttcttctgcattttatcctaagtgacggggaaaaattaaatgactgtgtaggcaatggattttgctcaggctgattagaggcttacatagtgtgagtttaaagtttctgtgtacctaatgtaaaatgctttcgatcacacctctgtagagatgtttgcctttccctgtcattcaagaatatgcgacctatagagttacgttgacttttcagtgtttactgaagtacagagattagcaatgccttggaatagtgttgctttttaaatccagaatattactcggtttatttaatacttgagcccttgctaaagttgctcctcatattcttttgaaaatgtacaaaatgagaactctgattcctaccccctagagtatacagaatctccagggagtggtcccatcgaacccgtgtgtgatatagaggactcttgataaaaactgtgtttatataaagatggtgtcaacctctacattccaagatttcaaatgtggattaaaaaataagttttaaagttaatggcatttgagtctcagtatgtgttttttttaaatctagttttcttaagttgta

SEQ ID NO: 9265 - DNA, 1127 bp, Homo sapiens
acaggcagccagaactgaagggaaaactttccttgtaggcagcagatgcgttagagggcagagtatgtttttaaaaaataaaaggcagttgtgagaagacagttttcttggcaaactttgtttctgagtggggaagctttgcactgagggtaagtcctggtctttgaaatactgtaaatatgcagaggcaacatcaataggaaaggctctggaattaggaactttcttatgggctgtgctaaatctccttcagcgaggctggctgtggcttgctggagacaaacctatttacctttcctctctgtaggtagaggtgcggcccatgatgtacgtggcactgacctatgatcaccggctgattgatggcagagaggctgtgactttcctccgcaaaatcaaggcagcggtagaggatcccagagtcctcctcctggatctttaggaggaacccacacaccctacaagttgatcatgcaggaactgaaaaccagtcttctccctgtcccctcatgggtcccgggttagcctggtgacaggcagacacatgctgttggcctcaagcaaggaagcagagcactgtgtaaccagcagtcacaggtcttttcttggcgttcctgccaggctctccctctctgcacctgtctcatagcctcgaatatcttaattccttaggcttaagagagagagccttaatggatgctcattcatattcctgcctttcttccatcagctctctgcaaagatgattttgcttttccctagtgctggtatactatagagaaacccctggggaccatgtgattaagttcctatcttttgaaagtttgttctgcagagacttctaggaggatgctgtgcctcccaagctcagagcagcctctgtcctggctgtgcacattctcccttgattccacttgtgtggagggattgaacacaggcaaagaggtgctgctttgcttcttcaatggcaccttcattctccgttgtcattgacttcaagatgcctcttctacctcttccaggaagcacaggccaggggatctgggtgtgtgagtgggaggagagggcagaggtcccctgaggtcatgcattgtaatcatcatagaaggagagcccaggcctgccct

SEQ ID NO: 9266 - DNA, 1134 bp, Homo sapiens
gggagcaggccccctagaggccatagtggttggagtccctggaggtcaccccatgcctccacagctggagtggcccagctgactgggcctctctctgcagctgctgcagttcgagcctacccggcgcctgggcatgggagaaggtggtgtcagcaaactcaagtcccatccctttttcagtaccatccaatggagcaagctggtggggtaagagggcagagcgggtgacggaagcagctggcctggtctggatcgcctctcctccttgcctgacacccaacccagggctggccctctatcagcgggctttgggcgaggaatggagggcactgtctgtcctgctgggctcccactggggcctcagaattatggccaccacccaggaagggccagctcctggaaaagctggaggtgggggcagtcaaggcttgccctgctaagcagcttgaaccatctacccatcagtcaacagacccgttgagcatgtggactcaccatgttaaaggttgccttctgtggcactggcgctgagctgttgaccacctgctgcaccctactgtgaggttctgtgactcactcactgccatgttgtgccccactcaggacatctctggagactcatctcaggacactgatccactggctcagtggacccaaaccagactgtcctggctagtcctcttagtcacacagcgagtaggcctcttccaccagaagctgttcgtgcagctggggaggcccagaagcagggatgccatctgttgtgcagggagggatgaggtaggggacaggatgacccccacccccacccccccacccccgattcctgaccatgccccctatcttgtgatttcagacttgggagagcaaaagggaggggaagaaaataagagtaatggggggaggaaggaatgcatgggtctgccccttagagcaagtctgaaaccagaatcaagagtcctcctccccagtgggcctgtgtgggggaagaggggcagcctgccccaggggtgcaagaggacagcaattcagcttccaggccaaagcagtttagacaaggtgtgcccatcaggactccctctcaggccctggctgtttaccatgtcactgcctactgtgacttcatgccctttt

SEQ ID NO: 9267 - DNA, 1168 bp, Homo sapiens
ggtaatcagaggcatgattgcatggagtgtgattaggttcaaatgtggctctgtcaccgactggccgtgtgaccacaggcaagcttcttcacctctctgggcctcagtttcctaatcttcacaagaataatcagggtgccttcctcatggaaggttgttgagggttaagaagacagtgcttggcacagggctgggcacatgggtaagtgtttggtgaagggtagctcccagcttctcctcagcttgaagcaagcagggacccaggagcactgcgccctccccatgctccctgcccaagctcctcctctgggcctgccccctcctccataggaggagaccgcaccctccacagtgtgctgatacccgccccgtctgtgcttggtctctggcaggtgcggcgatgctgttccccggaggtaacccaccccttggaggagagagaccccgcacccggctcgtgtatttattaccgtcacactcttcagtgactcctgctggtacctgccctctatttattagccaactgtttccctgctgaatgcctcgctcccttcaagacgaggggcagggaaggacaggaccctcaggaattcagtgccttcaacaacgtgagagaaagagagaagccagccacagacccctgggagcttccgctttgaaagaagcaagacacgtggcctcgtgaggggcaagctaggccccagaggccctggaggtctccaggggcctgcagaaggaaagaagggggccctgctacctgttcttgggcctcaggctctgcacagacaagcagcccttgctttcggagctcctgtccaaagtagggatgcggatcctgctggggccgccacggcctggctggtgggaaggccggcagcgggcggaggggatccagccacttccccctcttcttctgaagatcagaacattcagctctggagaacagtggttgcctgggggcttttgccactccttgtcccccgtgatctcccctcacactttgccatttgcttgtactgggacattgttctttccggccaaggtgccaccaccctgccccccctaagagacacatacagagtgggccccgggctggagaaagagctgcctggatgagaaacagctcagccagtggggatgaggtcaccaggggaggagcctgtgcgtc

SEQ ID NO: 9268 - DNA, 1414 bp, Homo sapiens
gcttagccagttagaaaaggatggccatacatggctagacagtaatgagcaagggggagagtggtccaaattgtaattcatgtggtgtgtcagggagggcccagatcttaaacttcaatcctgagtttgaattttattctgagggctgtgcagaggcatgggagagttgtaagcagggattgtcatgatctgaagtcatctcttctggtttgcatttttccatagcttcccgtccttggggagctaatatgcctgcattctcgagcctggaatctatatgctacttaattatgagagagggagcctcagttttacctttagcatgtgtgcttgcctttcaggggacattctggagaaggtcagcgtgcattgccctgtgtttgactacgttcccccagagctcattaccctctttatctccaacattggtgggaatgcaccttcctacatctaccgcctgatgagtgaactctaccatcctgatgatcatgttttatgaccgaccacacgtgtcctaagcagattgcttaggcagatacagaatgaagaggagacttgagtgttgctgctgaagcacatccttgcaatgtgggagtgcacaggagtccacctaaaaaaaaaatccttgatactgttgcctgcctttttagtcaccccgtaacaagggcacacatccaggactgtgtcttgcctttcagatcttaacagagcagcagggcttaacttgttgattttggagcctcttagtgacctggttgcgtctgtgtcaggaacttaaactttctggttcagtagtgtgttaaacataacactgaataccttactgggatacagatttttgctcagaaatggctatgacactttttctaggctctaccaataaaagccacttgaaggttccatagttggtttatttattgtcctactctgacagaactgcttgaaacagcagcagcagagccttttttgtgtttgcatagagggctgtagttagcgggaaaagtgtacaacatggtagtactggccagatgcagtggctcccacttgtaatcctggactttgggaggctgaggtgggaggcttgtttgaggcttgtttgaggcctggagtttgagattagcctggcaacatagcaagatcctgtctctacaaaaaaatattttaaaaaattagccagacatggtggcacatgcctgtggcctcgctatgctggaggctgaggtgggaggatcacttgagcccatgagttcaaggcttcagtgagctatcattgtaccactgcactcctgcctggatgatagagcaagactctgtctctaaaaaaataacaagtacaaatgaaagtatagtttcctttacaattcactgctcctggccccaaagtttgttcatagtctaaaacagtagttccaaa

SEQ ID NO: 9269 - DNA, 1192 bp, Homo sapiens
attatccagactgaagggttccgaaagagaaactcaaacaatggggatgatgagtcgttttaatgaacttccaaattcagattccagtaggaaagacagcaagttgtgcagtgtgttaacacaagatttttgtatgttatttaacaacaagcatgaaaaaacagagaatggtgtcatcccaacatcagattctgccacacaggataattcctttaataaaaatagtaaaacacattctaacagcaatacaacagagaactgtgtgatatcagaaactcctttggtattgccctataataattctaaagttaccggtaaagattcagatgttcttatcagagcctcagaacaacagataggaagtcttgactctcccagtggaatgttaatgaatccggtagaagatgccacaggtgaccaaaatggaatttgttttcagagtgaggaatctaaagcaagagcttgttctgaaactgaagagtcaaacacgtgttgttcagattggcagcggcatttcgatgtagccctgggaagaatggtttatgtcaacaaaatgactggactcagcacattcattgccccaactgaggacattcaggctgcttgtactaaagacctgacaactgtggctgtggatgttgtacttgagaatggtaagtacgtagtattcatgtgcatgagatgcttttgaagatgggaatgctggacaaggagtaagatcctcattatccaaagagattatctcaacagatagaacattttgaagaccacttataaaacatatgttgtattttcatgctatatgaagatttgctacgtccaacactacttttttttttttttttttttgagacggagtcttgctctgtcacccaggctggagtgcagtggtgcgatctcagctcactgcaacctctgcccccctggttcaagcgattctcctgcctcagcctccagtgtagcttggattacaagagcatgccaccatgcccagctaaatttttttattttcagtagagacaggatttcactatgttggccaggctggtctcaaactcctagcctcaagtgatccacctgcctcggcctcccagagtgttgggattataggtgtgagcccgcacgcagcctctaggtccaacactatttaaatggagaagtacagtgaaaggatgtcagtgtgtgtatatgt

SEQ ID NO: 9270 - DNA, 2417 bp, Homo sapiens
tgaagtagtctggccctcttgggagccctgagtccaggaaaatatgtctgatggagtcaatctagggcttgtttcgaaaaagttcagttactctgtgcagctaaatgctttaggaggaaaggtaggcttaggttgcttttcctctgagggttgattgaaatttcttcagtgaggaatagagaaagggcaggaccctcctcatcacacagctggtgtttcaggctgtgaccaatgcagggtgggatttcctaactgtggatgaggggatgaggtgtctctgagggatgaggtgtctcagagaattgagtccatggggcagtcagaatagccttaagagaaaatcatgaaggagaagaggtcctcctttagctgcctctacttggtatcttagagagggcttagagggctctcagtcttctgcccatgaaaagacttctttgagcctctgccttcatggctcttagggttctgatcttgatatcagcagccccaaccactttctttctgaatgtctagtcagtatttttccccttttggtgttttatgaagccatgtggtaacgaatgaatctgtatcatttttcctacctgagtggcccaaagccagcaccaaaccctgggagtccctgaagcctaacagaacaggtagaacttgcaaaaggaatttggctgagagctcacttctaatcctgtactcactgtgtctttgtagatagaaacaagctagctttaccaaagagaaatagtgtcatagaagaacaaaacttcatatagaaagttctaggcaagtatttgatggtttccttaaggatgtgagctttgtatttccacctagccttgtaaaatgttcctgtggtattttgtgtcacacatcctacctttgatgagtctcacatcccaccttcctataaacagctaaattaattttgtttcatcttccccagaccaaaatgtttgataatcttatcaacattgtgggaggtcttgtgcaatggaaattttgccatttctccaaaactggtggcataaaggctgatgcttggggagaaccccattgctcgggacaggcaactctgttcaatgggatcttctttggtttgatgttcccattgttttctcagttctgggaagcctagtacattagtactaatgtaatcactgaaaccttttcttgaaataagggaagcagccaaactttgattaaagttgcaagttctggggacttgcgggggttgtcataaactgtaacagtgggttttggttcagcatgtaaatgcaactttgattttcttgaggaccgattgacctgtcatgtccctgtatcctcatgctcatcatctcagcaggcctgagaggctgggtcagtttgggtgttcatcatgaggattgcttctgccatggagctgatggacatgggcaggttgctgagaaggtggggtgaaagtgagtgccgggggtgggtgagtgccctggtcttgttcataggggagcctttccctagcagtggaacgctgtggtcattttctctagcatattcccttgggaagtctagatttgctattaatctggctgagaatctaagttctgtgccttagagacagtttgcactttcccatattgtgcctgggacagccatatgattttttttcccaccaaacaagtatgcaaacagaaaccagttcaaagggggatggagtaaaagatgaggcagtagaaatgcctttgaatggttttctgtagctaattctctttaaattttgtcctgctttttttctttatgcagtgctaggtgttttaagttttctagtagtattgcttttgagttacagtataacctgagttactcctctgctctaacattgttgcagaagaactagtttattgttagccaggttgcttgaaaggttgagagtggagtggtttggcatttctgttttaaataaacatttaagctcttaatcagtactgtgcttcagtaagcctgtgcatggaccttagtctctggggataaaacatccagattctaagcctccgtgaatctttgattctgtgagtctttatataaataatgttcttggaacagaaacaatgcaagggacatctgcacagaaatattctttgcttctctccagtttcttattcttgccagcagaatcattgctgctgctacagcttttttcccaaaaatgtctaaaagtgccgaaagtgcagagggagggaaaaaatgagccactaaaagaaggatgatcctttcttgtacctacctcctcagtctcagtgggggcctttccaagtgataatgccagtttatggtttgtaaaacttttccttcaaagagattgaactgaatttggtctccctggcatagcacagccaagttacaacttctcttggctgagcatttcactgaagtttaaa

SEQ ID NO: 9271 - DNA, 3479 bp, Homo sapiens
ctaccaacagcaccatcaaggcacgttggagctttcttgccagaactgatctcttttggtgtgggaggacatggggtaccacctacacccaacaagtcaatgagggacttctttttaatttggtaggattttgactggttttgcaacaataggtctattattagagtcacctatgacaaaaaataggggttacctagataatgccaaagtcagcatttgtcctgggttcccttgtgtgatctgtttggactatgttttcttttcttctcccacttgctcagcagcttgggcttccattctagttcttttaccaagatttttgtgtgaccatgttgacttcatttggattgccctctttcaatttccttgtgaaaacacccttaactttctctttacccttagctgaaatgtttacatagcttctggtgatatcttttcatgattttatatctcttaaaatggtgatggatgtgacacctcataaaagtgagctttgaactgtagataactcttaaagaaaatgtcattttagacaattaaaatatttgtgctcaactgcttgaacttttttcgtgtatgtgtatttaattctatgcaatattatcacatgtgtagattcatgtgaccaccatcacaagagacagaacagttctgtcacatggatcccttgcactgcccttttacagccgcagccacatccctttcttataccctcaccccaacctgtggctaccactgttctgtcctccatctctgtaattttgtcatttcaagaatgttgtatgaatggaatcatacagaatgtaatcttacgaggctgatcttttttcattcagcataattcccttgaaatccatccaagttgttgcatgtatgaatagtttcttcctttttttcttttaaaaatgttttatatatttagggggtataagtacagatttcttacatgcatatattgcatcgtggtgaagtgggggcagttccttttgattgctgagtagtattccatggtatggatgtaccacagtttgcttaaccattcacccactaaaggacataagagttgttttcagttttttgccctaataaagctgctgtgaacattcatgtacaggtttttatgtgaacatacattttcattttctgggataaatgctcaaaagggcaactgttgggttgtatggtaaacacatatatttttgtaagaaactaccctactctttttccagagtggctctactttttacatacagccactcatacaattcagacagcaatgtatgattgatccagtttcttcacatcctcaccagcatttggtattactactattttttatcttaaccattcacatagatgtgtgtaatgataccacatgtggttttaatttgcatttccaatggctaatgatgttgagtatctttttgtgtgctaatttgccatctatgtatcctcttcggtgaaatgtcttcatgtcttttgtctattttctatttaggtcatttgttctttttactattgagttttgagaggttttttatatatcctagataaaattcctctgttagatatgtggttgcttgaatttttaacataacttctaccaaggaaaaataagtaaaatttccaacccttgcatggccagtcacttacttaattcctgtccttcagtgttccatctagagaattaagagatatgatgtataaaatagacatcgagggccattaagagagtaaatacttaaaaatacatgttatgaaagcaaagccaataatcactgtaggagtatgagttgcctaagggccaaaactaatgtaaataagagaaagtgtggatataaatgaccattgtttataaacagttatgaaaaatgctgtgacttgaaatctttcccacatctcccaagaaagtaggtaggagtttatcctttccgtaatctctttttaaccctgctgactattacagggcttgtttaatcacagtggcaagaattacatgtatcttacagtaaagaaacagaatactggaatcgttagagaaccctgatgtgttgacctggataaagtacaaaggtggaagagggaatgagttatgctgttaaaatctcaggctattctgttaatgttcctgctactatgaacccaaactttttttttcccccttttgactccttgtgtcttcctctcctgtggcataaaagtagttctgtcgttaacttgtacaacattgccatctgctgttgagaattggtaggtactgcttctgagaacctggctgcagatccttagcataggcagcaaatgttgagaaagtctatctgtagtattacatatactaagttacagaggatgcatccaagtagagaaaataatatgtgggttaagatacatccttaaacttttttttttttggggggggggggacggagtcttgctgcaacgcccaggctggagtgcaatggcactatctcagctcgctgcaaccttcacctcctgggttcaagcaattctcctgcctcagcctcctgagtagctgggaatataggtgcacaccaccatgcctggctaatttttgtattttcagtagaagcagagtttcaccatattggccaggttggtctcgaactcctgacctcaagtgatctgcctgcctcagcctcccaaagtgctgggattacacgcgtgagccaccacacccagcctccatctttaaacttttaaatgtgaaatttctatcatgtaccgttagcctaacaagattttctttcctatttctgactggtgcctttcccctttttaggagcaacgaaagctactctcttagttatgttcttgtgatgtgacaaaatgtcaagaagataggagaagagaatattttatttcgttgatgcttttgttcccaagtgtgaccctaaacttaagctttgtaggagttgacattctttcatgtcccttccctttactcatgccgaaactatcaactgggacattttgtgcttttggtttaaaagttaattgatattatactttggttttatctaaaaagtaaatgtatttgcctttgacaaaagactgacacaagagcaaataagctttaaaatcgggtgttatgtgctttcctccatttttgagcatattatccaaaatggtctgtataatataaatgagaatgatgcagtttaagtaagccttgttataccattgtcatggacccctgtcataaagccatttcttggtttgtttgggaaagaggcatatgggatttatacagattcacttgtaaatgttggattggggatttttgtgtaaattttctcaaataaaggctagcagaaaccattttaggtgtactgttactcttgagtacttctatgtctggattggtgataattcttccatatttctcttttaaattatggcaaattatacctgatgaattagagaaaaaatattgttattcttcagttactgcagatcga

SEQ ID NO: 9272 - DNA, 1231 bp, Homo sapiens
ccccacttgaaggaggcaggacagaggcaccgaggccagggagacgcccaacgaggcagccctgggctcttctctggcctcttcaccagggcacccatccaaggaacctccgaacagccaggaaaagccatgagttgcaaccaaaacgcggctgaggatggaactcagaatgaaactgcaacccacctgcccccagccctgcccctcgccctgatgcgaagctggagaggggcgtgctgcggggccctgatgcccccacccacctcggtccagcgcggccctgcccaggaggcggcagccgggcgcaccctcgccagccctgctggagtttgctgtgggcactgaggcgcgggcgcccttccaaagcacatactcaccgaatgtttacagactggctgtcctggcagggctttcaactgcacatgttttttatactttcctttttttttttttttttaatattttttacaaaaaaaaagattttatacaagcaatatatatatggatttctataatcactcgatgtgatacagtataaatatgctatggtttgtttgttatgaacagatagccaccagttacggccgttgtgtgtaactcctaagtactgtagtctctgggtgtcgggggtggccagggcgggggcggggtgcatttccatccttgtaaacccttcatagtactcagtcctgtatcgctcagtaaacattgctcttacttacatagccgccttgcgtggtgtctgcctggggaatgggtgcaaggccctctcagggtcggagactgtttggagcctctgctataggcctgttcattttcacaacagctctcctatttcacagatgaggaagctaaggctcagagacattaagccacctgcagttactattttgagagcagtcagagtgttcgctcactctgcagatgttttctgagggcctgttgtgtgtgccaggccctgagaattcactggaggatgaaacagacctaagtcttgcccttgtggggcctccagtaaggagtgaatcctgtgcttgctccataagttgtctcatttcgtcttcatggcagccttgccagggaacagcacttgtccccaattcacagatggcgaattagaggtccagggaattaaactcgcagacaccatttgttgaagacttattttgtgacaagcagacatagtctcttcccttctcacaagagcacaaactaggcacgattcttctca

SEQ ID NO: 9273 - DNA, 1193 bp, Homo sapiens
tatatggactggctggcccccataaccatttcagagggtggtctcagacctaccccgtctacctttagtcactactggccttgttttctgctcccagcccttgtctactctcctccaatgcacaataggaggctagaaagcagacagtcatgcttttcctccctggctgtctgaggatagaccaccatcatgaacgacacagtaactatccacactagaaagttcatgatcaaccgacgacttcagaggaaacaaacagtcattgatatccttcaccctgggaaggcaacagtgcctaagacagaaatttgggaaaaactagccaaaatgtacaagaccacactggatgtcatctttgtatttgcattcaaaactcattttggtggtggcaagacaaccggctttggcatgatttatgatcccctggattatgcaaagaaaaatgaacccaaacatagacttgcaagacatggcctgtatgagaagaaaaagacctcaagaaagcaatgagaggaacgcaagaacagaatgaggaaagtcagggggactgcaaaggccaatgttggtgctggcaaaaagctgaaggagtaaaggtgctgcaatggtgtaatctgtggccattgtggatttttcacaagaatattaataaactaaacactttcatgtgaaaacacaaaaacaaacaaacaaaaagtagacagtcatgtgagcaagcactctgtttgctgtcaatagcaataacaatcaatagatgtgaacaaaagagtttgccttcacctccgcaaacttccctcagaccttgaaagacctctgacattacaagatccaaaatgacaaccctggactgcaacatacccaagtggccatgactttggaacaagactaggctgaccacacactttatgactgtgaatcccaagtcaacctcagaaactctcagcctctctgggtgataccatatgatcagcctgtccagcaaacacaacctcctcaaggcctgagtcactttctagagcctttcgttatctgctaggatctgatttccactgctgaaatactatcattgttctagacctggactatccagctggttatgtttatccaactagttaacctaggggccattgcttatgcggccatctataagtataaaatatacatgagtttccaaagacttagtaatgaatgtaaaa

SEQ ID NO: 9274 - DNA, 1235 bp, Homo sapiens
tatttaaggtttctccatcctgggtatgctggtcgggctccggtatctagaagtagaaccagtatccagacagaagaagagaaactgaggccagcattatcacctccaggactttctcgttttccaccttggccatcttcttccttcgtcgtctctcctctttaatttcttttctattccatcatctgcccttttattcacttttagcctctttttttaatttttaaaatttaaagatatgcatactgaaaagtatataacatgtacgtacaatttaaagaataattttaaagtgaatactacgtaactccatccaagtcaagaaattgccagcttctcggaagcccactgtgtctccttcccctacctgcaacctcttccaggctcccttttccagccttcccctttttcccttttattttcatgccttgatttgacttgtgtggtgggaacatgtgaactatgaaacttaaacctgctgcccacccagagcagctgtgaccaagggctgcctcaaggggttgtccacgcaggttgggctcctctctgctgctggacccaagactctgaaccttccaagggacaggcagttcttctaagaagggctcccctgtgtgtgagcaagaccacagctctccttctatctacagatgcatgagggttggaagagtctgggctgtttttagaccttctggtcagctgtatttgtgtaacaacttttgtaataaatagaaaaaccctctgctctgatcagttcttgtactttgacctctgctaagacaagagcatggctgcctcctctgagccctaggagaatcacagctttatgcctgattgaatacaccatagtgagtaggacagctcatgacacaggtcagcctggctgcctccggctccttactgtcatttgctcattcctcttgtattcttgaagtcaaatcttcttttttctcaccttcaagagtctgcgttcacaactaaacactaagtgccctttcttatttcctcctaaagaagaaacagattcttgagagagcagagacaaaaaaatagaactaggcagcatagatgaaacaactgcatgacatgggaagaagacaactaaaccccgaggagaatgcactggaatggacagttgctcttaaaccctacccagagggcctcccccagctggaccctcatacacagtgtgtgtatccaaaaggccattgctatttcagcaaatatttgttgag

SEQ ID NO: 9275 - DNA, 1266 bp, Homo sapiens
ttataaacttatttgagaaacgttattcatcagaataccccaggagtgcaaaagagagaggaaaattatttacccaccacaggattcatttacattggatcagcaagcttcaaatatctttccctagcccatctaaactcttcccagaaaggaatgagaagagagaagggaacaccaaatccatggcttggtcatataccaaaatttactggagaaactgaaaacaaccagagttcttttggtaattcttagccaatggccctttaattctgatactaagcagcctgtccaatgatgaacaactaataaaatatagaagactaaagcaagaaggtcagtatttcccttaggagactggcagccagaagaacaaatgtgacaccaagctccaaactaaactgatggcctgccaagaagtactcatgtccatctgcttctaggactgtgatacttggacctgccacagttataatatcactttccttgaacctcattcattagtatcctttacaatccaccctgaacattacatggcaaaatgggaccatcagcaaaagaagccttgggaaagagcccatttctcaacattttgatctctgttgcagatacagccatgctgagcctgagctgtgtataagcgagggatgactgatgctgtgctttgtgattagctgaggcgatgagacagcatgtgtgtatggacaaagaggacagagtggatcagagggtctcagaagtccagctcctatgacacgactgtcactgctgggaagctgcagagtcaggcccaccagcctggcatgtggccgatggcagtgggctgcatctcttgagcagaagaattaggttgtttacaaagtgaggaggcagaaccccacaggcctcagccctcacctgaagcatgctttctttttattgcaaatgcagtgcaggcagcagaggtcccttcaaccataatcacgaacgaatgtcatcaccggccatgacagtcctagaacctcttcatatgtgggtttagagaggcagtcaggttagagaatttgagttgtgtttgcattacatgttttataaaactgagaaaaacgtcagttgtccttatcagagtggagggagctgtgctgaaggatattaggagcaaagcctgtgtatgacccctgtatgctgcccagggcaagtgtcatatttaaatacctacattgttctttgttttcttagattctgtatttgtctgttcatcagagggctaattatattaactatattttc

SEQ ID NO: 9276 - DNA, 1105 bp, Homo sapiens
accccgtctctactaaaaaaatacaaaaattagccaggcatggtggcgggcgcttgtaatgccagctactcaggaggctgagtcagagagaattgcttgaacccgggaggggaggcggaggttacagtgaaccaagatcacgccactgcactccagcctaggcaacagaacaagaatccatccccaaaaaaataaaaaaatagccaggcatagtggcatgagcctgtggttccagccacttgggaggctgagatgggaggattgcctgaacatgtgattacgccactgcattccagcctgggtgacagagcaagactctgtctcaaaaaggaaaaaaaaaaaaaaggatgatcaaaactatggcactaagaaatcatccctcccatttgtttttctcagaccttgtttaaaattctagcttatgatatgatgtctttactttaggtgatgacgaacagagtgattggttctatgaaggagaatgtgtcccaggattcactgtccctaatcttctgcccaagtgggctcctgatcattgttctgaagtagaaagaatggattctggattggataaattttcagattccacattccttttaccttctcggccagctcaaagaggtgagttctgaggagaccaagaacttaatgcttttatggttctccttgggcagagcaatcaccccctagcaagcatactcatgccttcaatcacacattaactatctgaattttggagctagctcaaggattttctagaggagtcaaagtaagtctcaaagcttaaggttctctccattccttcctaaactaatccatggaaactcctgggacatatatattatcaggagattccttcagcttgccattgccgtttgtgccagatttagtgacagctgcttatcctgatgtgaaactaagaggttattgagtatcggattttggaagagaacagatttcaataagaacattcacatacatattcttattttcagtaagagtattcacatataatggtgtttttaaaacggatgcttttaaaataatttaagtagttttattttaatgaccctattgggactttaacacaaatatgtttcctttt

SEQ ID NO: 9277 - DNA, 1177 bp, Homo sapiens
attgtctgactcgtggattcagcatttcagaatatggtactctaatcttaaggctttgaaaagaaaccatggccattttttcttcatattttacctttattaattgggctgggtcctaactggttgccagagcccagaaatccaagttctgtcttttcagggaatatgcatagctaaagagttcattgtgtttgcaaaggtgtactaggagttctcatttcctcagatgctcatgtctgtaggctgttaagctctcatttcaatttttgcagtcttttaaaacaccacacttcttttccatcttgaagaccagttaaaactacctctggccaaaaatgttagtgttactagatattatcaaggtgtgagactaaaaagttagaaggctttaagatgtaaattatataagttaatgttttctttccctaaaagttctgacccttgctgacccctcaatcaaatgtttttaattgaaaggggaaagaaaatatcagagaacttaaagatggccttcgtgactttgactcaaaatcaatgcatttcattatgtatgggtcctacaccttgcttcctcaagtggccatgaaaaaaaatctcacgaccatgcaaactgatgccaccccaaagtcatggtaacgatttgaattgctctcagtattgatgtcaaactccctcctgttgtcagcagcttattgcaaactggccattctaaacccttttacccccaccttctctcaatcttagcagttaatctcagccctcccccaccacataacagcctcgggcagaacttcccacttagacacccacacacacacacgcttccttaccttcttgccagtgcctgtcctgcccaagacgaaccccttttcctgtgccctaggacctctcccttgataaatgacttgatctagctacagcctcacactcctggcacatacagctttgcatttaaacatgttcagatactccttccttcaaacaaaagacctttcctcaaccctttgaaagcctgagtaccactaaggtatactgcccttatctgcactctgtccattctgcagtctaccgaggcagtggtttttaaccctggctgcatgttagggtcacctgggaagttttaaaaagtcctaattcctggactggaccacagaccagttaaatcagcatggggagg

SEQ ID NO: 9278 - DNA, 1169 bp, Homo sapiens
tgagataaggtgttgctctaccacccatgctggaacgtaggggtgcgatcatagctcactacagccttaaactcctgggctcaagcaatcctccctcctcagctcctgagtagctgggactacaggcatacaccatcatgccaggctaattttttttttttttaacagatggggtctccctatgttgcccaggctggtctcaaactcctggcttcaagcgatgatcctccccgctcagcctctcaaagtgctgggatttacaggtgtgagccaccacacctggtccgctgaagtttattgatcaaaataaagtttctttgaggcctccgaaggttttggaggtaatgccagaaacttgctcccggctgcgccgaggggagaccagctgaccttctccaccgttgttttatcgcaccaaagccttagcatagagcccttcccagccaccctacctgcggggctggacccgcccaccacacccacagcaccttgctggggctgacttcccgatttgtgtccacaggctgctgaacaggatgtcctcggacgacaggcacctgggctccagctgcggctccttcatcaagactgagccgtccagcccgtcctcgggcatcgatgccctcagccaccacagccccagtggctcgtccgacgccagcggcggctttggcctggccctgggcacccacgccaacggtctggactcgccacccatgtttgcaggcgccgggctgggaggcaccccatgccgcaagagctacgaggactgtgccagcggcatcatggaggactcggccatcaagtgcgagtacatgctcaacgccatccccaagcgcctgtgcctcgtgtgcggggacattgcctctggctaccactacggcgtggcctcctgcgaggcttgcaaggccttcttcaagaggactatccaaggtgcgtggtgggcctcaaggagcctgggcgcagggttgggggtggcagccgtgcctgcgggtctggcagaagccctaggaattcccagagactgccaattctgggcgctgttggagcggtacttctgtggggcgccttttcccttgctcagggcttctcattctggcactggacagctgcaagactgttgttgagatgacacgcgttccccaccccctcagctcccccatgcacag

SEQ ID NO: 9279 - DNA, 1240 bp, Homo sapiens
gggccctggaaactccccagagtggccgagagcacgtactgctgcctcctggttccagtatgtactcagtcactcctttaactacaaatgcattgaattaaacaaaaagcctctacagacgtttggaaaataccatagagctaacaatcataatgataacaacaactgtcaacattgactgagctctcattttgtaagtcttttccgtgaattccaagtctgaggcattccccaaggggaggacagtgagtcttacgctacacagggaaagcctgggggcaggatccaggggtgccagggacaccccgcaaccagccacgccctgcaacctctgcccccagcgagccccagggaggcccctggtccgccctcctgacctgctgctgccctctgtgccccctcttcctgcaggcttctcaagcctctccctgggggaccagatgagcctgctgcagagtgcctggatggaaatcctcatcctgggcatcgtgtaccgctcgctgccctatgacgacaagctggtgtacgctgaggactacatcatggatgaggagcactcccgcctcgcggggctgctggagctctaccgggccatcctgcagctggtacgcaggtacaagaagctcaaggtggagaaggaggagtttgtgacgctcaaggccctggccctcgccaactccggtaagggcggcggcggggcctggaaggggagcttctagggctctgcatgggcctaatgagcccatccctggggcctgtgggcagggctggctgccatggatagagatgaaaggaaaacactgaaactttttattactgaagattgtccaaggggtggcctgcagataaaaagctggtgatgaaggctgacactggctgagcatttcctaagcctcagacatccagactggcacactggctaaggacatgggttctgaggccacattgctaaggagcaaatcccacgtctaccaactgggcaagttgcttcactctgtgcctcagtttcttcatcagtaaaaggagggcagccaaacagtccctactctacaaggctattgacaggatttctttatacataattatattgcttgcaacatgcttggcacataaaaagcactcaattatttatttatttgtttattatagacggggtcttgttctgtcgcccaggtaggagtgctgtggcttgatcctagctcactgcagtctcaaacttttgggctcaagccatcctccc

SEQ ID NO: 9280 - DNA, 1224 bp, Homo sapiens
tgtgcatttcctaactcccttgccccctcccccatctgtggcctgggtgggcactgctcaggctggataccacctggaggttttccttccgcagagggcaggtacgcaagggacaacagtatctttcttccagaggtcctacctgctctgagatcctctggggccggtcaagaggccccataccttccacagtttccactcagctttcagccagggggtacccacaggagagcagcggctagagctcaagtgcttcctgggcaccccacccctcggggcctacccccctgcctgtcacccaccgcgccggtgtccacctgtcctcctcctcttctcctccccccgggagtcccccgctacttcctgaccctacctcagagctcactcacccagtgggttcagccagccacagcgactccaggggctgtagacaggaacgcgctggcacagagaagagcggggaccacaccatcctcccaagaaccctctccctcttcctgccttccccctctccctgaagggcaggtccaggccaagtgagcctgtgagaagctcaggagcctggctccatccaagagcaccccggggggaggatcaggacaggatggacagaggcccagactcatctttgccaagcacagaaaggccgagcagctgagataagtaggcaggggagccccaaagggagggaactcagcggggtggcctgcctcatccttcctggcttcccttccctgcactcagcatcatgccacagggctagtgtaccagtgccacaggaggggtgccctcctaccacacttgggctaccagaggtttggtgtagctcccctgggcaccgcgagcacgccagctctctggcaggacccctgcagtccccctggctgtgccaggtaaccaaccgtcttggtttgtccaggacgtttctttatcccaggaaactcctctaccccaggcacacggggacagtgggtcactctatttctgtggatggccgtgaaagttttcactaactcaaggggcagccctgaacacccatttgtgctcacaggttggccaagagcagcttagaggatctcccaaggatgaaagaatgtcaagccatgatggaaaatgccccttccaatcagctgccttcacaagcagggatcagagcaactccccggggatccccaatccacgcccttctagtccaacccccctcaatgagagaggcaggcagat

SEQ ID NO: 9281 - DNA, 1449 bp, Homo sapiens
cagctgcacctcactggatctagtgttgctgcgagtgacctcacttcagagcccctctagcagagtggggcggaagtcctgatggttggtgtccatgaggtggaagctgcttttatacttaaaactcagatcacaacaggaaatgtgtcagtaacaatggaactccatccaatgggaaagttcctggtactgaaggggtccattggacactcagaaaagaagttcaggggccaacttcttagctggaatcctggccagatgaggaccctctccggggaagggagaggactgacttagtggaaggtggtgaagtgaggagagtttaggggaaccttcccccagtggaacagatctcaagtttaccctaaacctgccatttctggaaaatctgtaaagaggaaacagcctgtctcagctgtactctcatgatacaggtcatttgaaatgaaccaagaaataaaacatgaaaatccaaccatggagaaggtggtatggctgggttttgtttggtccccttgtccttatacgttctaaagtttccagactggctttgtcactttgtgaactcgtcatgtgtgaaaaccaatctttgcatatagggaacttcctcgggccacactttaagaaccaagtaagaggctctcaagactccagcagagtcgggaggccatggcagcgccttagaggagctggaacctgcacccacctgtgtcggtggggggggcctcctttccccatagactctgccctccctctgtgcagatggaagtggcaggggagggtgaccagcttgtgacaagaagactgaagggtccagagtccatgctcacggaacagcaccaaagaaaagcactatgtggaaagattgttttattttctaataatgataatatggctggaatggcttcttaagatgtatatattttttaaaatggcagttccccattgcagcatcacctacttgtatgtctttctgcctctgtatatgttctcccagaaacccccatgtaaatcaaatgccctaggatgcttccatcctggtcccatgtatctggaatctaataaataaggaaaggaactattgagtttcttcacacattgtctttctgggctgactgtcccccagacagcactgcccttgggtttcaggctgaggctaggagaggccgttgggagaggcaacccagccttagtgttccctgggaagtcccatggtgtcattttaaaacatgttcaccagcaaagctcaggaatgcaactggagaagtatgctgcaggtctgagaagctccctgttgcttttatgcttttaatattaatggtaaggcaatcgattactttcattaatgccagagaaatgagatatcagatatatgtgaatgaaaaccaattcattaccttaggattttgaattgcatctgtgacacacacaacaccggatagcacagcc

SEQ ID NO: 9282 - DNA, 2052 bp, Homo sapiens
cagactaggatgcttctgccccaggcctgccttccattctttaacagcccatcttggcttggggttgcaatgatggctgggccagtcacttgtggcagggcatcagggccctggcagggaagaacctaggcacctggggttgtccccagcctgcccgtcagcatgagatacccagtgggaaagtgagaggatgcggagaggttggcagagccaggggtaggttctggaggctcaagcaacaaggaggtgcaggtaaagggtgcagtgcagccactgagggacagctgggaactgggggatgcaagtgagaaagggatgtgggggagagttcaggatcaggctgcttgaggagtaatgggttacctacagcagagacgagatggctgtttgtcaggaggcggtagaaaggtagaaaggattcagattgtggaagggtaaacggatgagatgaccattaaggttttgttttactgagaggctgtaagtctgccagggacagctgtcagtaaggctgcagaagggctggggggctacacaaggaagagcagaactagggttgtaagctcaaatgacgagcaaacggtgagaaggaggcctgaagggctgtgtggggactatggctacctgaagagggcacaccctgttaaaggggccacagctgctcagctgttcttacagtgccggccctgtgttgccagattgtctgctttgtcagaggccagaattctgactttttatgtgaaataggatttttaaatgctggtgatcacttaaaaaaaacttaaaaacccaatactggcaaaagaggatgccagtttgcaatccctgaagtagagagagctcgtgctggggagaagtccaccaagatgctttgaggcgggctgtagcaaagtcctgtttctcagagctgggctgggctggggtaggatccttgcagctgaggaggaggaaaagccactgagtctcctcccagagcgggacaaaccagaggccctttgcagttgctgggtcaccagcgggggtggcgcatggagtacagacagtgtagctcttggcctgccagggagacggatggtgcctttgaagcaaagaggaagggaaggcagaaccagggatgcctttgctgatgagagtgcctgtcagggaaggcgccacaggctggcagctcttcaaaccagcagcgcttgacccagagccagatccagcatggcctggccagaggcaccctgggaggccagctggtcagtcccttgcctccccaagttccccctggggtcaatgagccctgggaggatgcctaacctaactccagccagactaataggggcatggtgacccttgactcaccatcccatcccagctttcagggagtgggggtagtgtggtctccatgttcctactatgcctaagaagagatggctcaccttgggaggtgccaggctgaaactaggtcctttccgggtctggatgctgccgctcaggagcaggggcgtggcctcagctgcctctgggagcttcccgggaatgacagggtttgaggggagtagatatgagagggagccgctcctggttctggagtcttaggaggttccaacttgcaggatcctttcccagagccctccatggagaaaacagcaaaatgaagcccttacctgcttgctgtctgcaagggagggagccgagccccagctgataatcccccagcactcacccttcctgagctgagacttcggggctgtggagaccagcacaggacatagtggtgctttttaaatttatttttaactgtttctcatatgtagcaacccctcctcccctcctgggcatgtttacacaggctctgctctgggggctggcctggctgtgaggtttctggggaggcagagaggcagggactttggggccttagtcaccatccatggtatcacctcatctcacttcctgtgagggacagggcctggctgatgtgatcccagctccccccagttcaggactgtctttcagctcctttgcccctggaggtgggggctgctggctgaggaggggtcaagg

SEQ ID NO: 9283 - DNA, 1242 bp, Homo sapiens
agccacccctatccctcttctagcagggccaagatggggacagcagcagccctctggccttgggatgtgatgataaagcaagcctagggccagggtttggggagcagagagagccaagaagttgaccacgtgtgatttccagcccttcccactgggacttgacttcccaggtcaaggagtccgtctcattctggctggtcgagtgaccagaggcctgtgtgaatgtgtgcacctgcttttcctgcctggaatgttttctggctcagctgcagcaacatctgtgagcccagtgtctgccctgtgtccctgggctcgctccaagtgcaggaacatacatgcagggcccaacatgatgatggtgtgaagggcaggaaacagtcctctgaaggagtggggaggtgggcagtctgcccccgccaggtaccatcgcctcctgccagcttccttagaccaggcagggctgccatggtgctagctgcaagtccatcagtattgaccgtctcgctccatcttggtcctccggagtcccaagtttccttttcatcaaatctgacaagagagaagaaacatgggtgtgcttggcccacagggcctggtggtgatggacctccccgctccctcaagctctggatggctgcagtgttgtactagactttgttcaggctgttctcatctcagtattgccccttcctttcactttcacacttcatctcattcctgttgtcactttccccgaaacgaataaagtctccccagctcctgctgtgtaggctgggcagaaaccacaacacgtaagccttgtctcctttcctttggagctggggcccgagccctcccccagcccagcggcattagccccattggctctgggaagagcctgacctgaggtgagcctgaagccagggaacaggaaacctcccagcgcctgcagtcatgatgaaacttctggggttccagacttcctcagcctgctgaagcccctcaggccttgttaaccctgatctgtgagcagtgctttccccctcttcacacagtgggcctggcctccagaggctcaagttagcacccaggatgtattccaggaccctgctcttccagtctcagtccacagcagtccatcaggagcaaaggagaaatggggcatgttctcctgggagatgagtgtagctcaggaaaccgtagcaaccttctcatcacttgacatccagaacccatggggtggaaaacacttcgggtcccatc

SEQ ID NO: 9284 - DNA, 1262 bp, Homo sapiens
tacctatgtatgagcaggcagcagcagggcatggccccatctctccttttagcctctgtgtttcattaggcattcatcctgccaaccagggcaggcccggcgtctgggctctgggaacaaatggggcccacatcctggagtggcaaattttgggggatgcgctacctgtcccagctggccctgtgcctccaacccagagctccccacagacctggtgtaatttcacaagggccatccctttccccaggcttccctgagggaggcggaagtttgaacccttatgtggggttcattgggctagggtagtggtatgaggtttaaaactatttaaggattaggaggagaaagagtcttcaggaaactcttgtttcactggactctgcagcctgcagaactggggcaagggtaggagttccagtaggggaaggagcaggtagactcttcagctgcctcagctgggactgaagacctaagctgattctctttcctctccactcctaagaagcaattttctgttcctctccttccaccactttttactttctgctatctcccatctcccgcttcccttccatttcctttctagaaaaccctggtatttagctcaggccaaactgcctcagcagaaaggtggccttggacaaaactggtccaagaatttgaagtggcagtacttgcggattggctctgtccagcaaggcctcagctgcttgttgcgtctgctttccctcccctaacagaagggtaccctggcttattcaggggactccttagtccacactgtgtcacctgcatgccttaatctttcattgctggggtgtggccttgggagatcctgggccagcccctccacacatctccctaagtcagagtggctgctggccctggtagatttgacttgctcttgcctcactcgacctccaaagtgggactgaagacagtggtcaagagacttgagttcgggacagtaagccaggggttaaggttctttcctttttttgaaagccaaagacccagtttgcattgtgctgctgcattcatggttagaagctttccatgcctaggttctagggaatttatttttctatgtgtatatattttcaaactttgtttcctgggtactgggcatgtgcctgtctgagccccaggtctgtctacaccccaccattcattctgtctgtctgttccctggacactgcctaaaagggtctcaagacagtgccctgtgggttcctaggactagggcccatcactgttctctt

SEQ ID NO: 9285 - DNA, 1220 bp, Homo sapiens
aagattcttaattgtacatggtattattatcccattttatttatttatttatttatttatttatttatttatttattttttgagacagagtctcgctctgttgcccaggctggagtgcaatggcacgatctcggctcactgcaacctctgcctcctgggttcatgtgattctcctgcctcagcctcccaagtagctgggattacaggtgtgtgccaccatgctcggctgatttttgtatgtttagtagagacggggtttcgccatgttggccaggctggtctcgaactcctgaactcaggtgatccacctacctcagcctcccaaagtgctaggattacaggcgtgagccactgcgcctggcctatcccattttatagtaggagatattgaacccaagagagttaactaacttgccaaaagtcacacagctattaagtggccattgaattgcagatctgttttacttctgatgacatattgaaaatttatgcccttacagggcaaggggattctgtctattgctgctctatccccagcacctagctagtgtcttttggctttcaaatatttgttgttgttaaatggcataaagggacttttgctacacacgttggagatgtgcagatgactgatgttgccgaatgtttcccctactacgttttgtccgttcccaggctgctcattggctttgaccgaggatggtgacgtagatacggtaaagtgctttggtgctttcccatttggtttgaccctgtggttacccagtaataggttcaggatattagaccttgatccagaagatccaaagatgaggataaacctttaaccattgcaacttaaagcccctgagagttgatattccctgtggaggagaattgtattgatttttcagaggtaaaatttagggaaccacatgttcatactattcgattccccttgattcagtctcttacccctcctcctgtttcatggacatttcagtgttgccagtgaaaaagtaatggttttaatttggtccttatttttaacctgcccctgagacttatatgcttgtttataccatgtacgtagtgtgtgattgtatgtgtttgtatttgtccacatgtcccaaaacatgggctgttacttcctttttctatcttggtttccttattcccacccttctttttccacccaggtatctggacaggaagacttctcccatcagctttaccagagg

SEQ ID NO: 9286 - DNA, 1097 bp, Homo sapiens
aagctggtttgtgttaagcagtatagtattggttgggtcatttgcatcatatcgttagcatttatttggtggcagaatgtttgcctaggtacagaattaatagcccttagcaacgactgctgctggtgtgtatttttgtaaatgttatgcactctctgaaaggaaaaacacacacaaaagaaaaagacttttttttttttttttttttttttgccaaggccagtgttgctgcctaaaaaaaaaaaaaaaaaaaaaaaaaaaaaaaaaaaatgctataaaatggtgaaagcttccttctaaactgccccaagtgttgaagtcttcactttattttgttgttttgttttgtttttctgttttgtttgcaaaatggtaagggggtgtcgggggggatggggtgtattttgttgcaagtttgtgaggggaaaatgttttggtttgtttctactgacctgaatgtgttggatctacacgtgttgttttgtttttgctttattgatgcacggatgcttttgaacagtagagcgaaatgctagacatggagaatctgctctgtttgtcctttatacatttctgtagttaacagaacactgtaatgtgccttggagcttagtaacttgtaataaattcaattgatattaactgcgctgagtcagcaattttgtctttctagggctaaggccatgcaactccgacgtaggcgacaccctccctacctccagtatagaacgaaaatcctagtgcttttgaaagccctgggagctggcctgtgggaaaggccctgtgctgccttgctgcccctccccctcggtaccaggctatttaaattcacctcttggggaggcgacagttgctgactaagcgatttcggtttactcttcagcatctctattttcccccggatgcgggcccagctgcaaatggcattgtcaagaatgctttctggtgcctcgccctgtggcggtgaacataggctgacacccagtgcagctggtgacttgacaagtgggcgaaaaagtctaggagaaaagctaggatgctttgcttcttagatatgacagacatcagtctgcatatttaaaacaaaactgccacag

SEQ ID NO: 9287 - DNA, 1167 bp, Homo sapiens
tccgggcgagcgtgagcacgagcgggaagggatgcgacccgggccgaggcgccgcgcgagcgccctgcagccaacgtgagcgccgccagccgcggcggcccgggcgccggccaggcctgggggcggcgggagcctgcgtgcgtgcactcctctcctctgctctcgtgcgtcctggaagcagtggccgcggcggctccctccggggtgcaaacccagtcgccgccagcagaacggccgacgctgcggaggggagaaggtcctttctcggctgccaccccctcccccggtcctccggggaagcagcggcttcagcaagattggacccgggcaccgggtggcactgaaccctctggccctcgccccagggggcccgtcggggagaggacgcagctcgtaggggggtccccggggagaggaagagacagcccctttcgagcttccacgcaccagccactccggggagggggccaagaggcaacggcggccaccaccgggcaccctcgccccctcccctcgggccgggagcttccagcccaagtctgcagcaccaggaagaaggcgcctgagctcccctcgcgacgagtcaaccgcagtaggaggtgggggcgaagagagggctgaacccgtccgctgcccgggcggtggagcccccacggcgaggcgctgcgccggcggtggagactcgcgttccctccagcccctggggcagaactttctcgccccccctcctccctcccccgcagtcggactccctccccagccggccagtcctcccggaggagaaggcgccgcggagacagcccgggcgggggcctaccttccccagggcaggcatcatgtcggcggcgcaggtgtcctcgtcccggagacaatcttgctacctgtgcgacctgccccgcatgccctgggccatgatctgggacttctcggaacccgtatgccgcggttgcgtcaactacgagggcgctgatcgcatcgaattcgtgatcgagacagcgcgccagctgaagcgggcgcacggctgcttccaggacggccgctcccccgggccgccgccgcccgtcggggtcaagacagtggccctgtcggctaaggaagcggcggcggcggcggcagcagcggcggccgccgccgccgccgcgcaacagcaacagcaacagcagcagc

SEQ ID NO: 9288 - DNA, 1182 bp, Homo sapiens
agtcttactgtgtcaaaaatctgaaaacacttgctgagaaccaaatttattccattggaaaaaccctctgtggagctataagcctcttggactcttcttcctagattaaggcttgcatttccctccctgtttcagtaaaagatgatgaaagccactatcaatcctcactgctgagtggcagggagaagcagcaccactctcagctcttttctaatcttgtaacttagtgctagaagtctctccaggctattaccatgggcatttgttctctgttggagctgtaagcagatgaacccaagtagagaagatagatcttggaaggagagatccattgagtccagaagccagatcagcaaatggaggaacctcggaggtgaccagaaagatctccatcggttgcccaaggctgtaagtagtgatggttttagcgatgaataacgtaattggctatgaagtactgtggcagagctgctgttttctgaaggtgagaagccatttttagctcagagcaacccttaagagaacttttggcagattttgttggcattattgaaatatatatagaaaagttgctgattgcaatggttatgggaatggaatttaatgacatttgtaatttattacactcattggtttttattgattatagtattgtctgactttttattttctactatggttcctttagcagaaaagtaacttttgtgcatatattgaagtggtttttcagctatgaattctttagggtagaaatttatttagcaaatgtgaattcttttgagaaagtatgaagttttgcagaaattgactgtgaaatgtcagagaaaaataaaagtcacttacttgaaacctatttggcctttttgctttataactgcttaaaaatactgagtgaacctggagtaaatatttgaactgatttaaatgttaaacataggtactcatgttatttgggaatattgggattagacactgaacatgtggaaattcattgctcagattttcactggtgtgaacttgaaatatgagtagccttatggcaaatgagtagtcccctgttttctggagccttggaggcttatactgggcaggttgggaggagtgagaggtgaagatagtccagtgatttcttccatctgattgacactttcacaaatagaacttttaagtgacaaagctact

SEQ ID NO: 9289 - DNA, 1135 bp, Homo sapiens
aattgcatttctggcagggaaggagaggagggatggagaagctctgctcgctgcttccacctcaccgtgtgtcctcccctcccctcccttcctctcctccccacaggcggaattgctttcttctgagccgggtgggctctcctgcagggagaatgcaggggtctgtgcttggctcttagcaaagcaggtggcccacagtgacctccaggaggtggctgattttcctttgtgccttcttatttctcagtaggaacttggaagggaagagctctgaaggagccagaggggcagccaccttgcatgagggtgaggaaggagaagcccagccagcctctacccatccctccctcccaattaggctgcactggggccgaacgcttccctgggctcccactgccttctaaggagccaaggagaattccctgcccactttctgttcctccatgcccaaactggcagatgcttctctgggagcaaggccacatgggctgatgcagctttgagtgctcaggttctgttttctggaagttgctggagaagggctgtcagggtgcttctatgaatatgggcttcagctgtagcacttggcagaaacgtgatgtgtcccacaaactgctggtggaggaagaagatgttcgtcagccaattcaacctccagccagcttcttgagcctatttggtttaaaaaaaaaaagtcttctaatcagaagccactgattttataataaataacacttgttttgaatgccttgttgtccttgtacttaattgaatccgacttgccctctgctcccagaaaggcctccctgagaagaatgttttgagtgcaggaaccaccccgtgtgtcatgtctgaggctgatctaattccagcagaagacctgggctgggcaggtgagcctgattactccaggaggcatttggatctccccatgtgtacagttacttgagtaatgttggtcgtcattttggtatatttaaactgattccaaaataagtaggaagctggacctctgatttgtcctcttttaacctgttcacatggcatagaaaggagtgcaagaagaagttgtccccttcccagacagccgagtatcccagtgctgtagcaacttgccattctgcctaacagaggt

SEQ ID NO: 9290 - DNA, 1227 bp, Homo sapiens
ctttgggcccttgggggcagctgggtgtgcgatctctactccaaggtttaaggggctcaaagttaatttctctggtacttcttcgggagccagcatttcaaagtggaacccaggaaagactcgccagtgattagcactcatgaatcttcccaccaaaacatgtgtatccctatggataggggagaacttgaaagaacttctcagatgccctgtttactacccctctgactatagacatttcaccaaagctccctctcccctctgccacccctagcatattaagctgctctctgaacttgctattgccatccctgtactaccaactcagtctgctagatggcaagggtgtaagtgggaacctaggcccttccaagatggttcccaagcccagcagtcccagcctgtcctgaaggtaccttttgtggagaaagtaaagatggtcctggcacagaaagcaggtgatgggcagaaagtgtctttcgaagaggaggaattgggtggccacaactggatcttccttatttggagatgcaactccctttccttacctagccaggctacagggactcctggtgccaagggacagggactgctggtgaccactagagtgtggcagacattaattagcttagaatccctgaagaaatgccttacctaatggctaaatgcctttggattacacctttggatctgtactacgagtgaccagaagcatggtaaatgctgctgccctccgtcacgacccacaagcaggaaacctgaaatctcttaggcaatttctgccttctcttaccagtgataactatgtaaaccatgccccgttcctttctgcacttgtagaactaaactttaagcccaagtatccatctcatcagcactcctagaagacctgtgtttccaattcaaatatgcattctgattactttagcagattttatttttaaaccatgtcttacacatgatttgagaaaaagactcctaaaatcccatttggaagagggaggactatacattattaacgtgacgcaaagtcccatctaacgtgccaccttccttagtgccacaaaagtggttctcaaacttcatggcacgttaagaaccatctagaccgcttataaaaacatgcagattctcgagcccgttccaccagagatgaacagagtggctctggagcaggccccgggaagaacatgtgaaagccgtgaagctccccaggtgattgtcatg

SEQ ID NO: 9291 - DNA, 1075 bp, Homo sapiens
tggtgtacccattttcccttaacgtaacgggaagtgttttgaaattcccagaagagagctgttttgtaatcaaagtgatggattataagaaagccagactttggaaaaggataattggaataaagggaggtgcttgaagattttccaaactactttatgtcatttagcttctattttctgaagggctttctttggtgccatgtactcagatcagtcagttgactgaaagatgatcatgttttcttcgtaaagatttaagcaattggcaactacaaagacattattttcttactgttctatatcatgtactgttgctgacattacaaaaagggtctggaagggaaaccgtgtcactgttttatcttttttctttaaaatacaaaagtatcccaactaatcatttattatggtcagcttgttttacatgtcccctatcatgagaaatgctatcaacatctgtgatttctaagagtcttaccaaattgttactttaattcttgtgtcctgctgagtggtttttcttttaaaataccatttttatcaccctgtggcactgggtgtgttactgcgattacactgatgattctgagctgtgcttcttcaagtagctcagttcttgcgttttatattaggtaacagttttgtgatgcttttgtgcattctttgtcatctcttctgagttttcgaatctgtcataaataaactttttcactatgcacctggtaacatctgagttatattttaatgaacctgatttacattttaaattctttgtctttcatgtatcttccttaagaaaggtattctataagcccatatgaattatttcataatctattaagattgtgaaagttaagaagaactaaaaagaaaaaaaattgagaataagattaataatagatctttcatctgcatttaaattcatggcagagtatcatgacctgggaactgggaatggaaaaactgggtttatagtgatgattaataagttctgagttttatgtcagcatttggtcccagtgaggcctgtttccccatgaagatattctgttcaaatttggaacctcgacttcgg

SEQ ID NO: 9292 - DNA, 1148 bp, Homo sapiens
aggaatggtatcatctgacagagaagatgaaaaacaaaaaacactccagagtccccaccgcttttttttgtctttagagtaggagtgctgtttagaaatgttgctttggaatcaaatgcagtgaaacccaatcaggtttccaaagtttctgcatttagctttcttgcattgagggcttaaagcttttggtgttcaaagtcccttagtttaggtgataatgaagcttcactattgctgctgattgtatttgttctttacctgaccaaagcttgcatttccctggtgacagcatttcctactgtgtcacccctgaggctcaggagtgccacagagtgcaggtagtgctgcagccagtggtcaccagagcaccagctgctgggcccccaggcggaggaggagacggaggtgagatgggacctcagcagtctctgtgtttgtacctccctgtctcttactcctcgtgttatgtctgttactgcctacgaattctgaagaataattagatttatttattactgtatttatttttttagcacatttcattttgcctttgaaacagtttccatctgtttctcagaaggcttcccatctgttctgagccactgaagccccctcttttatggagttaaagatgatatttttaggagaatttgggaagcgatgatgttttatttctgtaggtcagtcctgtgacggctttgcgaggagtatggcccttcagagatggatgatgccaccttactccatgtttggggtacagtccagcactccccatgaaaaattctaagttgtgagggaatctgcccatttgctggagattgagtgcagaggaattccctaaccaatcagagatatcccgtgattccaggatttcagagtcctttgtctcctctgaggtgtcaccttctttgtgatgtttcctttgactcattgttagattcctcacaccaagggtctatccctacagtagcataactcaaggaacgggactcttcccagtgggtccctagtagcatctacatcacatcaaagggcaatatatcctgcacctgctcttcccctcggagcaaagccccaagtgggataggatgttggggactgccagagcattcccattctctgagcagcatcatacctccattatttta

SEQ ID NO: 9293 - DNA, 1986 bp, Homo sapiens
attaaccgggcatggtggtgcctgcctgtagtcccacctgtgtgggagaatcacttgagcctgggaggtcaaggctgcagtgagccatgattgcacccctgcactccagcctgggtgacagagtgagaccctggctcaataagagggggaaaaaaaattgttaggagctgggtgcggatgcagcctgcaatcccagctacttgagaggctgaggccggaggattgcttaaacccaagaatttgagcgtagcctgggcaacacagcaagaccccatctaagaaaaaaatgttttttaaatcagcttagcccaaaggggttgtgaatggggaggtataaaaagcaaagattattttttggctactaagccaagaacttacagggattttttttttcagtcccagaacctacagataccctgctacttgcttcacgtggatgctcagtgcccagcagccatcttaatacattaaaccagtttaaaaaataccttccatgtggagaaaaacatgtctttttctcgcctcaactttatccacatgaaatatgtgcccatggctgggcgcagtggctcacctgtaatcccaacactttgggaggctgaagcaggcagattgcttgaggccaggagttcgagaacagtctggccaacatggcgaaacctcatctctactaaaattacaaaaattagccgggcatggtggcacatgcctgtaatcccagctacgtcaggaggctgaggcacaggaattgcttgaacccaagaggcagaggatgcaatgagccaagatcacaccactgcactccagccttggcgacagagggagactctgtctcaaaaaaaaaaaaaaaaggtgtgcccaggcccctagccattgccatgtgcccagccagagagccaaattagagggctggcttccctatcacacagaataaatgctagtgctagccaatgatccctttgcttttaatgtatagaaaatactgttgttccttttgtcatttccagtgacatctgttttctaagcagctcttttctagggaggaaaccaaaggggctaggttaagaccctaatagaaatgttttttctaatctctggtgagtctggaagtgtcacattcacagtccacccttgggagtggcttggtggagctggggacaaggttttgtttactacatagtgcacatgataaatggccttaaactgtgattctttctggtaggataagttataataaactgaccctaaagaatgcaatggcttttaaactgcagttactgtgttcttaatgaagcaatacccaaagctctgttcttttggagcacttgaggggagcttgaatgaaaggtgcagataagagcagtaccttgatcttatgctttctgagtgtcctgccttgttgccatctgcatggatgagtgaatgcttctatgcacgaggagactcaagccaactcagagtctgctttttccaacgctcttcccaggtttcttttgcaaagcttggtcatttggcccaggtcttcctggaaagtggagtacatgtcactgactagggtggcgtggtgtctttacccttaacattaagtcttgttacctcagtgatgtgaagccaatggttggaattataaaaagcatccttgctggttcttcacaggacactggaacccaccctgtcaattcagctagcatgtccacacagtcttgatgatccctctctgtaacaggcagctaacattaagagaagggggaaagagaagaagagagcaatagcttatgggagagctgagatcttacttcgttgacccatatttttcccctgaccaagttacctgtaaactggaatttgcaaggggatgctgtgatgataacccctttctattgctgtaatgttcatataacctgggaaactgagagaaggggatgtgtaaataaaagcttaaacattttagtaatgtgttaaaatgtcactctctcttaccctgtt

SEQ ID NO: 9294 - DNA, 1077 bp, Homo sapiens
gggaggtcacagctccagtgagctatgtagcactttgtgagaccaaggcaggcgatcacctgaggtcaggggttcaggaccagcctggccaacatggtgaaactctgtctctactaaaaatacaaaaattagctgggtgtggtggcacatgcctgtaatcccagctacctgggaggcggaggcaggaggatcactggaactgggaggcggtggctgcagtgagccaagatcacaccactgcactccagcctgggtgacagagtgagactctgtctgaaaaaaaaaaaaaaaagaatccaaagttgttatgaagttcatgtgctaccagttttttaatgaagactttttaatttgcagttcagattgttgaaaatgtgagctgtacattagcaagggtttactgtaaacatgttatgattcagcttttgataaacaatgtttacacttttatttaatgtcatccatttttccacagggtatggacagtggatttgcaggtggagaagatgaaatttataatgtttatgatcaagcctggagaggtggtaaagatatggcccagagtatttataggcccagtaaaaatctggacaaggacatgtatggtgatgacctagaagccagaataaagaccaacaggtgccaagccatacaactcaatttcagtgtttacactggtgaaagcaaagtagttcatagttttttctccttttccttagatttgttcccgacaaggagttttctggttcagaccgtagacagagaggccgagaaggaccagtgcagtttgaggaagatccttttggtttggacaagtttttggaagaagccaaacagcatggtggctctaaaagaccctcagatagcagccgccccaaggaacacgagcatgaaggcaagaagaggaggaaggaataggcacaggtctctccaaagtgaatgaactcttacccataaccctaatgatgcaagtcatatgggggaacactttgtaaatggtcaggataaaaaccaaatctgggtgccagatcccagcactactttttattactggagaaatgggggggatagaaaatt

SEQ ID NO: 9295 - DNA, 1165 bp, Homo sapiens
ttttctaaatgatacagagctagtgtttcttgcctctttatctcttttctccttttttctttccctttttccaggcacaagaagaagaatacctgttcattcttcagaaggacccagatctctttcagcgaggccttcaacttatggcagatcaacctccatgagctcatcctgcgtgtgaaggggttgaagctggctgaccgggtcttggccctaatatgctggctgttccctgctccactctgagtggaattgctctccctgccccattctggtgtctttccactcctcagcccctcatcttgcctccacccagctgctccatttttgccacatcgtggcccgcagccccagagtcactgtccatgtcaccatccttctcctcctttggaatcctctccgcacactgtggcccttgtctcagggcccacaagctgaactgtggcatagctctctcttcttctccaagaagactcagcagcctacattcccattcctggtatgtgccattgggttggatgtccccactacttccgttaacccttcccattgtcaagatgtgccacgggtgccactgggggcacactgaacttgtagggagtgtgattttgttggaggtgcacatggtctctgaatttgacagagaacaccttccctttccttgccatgtcaccctccagaggaagtcacacctcagcgaggtggtttggcatctggggccaactccattacagctatgagctcactgctgtcagtgacgtttggtgttttctgtactgtgtttcaataaaaactccttcaaggttgcaggatttgtccatcataactcactggcctcccacctgaccccaggcacgtgcccttccagaatgtgctcatggtcctcgccaagggcttatggttcctcttggttgctgcttcctcagggtttcccagggagatctagggaacagaaggccaggggctgtttggtgggattttccttataggttgggagttcacctacaatgcccattaggtcagagtggacctgaatcgagtattggtgtgatcttctgcttggcttcttgctcctgtaatccttccaacctgtggggccacttccactatggggccacttcctgcttcttgggggtttctcttaccttccaagactcagactctg

SEQ ID NO: 9296 - DNA, 1264 bp, Homo sapiens
taatacaaatacagtgtgagccactcaggtgaatttaaattttgtagtacccacattaaaaaagtaaaaagaaactggtgaaattaaataatagtttatttagcgcaatatagaaaaatgttttcaatggagtaaatataaaacttattgagatttttacttttttttttttgaggagtctggctctgtcgcccaggctggactgcagtggcgcggtctgggctcactgcaacctccacctcttgggttcaagcgattctcctgtctcagcctccggagtagctgggattacaggcactcgccaccatgcctggctgtacattaaaaaaaaaaatattttaagtcatcaaaatctcttgtgtattttacatgtatagcacatgtcagtttgacctggcaagagctagagctcagtagccatgtgtctagtgactgctgtactggacagcactagagataaggttaaaactttggcagtttcacattggcacacataaatttggttgtgcctatgactcatttcatgggtgatggtggctgttttgttagaagagtgaagtgtgcactgtgcctatgttctctcagcgtatcttgtctgccattgcataacctgggtctctttgaactgtttcttgacagtttattttgattaactttttcagaataccttttttttttcttgaaatggtttatagatgtattcccagatctaccttttatgtagacaactcccagttctctggatcacttcctgtggattcttacagattgctttgaaagcagtcacaattaattgaaaatatttctgtccacagctcttttctacaaccaaaggcattttattcttatttatttaattgtagcactgagtatgggaagaactgggcatcttataaaatatttcctttaggagtgttagactggcttggaagtataattgggtcaccacattcagcagtaacatgttaactgtattacctgacttagttaccaacttttagacatgctcatacatagtactttttggctagacttgggctgcggttcacactggagcatgaactctctggcaagccccagggatgcccaggcatggatggaagtcaccagtgacaatatgtgggctgggcacttggatgtgaagaattgtagtgaggtctcttgggcttttgaatcattctaggagcattttctctattctgtgttatgccatagtctgtacatagggacttaattttcatatttcattatttaaaaatgttta

SEQ ID NO: 9297 - DNA, 2527 bp, Homo sapiens
aaacttcccttttgatagattgaactgaaactgcttattgtatgtggttatatttggtaaaagttgcgtgtgagctttttacaaaagggtaagaattgtgttgaattttaattcacttgtataagaaaacaatttaaaactctcataataggtcttaaatatttttacttgctattctccctcagtgatatatacctcttcctttccagctttatgaaacatctatttaagatttaaagttatcagtgatcatagtttggagataaaatttgacccaggaatgaatatttattttaattaggttttcatacttattaaatgtaattaaagacttgggtcttgtctgagttcagtggaattgaaaccacaactttaatttccttacagaaaaacttaatttgtttcttttagtgccacaccttaaaaagaaaccccaaactagctcctcaggaatatagttttattttgcaagcataccatctagctgaaattgtatacacatgaatatatgtagacttttcctgttgggctgaagtgtgtgcttataaatgtgtttagtttttaagctaaacattcagttaacagtctgtgcattgattagcatagggcaggtggtgaggacctggatttttattaaacagtttagtaattataaaagtttcttgtgtttactagtaaagaattttaaaaatctattctaattcaacaagtttttaaaatcaactttgtaatttgaggggaaaatttggggggaagaggtgggtgggccactaagttacctctctttcatttggtggcccttccaggccattgaaaataaagacgttggctccagtttgcacattgggaagaaagcatagaaatttgacttgtatattaaaaataatagaaatgtaatatgtatattaagaatgcataggtctgtattctgtaaggggctctgaagaacaatatggcactgctgtgttcagtgtgaattcactgcctgggagaactgcaggaatgcttgtcttcaccattgtgttcttacaacgaattcaactttccatggtttatcttgacaaaatttacatgtgtttaggttacttgtatattgatatatttttttaatcttcagtttttgtcttccttttgcctttgtgttttcagaagtaacacatgaacactttttaaagtacattacagagaagaaaactgtgagctattatatagtgtttcttttttaacacaaatcttttaactttaaaaaaaggcaaaaattttttttttctacttcccacccagcttaccaccttgatctctttaacttatgttctaaactttggtgttaatggtggtgtctagcatgctagtagttagattttatttagatgccataactggtaatacagcttttattttgactatattaatttagttttttgaggggaagtttgtttattctgtgactctcaaagcacacagaggttttaaaatatatattattaagactgagagaagaggaaatgggagggagtaacatcacagaagtgctgttgttcaactgttcttcaatatagttgctagtaggtttgtatttactcagtaaggaagtcagtgacctgaactacctataaaaattcagcagtgctgcagtgttgcttaagtgaaaccctttggctatctagtagtttttatgctactgaaacttggattactgtatgatattcagcttgtcttgggccctctatgtagacaaacattcatattcatagtagtgttgtatactggcctgtttttataactttatttttcaaatattaacaaccactgctttcagagtggttattttgttatttttgaagcaggaaataaccatttgtatttgcacctgcgtattgcatatgaattatggtatacttggcaaatgcttttcttttacctgtgaaaattctgaaagctggtccaagctacattgcataccaaattgtgctcttatatattatttgcatcgtgtcctttttaatcaaatagcatgttttagttttattatagtagcttttgctgtaagaatgtcacttgcttatcttttattgtacttgaattcttaatcatgcttttaacattgtatttaacaaatcatttcgtattaggttccattaaaatgtcattcctttgaaaaggcaagggatttccactttcagaatttgaaaatgaaagtagcatgtttatctaaaggcagaaaatagttcggacttggtattatgaaaataagtaatggtttctggagaggatttgtttagatttgcacagatggcgatggcaccttttacttaaattaacattaatcaacagtgctaaggaaaatttacacaaaattacaagataaaacatggaaatgtgtgcctttcagtatacaaactcttgcttggtggccatttgggtaatcagaccatttgaatgcctgagagcatgtttaatttctgtggagtgccacatatggctaaaacaactctttaatgtgcaattaatttctagagtaaaatgt

SEQ ID NO: 9298 - DNA, 1170 bp, Homo sapiens
agctgggactacaggcatgtgccaccacgcctgactaatttttgtatttttagtagagatgggatttcattatgttggccagctggtcttgaacttctgagctcaggtgatccacccgccttagcctcccagagtgctaggataacaggcatgagccgccgcgcctggccaaaatagcataatgttttaagaaagtttacgaatttgtcttgggccacattcaaaaccatcatgggccaagggttggacaagctagccttaggtcatgtccagaatgcaatttaacaggaatttcaagcaaaactaacaaaaaattaaatccacaaaaaaatatcatttggtaaatgcactgtctcacacactttactactaagtcccattcaaaccatgacgaccctttacataaaattagggcattctcaccaagtttctaaagatgatttctaaacattaccaaggtctaagtgctaattccccacaaaccatttcttatcttgtttaaatgagactggctttagatatcatgactcatatttatgtgtttaaggaattaaacgtgaaggagatgtataaggcaaccacaaatgtagaaaacaaatgtatgtattagtaatattctcccatgtattaactagaacaagaatgtgagatttttacatttcttctagtgtgccttagcaaatctgctggaaagagtctagttgttttgagaattgaaaaaaaaatgtgtctctcaatttgtcaattctaagcctgtaaaggcagaaactatccacagtaatgagtttggtagtgcctggagagaggcaaatgatcattggatgtaacaaaagctacaagagaatagactaaaaaaagaatttcaatatgaaaaagtaaaatctagagagatgacaaatcagcattgggtaccaagcctcaaaatacttgaactagaagccatctcttaaagttaaaagtaagaagctccaggaaaaataaagattgcatagtaaaaagggatagatggcaggattaattcaactcaacaaatatttatcaaatgtctactctggtcaggtgctgtgttagcagccagcttccctaaagggaggaaaggctagacacgaggacattgaggattgtttatttaaagtcactcataggcatgccataatggatttattaagg

SEQ ID NO: 9299 - DNA, 1105 bp, Homo sapiens
gtatcatattttaagagagacattaataagttgattgtgtccatagggaggtgaccagggttgtaaagggtctgatgatgcaagaacaagggagtagcttccctgaaggaacagaaggtatagctggaaagggagtgcagacaaggagggaatgatacaatagctgcctagaaatttctattgagctatgaaaaggaagaggaattagatttattctgtgtagcttcaaagggcaaaaataagaacaaagaggaactttacaggtgacaaatgtttgcttcaatataaggaagaattgtctaataagagttgttctaaagaggaatagactcaagttagtaagatttcctgttcctgtgaatgcccaacagttaaaataaccacctatcccacgtgctgtgaaagggaatcttacattggatttggtctatatgtctaccaagattccttctaaatataggtttagtctcaatagtaataagactctctaacttcatttgtctttttcttcataagtggtttttcatgctctttgaaatacagtggagttcctttgaggtttttgtcaaggaatttcaacgcatatctcttcccctgttgtactgaaggcttttgagattaattcctcatagaacatctaaatggattggagagttggcaagggaaatgaagctcatcccagcaccttccttagtcactcacgcttagcactctgtcaagatctctgcctcatctgctagcataacatgtggattgcttgttggagcttatttccccgccccccatggtaaattctcatttcctgtgtacatgcacctggacttttttgttttttttaccaagagttgggaaaaatcccttctatgctatctatattctgcaaacaaattattattattattattattgagacagagtattattattattattattattattattactgagacaaagtttcgctcttgtcgcccaggctggagtgcaatggcgtgatctcggctcattgcaacctctgcctcccaaatctcctgcctcagcctcctgagtagctgggattacaggcgcctgccaccatgcaccactaatttatgtatttttagta

SEQ ID NO: 9300 - DNA, 1118 bp, Homo sapiens
aggagcaggagaggcgctcccaaaacagttccatttccagtaccacgggcaaaagccaaagagattccctcattgtcatctaccaggatgccatcagttttgatgattcaagcaaaacccagtcacactctgatgctgttgaaaaactcaaacaactccaaattgatgaccctgatcactttggcagtgcaactctacctgatgatgacccagtagcctggattgaactagatgctcacccgcctggatcagcacggtcccagcctcgtgacgggtggccaatgatgttgaggatccctgagaagaaaaacatcatgtcctccaggcactggggaccgatcttcgtcaaactgacagacactggttacctgcagctgtattatgagcagggcctagaaaaaccattccgtgagttcaagctggagatctgtcatgagatttcagaaccccggcttcaaaactatgatgagaatggcagaatccacagcttgcggatagaccgtgtcacctataaagagaagaagaaataccagcccaaacctgctgtggcccacacagcagagagggaacaggtgattaagctgggcaccaccaattacgatgacttcctgagtttcatccatgcagttcaggaccgtctcatggatctgccagtgttgtcaatggacttgagcacagttggcctcaactaccttgaagaggagattacagtggatgtcagagatgaattctctggcattgtgagcaaaggagacaaccagattctccagcaccatgtcttgacacggatccacatcctgagtttcctgtctgggctcgcagagtgccgcctgggcctcaatgacatcctcgtcaaagggaatgaaatagttttgaggcaggacatcatgcccaccaccaccacaaagtggatcaagctccatgagtgccgtttccatgggtgtgtggatgaggatgttttccacaactcacgggtcattctgttcaaccctttggatgcgtgccggtttgagctaatgcggttcaggacagtgtttgctgagaagaccttgcctttcacactcaggacggccacaagtgtcaatggggcagaggtggaggtgcagagctggctgagg

SEQ ID NO: 9301 - DNA, 1186 bp, Homo sapiens
actagccgtttgagtcagtacaaaacacttaacttttctgagctttgttttcttcgtcagcaaaattagagccataacagtaacgatttcatagggttgttgagaagactgaatgaaaaaaacgtatttaaagctcttagaatagcctccctggctgtctgaggatagaccgccatcatgaatgacatggtaactatctgaactagaaagttcatgaccaaccaacgacttcagaggaaacaaatggtcattgacgtccttcaccccgggaaggcaacagtaccgtacctaagacagaaattcgggaaaaactagcaaaaatgtacaagaccacactggatgtcatctttgtacttggattcagaactcattttggtggtggcaagacaactggctttggcatgatttatgatttcttggattatgcaaagaaatatgaatccaaacatagacttgtaagacatggtctgtatgagaagaaaaagaactcaagaaagcaacaagagggacacaagaacagaatgaggaaagtcagggggactgcaaaggccaaagttggtgtcgctaaaaagaaatgaggtgtctagcagtgagctgtggagattggatcacagctgaaggggtaaaggtgttgcaatgatgttatctgtggccattgtggatttttcacaggaagatcaataaactaaaaactttcatgtgaaaaaaaagctcttaaaataatgactgatataataaatatgcttaatggatagatgtcagctcttccaataatttattattattttattatagttattatgacaatgtcttgaatccataaagagcaaatctaatctttttttcatatgacagcttcttccctgtttgaaaagtgctaaaatcctcagtcccagaaagtctgcttgtcaatttagttctacagaaatggcaaaaagttgtagatgacagtaagttcaaggcactgaggtaggtttagtatactcaagcccatgtggggaacatatggtaagatatttttaatatctgagtaataatgccttcttcccaggaatttctatccccaaaagagaggtttttaaagagtagaagtaaaataaatctaaaaagaaaatggttgggtttctttgccggttcaaaggtaatccttgctttatgatgcatataaaattttgctttcttgtgt

SEQ ID NO: 9302 - DNA, 1225 bp, Homo sapiens
aggagttttaatgttagaatttagatttaacagatagagtgtggcttcatttgtccatggtagcccatctctcctaagaccttttctagtctgtcttcctgccttcgaacttgatgacagtaaaaccctgtttagtattctcttgtgcatttggtttgttggttagccgactgtcttgaaactattcattttgcttctagttttattttacagaggtagcattggtgggtttttttttttttttctgtctctgtgtttgaagtttcagtttctgttttctaggtaaggcttatttttgattagcagtcaatggcaaagaaaaagtaaatcaaagatgacttcttttcaaaatgtattgtttagcacttaactcagatgaatttataaattattaatcttgatactaaggatttgttacttttttgcatattaggttaatttttaccttacatgtgagagtcttaccactaagccattctgtctctgtactgttgggaagttttggaaacccctgccagtgatctggtgatgatctgatgatttatttaaagagccgttgatgcctccaggaaacttaagtattttattaatatatatataggaatttttttttattttgctttgtctttctctcccttcttttatcctcatgttcattcttcaaaccagtgttttggaagtatgcatgcaggcctataaatgaaaaacacaattctttatgtgtatagcatgtgtattaatgtctaactacatacgcaaaaacttcctttacagaggttcggactaacatttcacatgcacatttcaaaacaagatgtgtcatgaaaacagcccctttacctgccaagacaagcagggctatatttcagtgacagctgatatttgttttgaaagtgaatctcataatatatatatgtattacacattattatgactagaagtatgtaagaaatgatcagaacaaaagaaaatttctattttcatgcaaatatttttcatcagtcatcactctcaaatataaattaaaatataacactcctgaatgcctgaggcacgatctggattttaaatgtgtggtattcattgaaaagaagctctccacccacttggtatttcaagaaaatttaaaacgatcccaaggaaagatgatttgtatgttaaagtgactgcacaagtaaaagtccaatgttgtgtgcatgaaaaggattccttggttatgtgcagg

SEQ ID NO: 9303 - DNA, 1745 bp, Homo sapiens
tcattaagattcgagatatgttcacccaacttgatatggaccagcttttgggacctgagtgggacctttacctcatgaccatcattgcgctgctgttgggaacagtcatagcttacaggcaaaggcagcaccaagacatgcctgcacccaggcctccagggccacggccagctccaccccagcaggaggggccaccagagcagcagccaccacagtaataggcactgggtccagccttgatcagtgacagcgaaggaagttatctgctgggaacacttgcatttgatttaggaccttggatcagtggtcacctcccagaagaggcacggcacaaggaagcattgaattcctaaagctgcttagaatctgatgcctttattttcagggataagtaactcttacctaaactgagctgaatgtttgtttcagtgccatatggaataacaactttcagtggcttttttttttcttttctggaaacatatgtgagacactcagagtaatgtctactgtatccagctatctttcttggatccttttggtcattatttcagtgtgcataagttcttaatgtcaaccatctttaaggtattgtgcatcgacactaaaaactgatcagtgtaaaaaggaaaacccagttgcaagtttaaacgtgttcgaaagtctgaaaatagaacttgccttttaagttaaaaaaaaaaaaagctatcttgaaaatgttttggaactgcgataactgagaaactcttaccagtccacatgcaattagacatattcagcatatttgttattttaaaagggagggttgggaggtttcttattggtgattgtcacacggtataccatactcctctccttcaaagaatgaaaggccttgttaaggagttttttgtgagctttacttctttggaatggaatatacttatgcaaaaccttgtgaactgactccttgcactaacgcgagtttgccccacctactctgtaatttgcttgtttgttttgaatatacagagccttgatccagaagccagaggatggactaagtgggagaaattagaaaacaaaacgaactctggttggggtactacgatcacagacacagacatacttttcctaaagttgaagcatttgttcccaggatttattttactttgcatttctttttgcacaaagaacacatcaccttcctgaattctttaaatatgaaatatcattgccagggtatggcttacagtgactactattataatactaaaactcagagaatcaaagatggattaaactcagtggttgatgaaagccaaaacctgtttgtactgttctatactattcaggtatctttttatttctgatagttttatattataatagaaagccagccactgcttagctatcatagtcaccattttctcactgttaacattaggaaaatcaaggctactatgcttcaggattgtctggttaaatagtatgggaaaaaaactgaagagtttcacataattacacacgtgaaataattaaagcttaaactgaatttgtatttcattttattgtcagatggtggtgttcaccagcctgtatcttgtctgagactgcattcgtatctgagcaggttttctatgcctactgatgtcagtatgtttatactaaccttcatgcttttttcccagaatccctcatctgccagaaaacttgaaaagtttattgcttgtagagttgtactgctttgatttttgaagttgggg

SEQ ID NO: 9304 - DNA, 1265 bp, Homo sapiens
tacttaggaggttgaggtggatgaaggcttgagcccaggagtttgagaccaacctggacaacatagaaagaacctatctcttaaaaaaaaaaaaaaaagaaagaaagaaaaagaagttgaatgaatgttccaaaaaggaatgctaatatctcctaattggaaattgtctcttagctctctcttagacttggcactttagagtgacattgataaatgcttagcaaagtttctaaatctctgtgctttagtttactcacttgtcaaatggggcttttaacaggacttacctcctagggtggttcctcatgaatctcatgggaagattaagaatggtaatatacataaatcattacaacagtgcccgggcagagtaaatggtcatttttgtagtacaataattgtgtactgttttttttttttataaacctgttgacttctaaagagtaagtgaaaactttaaataagtatctcaaacttttatgtctgttcaagaaagctgccagaaattgaaggagcaagcttaatagtcatgtgtaaccaaagtgcataagtgattttctggtatatctttcttattttcttctactgatattttttttccccacctcacacagttgtttaagaatgtatgtgaacgaggccgttggtctgaaaggcttatgactgcctataacagctataaagatggcgattacaatgctgcagtgatccagtacctcctcctggctgaacagggctatgaagtggcacaaagcaatgcagcctttattcttgatcagagtaaggttcattttagtcctgccttaggtttagaatgtacgagttcacaccagtaaactgtttaatgtattcaaaaagaaaagctactaggaaacattctttattattgtaactggaactgaacacacaggcttaagttattaatattttactttagccatcaaagttagttttataacgagttgactgtagaaatggatttgacattcattttaaaattaagcactttgcataaatgtatttttcaaaatacagtggatacaaaaatgccattttcccaacactgtagaagagtgactcagtagtctcatgactggttctatagatacaacatgtttcacaaagtagtgccctcttgcatccagtgattgctttgaactcactattttagttcagtaattaatttcagtatttgttttaatttttatatcctaattcttgtttaacttatgcttcacctatccttcctactttgcaaatgaaaa

SEQ ID NO: 9305 - DNA, 1100 bp, Homo sapiens
gtcttctgataccaacatctttgatagtaacgtgccttcaaacaagagcaatttcagtcggggagatgagaggaggcatgaagctgcagtgccaccacttgccattcctagcgcgagacctgaaaaaagagattccagagtttctacaagttcgcaggagtcaaaaaccacaaatgtcaggtaagagtctggtgtagacctgctgggggcagatggctctgtgtatgtgacatttatattagtttttatatctttcagtttgctgttctcagcaatttttagaaacaatgaagtgatcgtgagtagttttttgaataaaataatggataagatctaagtatgattatcttttatcacaaatttagtaaatcaaagttgaaagaaagtgcaatttcaaagcagttttgaatggaatatgtaaagggagtatcctcagttttttcattgaaatttttcaagtaaacattctttaaagatttggtgataattgccctaatttggctgtaatacattttgttgttcttttaaatagacagacttacgatgatggagctgcaacccgactaatgtcaacagtgaaacctttgagggagccagcaccctctgaagatgtgattgatattaagccagaaccagatgatctcattgacgaagacctcaactttgtgcaggagaatcccttatctcagaaaaaacctacagtgacacttacatatggttcttctcgcccttctattgaaatttatcgaccacctgcaagtagaaatgcagatagtggtgttcatttaaacaggttgcaatttcaacagcagcagaatagtattcatgctgccaagcagcttgatatgcagagtagttgggtatatgaaacaggacgtttgtgtgaaccagaggtgcttaacagcttagaagaaacgtatagtccgttctttagaaacaactcggagaaaatgagtatggaggtttgtatgtacttttaaattctggcttaggctaaaaatcggcagttcttgataccaaataatatatgaagtaactaaacacatattccaaggctgggcacagtggctcacacctgtaatcccaggactttgggaggc

SEQ ID NO: 9306 - DNA, 7275 bp, Homo sapiens
cccttgtgttctgagcattgatgctaattttttggtttgtttccatgttgaccctatgaagatcgaatgggtgatggggtcaggcttgaggggagattgtccttagtaagtacaggctggagggtcactggtgatgccactgtgactgttcatggccatcgtgtgttagcagagaacccaccagtgctgcacctggtagccctacctagtctttttttattgaaccaaacgcaaagccaagggagtgatagttctgctgaagagcactttagggggctcagcgttttgtgtttgtttccctaattctatggtattttttatctgtctggcagagatcttgtacaaccagataaacctgcaagtcccaagtttatagtgacgctggatggtgtccccagccccccaggatacatgtcagatcaagaggaggacatgtgctttgaaggaatgaaacccgtaaaccaaactgcagcctcaaacaagggactcagaggtctcctccacccacagcagttgcacttgctgagcaggcagcttgaggacccaaatggtagcttttctaacggtgtgttgagagctcagattttcagggtgctgtcattgtgaagggaatctttgacttgtttctctaccttgaatgaatattggttaaaggccttgcttttatttatattcagtaatggccttttttcttctttcagacaaacccaccaagtacatttcagactctttttcctgtgtctttttcataggtgggctgttactccagtttgaaaacggagttcagccatggaacctgagagacctcttccgcttatgctggctaaaggatgaaccaccattcttgttgccttctttacctttgtattttcttcagaaactgtactgccactttgcccttttatcagcaatagtctcttgcaattaacttgagagaaaaatttagatttgatgctatttctacctcagtgaaatttctttgaaaggagtttctcacctaatctatcaagatcttggaactgtttaaattaatgttgaagagtaatatttagcagaactcagatgaactcatttcagatagcaccatagtttttggcaggtgacagtttcttatcaccgtttctttcactgggtatcagtggtagctgcaacgccactgatcatttccattcatgatagagaatggtaattatgttccttatatcttctaaaatatttagaagcacctcttcattggcaggagggataattactcaatcttaaaagcgtacagattcaaaggaaaaacagtaatggattttgaaacatttccttgagtaatcctcttcttggaagagatatgaaaatgtattgaatacctttctcgatcattaaaaatagaatagacttcagagggaaatcatatgttagtggagcaataacacttagctttattttaattggttgcgtttcctactgtgaatcaatgacgtagtgtcgtggttttgattagtggagggagttgaaaatctgaccctatcaacaggaagaaaaacttaaaaaatagtaaaagctgcagtaggcagtcccgatttattgactctgtatgttttgtctaaagagaagactccagtgttttcactactcttgattttcaatttggtaccttaattttttggtctattaggatctggtttcatttaaatgtaggtgtccatatgaggctttatggggtatacatgtagcagcagtgacaccataaataatatgttagtaaaaattcttgccagtgctgtggccattgtgctgacagccatgatgagtggtgagcctcctttcccattgctttgactggggactcagtgtttccctgctgctcaaggatgaagctttgtaagattagcataggggtgtggctggagagactcctgcagaacagttctcaggagtctctagtctctgcaccacttcccctgtgagcagggagtttgaaactgcaattgcttctggttggttttatgttgggttgtttcaaggatgctaccaacaacaacatctgttttaacctgctgtcttttcactcactgtcatatggcagcacagattttatagcttgctttctttgttttttttttttttgagatagagtctctctgtcccccaggctggagtgcaatggagccatctcagctcactgcaacttctgccttccaggttgaaagccattcttctgcctcagtctcccaagtagctgggattacaggcatgcaccatcacacctggctaattttgtagtttaagtagagacggggttttaccatgttggtcaggctaatctccaactcctgacctcaagtgatccaccaacctcggcctcccaaagttctgggattacaggtgtgagccaccgtgcctggcctatagctttcaataaaaggtgaatttgcctcttaaaatttgaacagaaagttttaatagtttacaaagtcggtgtcagccagtgaagactaggggcatgaccttcgtatgacttaatgtttttaaaagaaagataaagtttctttgtaaggtattattgtaataatcacatttctttgtaaagtattatattgttcctgagtatctagctactttgctttccagctaggcttctcttgggtattctcttaatcttttatttgtactgggttcttgtgtatatattatagtctgctgtgtgtaatttattataggaaaagggtaagacacatttactttgcggggatgacacaaaaaacctgtaaaaattagagaaacttccagtcatctcacattttctttggaaccgattattcttgtatcttagaactaaaatgacttatactgttttgtttttagaaagggtatccctcctgttgcccaggctggagtgcattggcacagtcatggctcactgcagcctccacctcccaggctcaagtgattctcccacctcagcctcctgagtagttggttactacaggtgcacaccaccatgcctggctaattttttgtattttttgtagagatggggtttcaccatgttgcccaggctggtctgaaactcctgagctcaagtgatctgcccgcctcggcctcccaaagtgctggggttacaggcatgagccaccacatcctatttaaagcttaaataggacttttactatttttaaagtagcatagaaaactgtttgtatcaggcatagtcataattgctctttgatgctgctcctatctgggctgcatgactacatttgtgtgccttgttctcctgtagtgaggacagaatgtgggtcactggaacagtaagtactcatagaactagctgctgctgctattacgactggttgcctgttttgcattttttccgtttaatcatcagactctaaggaagacattattttctctttgtatagatgaggaaacagaattccaaaaagttagctaacatttgcacagagtgtctggctgagcaactaagtggcagagtcagattttaactgacctctggcaagaggactagaggaatacagttgaagtgatacttgctttcatgaacatgaatgtgaaccataatacataatacccatgatgctattttgtggggagtttaaggtgtctcagtccagaaattagcagctgattattgcctgtagctgtaattttacttattcagtgttatttaataaattgccagcattacaatttcgatgaaggcagatttttggcttactgaaacaggataaaaatctggcaacaggggtcccactttgccctgtcatagtaatcgaagctgtgattggatgtggcacagggagtggagtggatgggtgtgcacttgctttccaggctgctgctccccgtctgtcccttattgcatttatcatcttcagcccagtcagtcttgctgttaggggaactgcccagtctctgtaagtgatggcatttgtgaccccattgtaggtaaaaatgttttcccctttttagacattgctggctgagcgcggtggctcatgcctataatcccagcactttgggaggccgaggtgggtggatcgcttaagtcctggagttcaagaccagcctgggcaacgtggggaaaccctgtagccaggcgtggtggcacgtgctacttggtaggggctgaggtgggagtatcacttgagcctgggaggcagaggttgcagtgagccgagattacaccactggcacaccactgtactccatcctgggtgacagagcaggaccctgtcgtaaaaaaaaaaaaaaaaaaaaaaagtaaaagacattgctgagtttcgcacctggacttacagctcagcaggtgggaatccttttgtatttgggccactcatcatcttgctggcgtgtgaggattcacatctccttatcaccttacctgttttcagtttttatttaattttattagttccccacttgacgtccttctctatttttaattcagctatgaattagtattgagaattagaatttttggtgaaaaatttggccgtagttgcagagtcactgtcctctttccttttcacagtgagaactgttgtcttcttcctggcaaccttttataggattctatggccagtgttaatcccataatttgagctcacttattttatatgactgtacatttaacagaagattctaagacaggtttgagggaaatatgttaaaggtgctgtgtactgaattgatcataatgaatgaaatacttttatttcctttccctttgtagctgagatgagtgaactgagtgtggcacagaaaccagaaaaacttttggagcgctgcaagtactggcctgcttgtaaaaatggggatgagtgtgcctaccatcaccccatctcaccctgcaagtgagtaccatccccccatctcaccctgcaagtgagtaccatccccccatctcaccctgcaagtaccatcccccatctcacctggcaagtaccatcccatctcacccagcaagtaccatcccccacatctcaaccctcaagtgagtaccatcccatctcaccctgcaagtaccatcccatttcaccctgcaagtaccatcccccatctcaccctgcaagtaccatctccccatctcaccctgtaactaccatcccatctcaccctgcaagtgagtaccatccctgcatttcaccctgcaagtaccatctcatctcaccctgcaagtaccaccccctcatctcaccctgcaagtatcatcccccatctagccctgtaagtgcgagtaccatcccccatcttaccctgcaagtaccatcacccacttcaccctgcaagtaccatcccccacctcagcctgcaagtaccatcccccacctcagcctgcaagtaccatcccctatctcaccctgcaagtaccatccccatctcaccctgcaagtatcatcccccacctcaccctgcaagtaccatcccccatctcaccctgcaattgagtaccatcccccatctcaccctgcaagtaccatcccccatctcaccctgcaagtgagtaccatcccccatctcaccttgcaagtaccatcccccatctcaccctgcaagtaccatcccccatctcaccctgcaagtatcatctcaccctgcaagtgagtaccatccccccatctcatcctgcaagtaccatcccccatctcaccctgcaagtaccatcccccatctcaccctgcaagtaccatcccccatcttaccctgcaagtgaataccatccccatctcaccctgcaagtgaataccatccccatctcaccctgcaagtgaataccatcccccatctcaccctgcaagtgaataccatccccatctcatcctgcaagtgaataccatccccatctcaccctgcaagtcatagccagctgattttggctttcagtttagtgtctgtatcttacaccttattttgtttttgtttttctgtggacaagtttttagttttataactaaatggagtgacaattaccatggccctctccagagtagcgtatttcttgttcatgtatgtttgttgagaggcaagggtgggggggctttgtttgtgcctcggacctgtgagatactgaaatacctggggttccttaagaattctgtacgtttaagcagatgggtatatggtaactgccccagtttgtatgcattttggccacacgcagtatacacagattttgaggagttgagggaaaagttagttatgggtaatgaaaacattttggacttgggttaaatttttccttacaagctggctggctcaatgtaatgagctttatgagatggctttttggggcttcttttttttgccgggggtaggtcctatggatggaatcttcatttttaattcttttaaggaaatgatgtgggaataatacagctgtacatataaggagagtatgggatgagtctttttgtatcacaaagccttgcatagaggatgtgtttattgtattaatgagttcactgcataaaatatataccttttttattaagtggtgtgatttttatcacaaaagcttgtctttcttggtggcttggcttgagttaaaagcctgtgtttgtgttatcccaagctttggaataaatgattgtgtcctattttgatatatggtcttattttaaaatattctttttgttgctgttttttttgcatttctcaaaacaagtagtgatggggagtgtaaagagcccttatacacagaactaataatgcattgagaagattgaatatgaaatatgctttttttttgttttgtagagccttccccaattgtaaatttgctgaaaaatgtttgtttgttcacccaaattgtaaatatgatgcaaagtgtactaaaccagattgtcccttcactcatgtgagtagaagaattccagtactgtctccaaaaccaggtgagtgagtgactgtgctactacatttgggtaaaaaatataaaatggcattttgtgactgtaaatggaattgaacaaacaaaagatggtttcagaaataattttggcaggatcagttaatccaaccagtctttaaagagcaagtgtgcctatctgtagtattccgaagtattttgactagtgaatatataaaccttaccattctaatttaaaaatggttttcactttcaaaaaaaacatcagtagactgcattaaaaatgggttttccaaacagattggagatcagtcctggtttttattttgttagcagttgcaccaccagcaccaccttccagtagtcagctctgccgttacttccctgcttgt

SEQ ID NO: 9307 - DNA, 1472 bp, Homo sapiens
tcaaatctttgaaacttggaatatattgctttcataatatgaagttttattgcctatctatctgaagtgtctaatttttcaagtttgtaagtttattatgtggttttaacattgggtgtttttgttttgtttttactatgaaaagacagcttaaggaagagctaaattctgttaaaatatttggggcatgtttgtgcactgctgttgtgaggatcagcatatgaaattgacatcatggttagtcatggtactgcagcttagggggctacacggttgctgtgtgagtggagagatgcagtgaggcagttgtcattattctaaaaattgtactactttcacttttcccaaagattatataatgttcataatccaccatgaaaacagcattggccaaaggtactgaggctgcttaaaatattcaattctgctttttaatttttaagtgaatttagtttgaaaagcatgattatacaggcctctcaggctgagtgctactttggtaaagttcccagttttcctgccttctgtgacaggatgaatgaggtgggtatggacagtggaggcagctggaatggcaagtgcagaaaataggaacagttctatacagtgctctcatttactaataacataatgccttctaaataatttttttgggaaactacattatcacaaaattatacaaatttttttacaagtatttacatactgtatctgaaaacagactttaaagtcacaagattataaatgtacatatatattctcacattctgaaaaataacattctcagaatccacagaaaatatacttagttactactgaagataatttttgaaatgtaaaaattagatttaaatagtatattttaaatgacagaactataattacagagatcagatcagataggtaaactgcaagatagataggatgaaacttttggcctactgtattacttacagagtttttttgtgtgtggtttttaaaactgttaaggcaagaagtgtcaaatgctttagagttaaataacagatcactgatttcaaagacttggtgtatagtgttaaaaattaaagcttaaaaggtggttagaaaagtggattaatgcaaaaggggtaataaagactgcaacattctcaggaccaaattaaactgctaaaaaaaaaaaaaaagttcattgacttgcttagtcgtatactcaaatgatgataaacctacatgtgcaaaggctcacgtttaagattgtcaagccagcagtctactgttgtgttgccattgcttttccattgggagaagaaagaattaaccagtcattaaaccatttggtaagttgcactttgctgtgctgatcccacaggaaaggcttgaaacacgagaagcagcaaagacagagcacacaagtgcataaggctgttgtcttcggcttgggtgaaatgacagttcctcttcattctaaaggtttactccattgaatttaa

SEQ ID NO: 9308 - DNA, 1224 bp, Homo sapiens
ggggtggggggaaaccctttacctaataaaggactgatggaagcacagcaagcggtgggctgctcccggggagcgcgcccagggtggcgtcctgaagggctctcacctcctggccgtaattattagttcaggtttcaccgcctgctataatcagcagaaaccccaggcaacctccaggcaattcactggatgttaaaatgtgcacacctgaaggcaatttaaggtaggtcttatctgaagaggctgctgaaaacttcactgatttccagttctcttcatcttcattaaaatactcctaaataagctacttttgtattttcttaaaattaaatcgctattggggggctatttttagtcttccttggacaataactcaaagttggtcccagagcttgttgacatttctttagtgagcggtatatttgaaatgtaattttcaatcagtgtcttagtacaacttttatggtaaagtcaagagcttcagaaatcattctaggccactgattattgcctcaagcacagcattttttgtcctttacagaggaaaatatattaaaagcaattgagaatgtgtttgtgtggtgctcttggggttttatcaaagattctacgatttgggtttggttacaaaatgttattccctcatgtatgttgcacaggatttaaattgggcatttcaaatacggtaccttggtttgaagtcttgtaggcaagaagccctggtatgtaaattccacaaataaagttgttcttctgttttgcgtctctgtacatctataatatgtaagagggaaaggatgcctaggacaaacagaggtagggcaagatggagtaaagataagaaaagacaaaattgagattgcagagtaaggaatgaggtggtgctctgtattcagttggttttttttgtttgtttttgttttttggacaccagagtgctttttcagattgtatttaatgtattactttgaaaaggtaactgataagtcatttcatttttctcaagctgggactctgtatcgtggtgattagggttacagacctattataatagcccaaattgctgatggaaaaacaaaactaaagtaaacccgtagtaattatttatcttcttagttatcccaagagtagagtttaccccagtgtcttgtctttttccctaatcctttcaagtctcccttcttttccatatgctaggtctcccaaagtaccaggcatagtagc

SEQ ID NO: 9309 - DNA, 3108 bp, Homo sapiens
tgaatacttccagcatatttattcagggtgtaggtgggaataaagtatcttcgcagtgctctgttccctccgtctccccagacatctgacaccctaaaagccatccacagctatggaacctgagcgacaccttgatttgtgttgtcacctgaccaagcctaaagacctccagctcagtcccccaccttcatcccaccccacagatgataaaattcagacctctctcctgaaaggcagaggttcaacattcaggactgtttctggccgaggacttcttccaattaaaacccccaccgtgggctgtctcccctcatttcatttttctaaaggggcagaggcctcttttagaaaataataaaatgcaatgtgtgtgatttacttttctgatctctttgagaaatagagaaatataaaagtgtgttcttaactccagaaccactctttttgcataaatacctcatcgggcagctttctaagtgtgattttcctgagtctcccttcgttggatctgccggaagacttgtcggggaacctttagtgagggtacttcttcctatttttcttctgtttttggaggcatacacattatgcataaccaaaacaatggctcaattgtgtttaactttgtattttgattgttgagaacaaaaacaaaaagtatcaatgtgtatgtggctgtttgtagtgaatttattggagaatgaggttgtccgtgtccttaacaagccaaggggcaggaggcaccctctcttatcccctcctccaagagcagtagagaatttaagcacaagcctatttgtgaaagaatattttgcttaagtgtcattcactttagtcttggaattccttcccaaacgtcaggtgttcttttagcttccaaactagcatatgtatccattagtctgacagatcgcctgaacaccattaagaggtgtggcgtttttgctttcatttctcctgctgggagaagtggcggttcatgtgtcattccagtatctcacatactcacacggggcaggggggagggggaaacggggaactatagcaatatttaaagatgctttggaaaccaaccgtgaacacatcaacaccacgacgtctacgattacttgctattggccctcggatacatttaagagaaagagacagtcactcttttttttcttaaatgatatacatataaacagttatttttatcctattataattgtcttttgtctttatctagtactatgtggaaagggtttgcatcatagatttttcccagccttataatataccataagctcctacttccctgcccctccctaatcagtattctttcaagagttctttggtgaagccatctatctgaaactaaaatgaaccaaacccatatttcactggtggttggagaaaaccatggccaaaacgattgtggcaggtctcaatcttgggagtttttaagaaggaatgtgccagaggccgattcccaagaacagagttttcttttgttttgcagaggcattcaatgtgtctagtgcttgctggccacagcagttactaccacagagccttctgggaggggccgttgtgttgaaggaggctcctgcctgagggacagcatcaggcagtgggctctgtagagtgagaaccaggtggaggccttctgtgcccagctcagagttctgcaccacgccaggactgcccaggccaagggctactgacgcaagttccactcattccactctgtggggggcgccttgggcctctcctggaagggctcttggagaaggaattggagttacgtacaagtgacctaaatgggaagcttttctagatgagattggattaaattccatgtgatttctctttccctttaatccaggttgggactcgtttctttctggtggatcacagctgcccagatgttgcaattgatttttatgtttctgtagagaagtatttttctttcatcttcaggattttttttgccaccaaaagaaaacattggaactctgtgtttcctcttgattgtgacttcccagtgttgacagttaagtccttagtgtcgtaggtcccagcccaccaatactatatcaaacactgttatgcacataatgcagcactgtgatctaatttaaataatacttttttattatttatactactatatataatatacatcaacacttttgctatataacctaagtgataaccctcttttagttacctgccaaactctggacttggtttatattgcagttaacacagttacaaagctgtaatggtgtctttttttcctttgtaacggaatgtgtaaatcaaagtatatacattgtgtggtgttcctgtttctggagtttcatgaggatttacacatggcattcagtgttctgtatagatctgcctacctttgtgaattcatctgttaacccctcttcctttgagagagcaccggcgatggtggttaactccttgtgttttctctctctcctactggttattcttgaattaagcacagactcgtcagctcggttgctttatcatgaataatgtgtgtgaccttgcagttcttccacagttcagcaaacaagtgctagcttcactgaccaaaaattaaggaaggaaaacacagtttttaaaacgatccatcttttaacagccgaaaccgatgtgtctatggtgctgcaccttgctgttgtacttctgaaatcagacgtgtgtgaacgatcatttctgacttaaccgtgagatgctcacgagtacccttcctgttgttttgttagcattgaaatcgagactatttatttggaatatatacaacagtgtttttccactgtatttcatttgcaaaagttgagaactgctttctctaccttttgcaaaataattgatattccatattggattctcaaagacttcgatatggtgaacctattaaacctagaaattgtattcatcctttcatgactgtggcctgagttccccagcccctctcctccttttttttagatgagatttagcacactctcagttatttaaacatgcaacatttcttgagtatgtatgttgaggccatctgagctcatagctgattcagtaaccagtttcatgctgtgtcattca

SEQ ID NO: 9310 - DNA, 1722 bp, Homo sapiens
caattgaggaggaggaggaacccctcgtccccctaggagcagacccaagcttgtggcaccaggcatctgatggtgccaggaaagccactggaattgtcacacggcgagcacagagggccggccaccagtcctcgatgcttctgaaccctgaagcccgatgacatcttacgaggtggacgttggactgttcatgcgcatcgggtgtcagtgactcatggagaagaaatggggtaaatttttagtgatgttgctaatcattgaattctgttctctattaaattaagaaaatgttccaaaagccataagcctgaagattggccctgtgcacgcacgcacacacacacacacacacacacacacacacacacacacacgaaggagagagagagaaaactgatggggaaaacaagctgtgtcttcttaactgcccaagtgaaaagcaaccaagtccaggaaattacaatagctgttaaggaaaggaaataatggtacagatctttttctgtctatcaaaactatttgatccaagtgaaaaaaaaaaaaaaactagaaagctacggaacctgccattagtattgtggtgtatttttaagattaaaggtacactgatggacaaaaaaaaaaagtaaaacatggcaaaaaataaaataactcctatactgccctcaaaatggagtttgcaattaatatcaggatttatctttgcaaaaatcagtgatttccacattcagccagtatagccagcagaaatttctgatccacaatgcatggattcctttgaagaaaaaaaagaaaaagagaaaaaaatcacaaaaacaaactttttttattcaaaagtaacaaagttcttgtaaggtaaataatgtatttagcatgaagcatgaattattttcatataaatatagaaaatagagaaaaggctatgcctgtaatttttaagcccttaggcttagagtttcttttggttttcttcttttttctttccttttctttgctttctttttttcctttttgtttttgtttttgttttttgtttttgtttttttttcgggttattttgttttggttttttgaagcaggtgtttaaggtttaaccttcttcagggacaaattctgactgttggggaacttactctgcaatataaaaatatcttcatgctctggtagggcttggatggttgaactctgtactgccttgtgtgcacttcagccccgaccccctctgattctctgttgaaaagtgtgtcctttctctctgtctgtacatgtttaacatgacgcaataatttgagggcaaacttagtagtgagtgtgtatgatagaatcaagagaattatgggacgcttacttgagaaaatcattaccatgatttggttctaggaaaaaggcagtgaataattatgcaaattagccagaagaaggggaaccgtgctaatgggccttattgggtgaggggacgagatggggttcatgtgaaggaggaagcgatgccgaggtaggaaaggccagccccagacatcctatcgccacaatgccatgtcgcaataggaagcaggggccggccatcgctaccttcagcacactgaccaacctggaattaagaccacctagattgcgagagctgaatttagaaaccagacaacgtcatgcagcccagaaactcctgttgttacctttgcctaagaaattttctttaatggcgggggcggggggcgggggtac

SEQ ID NO: 9311 - DNA, 1242 bp, Homo sapiens
cagagtgagactgtctcaaaaaaaaaaaaaaaaaagccgcatcctgcaaataagatgagaaaggaggtgtgggcgctgggtggggcgggcactcagatgagattctctgcccactctgtagaattactcttcattgtggctctcagaactcggagcctgtgaaaaccatggtttcagggtgaggggtctctaccctaggctgcatttcctgatggcctttaaccttcccaggcctggaggaaatcatgccccgggaaaatatatgttttaacttaaagatgtaacacaattaaaatgtaaacaccagttctcagctttagccctttactgtgagggtgatgtaataagaaaggccactgacattttggggttgatgaaaatggtaacttttaaaggtaacatgggttttattgaaatataattcacataccaaacaattcacctatttaaagtacaattcagcggttttttttcgcagagttgtgcagccatcagcacaagcagttttagaatattttcatcacccagtgcgggggaaaaaccctgtacccttaagccatcacccgtcctcacaccaaatgatgacttattaaatcaagctggcaagtcgtggcctgcaggaaagtgagcaatgattctcagcactctgattagcaagtggctttccagcaagtgtcacagggctgcgggttggggtctgggggatgccagatgcgggatggggggctgatctcactacttggagtatctcagggggctgcctctccggctgcgtgtcctcaggagtttgtttgtttaacaagtcacttggcccacatagaataagctccacttttttggagaaaaaggaaaaatgtgaattttgaagcattcttttatatctcttttatctgaaaatttcttctttctcactcaaccacttttccaaatgctggtcctgatggatggaacaggctccccttttactttatttcataagtggtttataaccctgaggctgagaaacgatataaatgagggggaaagaagtatcctacaagaaatacccagttaaagaaaagaaaactggagaaaccaagcccccatttcttttttttttttctccaatgcctttttgaagcacctaaaggccaaggaattttgaaatgagaactcgacagtgaaatgtttctcattttcaaacaaagaaacatttcttactcttgggtgttttgtgtgcagaaacacttttttgatatgtca

SEQ ID NO: 9312 - DNA, 1210 bp, Homo sapiens
aagaagaagaagaatcattgtttgctcagcagttctgtatgttggctcagcttgaatggctcatctctattccttgtggtgttagctgggctcccttgtatatttggacctcagctgggatgtctgggacagctggggcctgtctctgtggggtctcacatccttcaggaagcgattccaagctttttcacttgatggcagaagggttcccagcaacaagagaaagcaagccccaatacacaatacgcaacagtttctccttgtgtcatatttgctaatgtcctattggctgtagcaagtcaagaggccaagccagattccttttggcggggaccacaggagggtgtgggtacaggaaagcatgattgtcatgggccattgctgcagtagtttataacaaggagtttatctaggatcttgggagaagggaaagcagcatcattctttagagagttgcctgggatagatgcagccagtggttagagagctccactcaccatctgcatgggcccctttagccccacttccctctgtgaccagcagctacacataagcttaagccatctggctcacagattgatgggcactcagtcccacaggagccaccaggagaatatggctggatcagcacaaatctgatgttaatgctagaaaaggaactcagagctggtatgcaatatagcccacgcagatctttcggcagagtgacatctaaaattccctgcagttttctcagcctgccctgagtctgagctgcatattcattctgttcgacagcaattctggggtctgcctgttctttgttcctctaaccgtgctgtggacaacattctgaggacagcaaagccatggaggagagttcggggaagggggagaatcaaagacatgcctacgagactggacacccagattcgttagttgggtttgctgcccttgcctttgatctcctgtgcaagtggaagggtgagctgatggactattgacgcctggcttcatcctcgttgtaacgatcttattttcactgtatatcctttcagggttatgccgacgttaaagattttatttagcaattatttgtgctatctcatcaagatattgctgtgtgatgctgcaccaagagacaataattcaggaaatgattttaagatcagaaaggtgtttggatttagagtctagaatgagtaggagaaggaataaaaaggatcgatgg

SEQ ID NO: 9313 - DNA, 1273 bp, Homo sapiens
gtcaccttgctatatgaatggcgggctgatttttctcatcagcctatctctctgtggtggaattgtgggattgtgttgcttagtgtgggagtcacaaggtggtgttcctgtgtagcaggggttccatagaggcggcagagggaggcaacaggatcagaggggtacagtctgcctttctgttttgggcctcgccagctcatcatttctttgtgatgtctttactaggagccttcacgtaaatgggtccagtcatgcctcccagtaagaagccagaaagctcaggaattagtgtctccagtggactgagtcagtgttacgggggcagcggtttctccaaggcccttcaggaagacgatgacctcgacttttctctgcctgacatccgattagaagagggggccatggaagatgaagagctgaccaacctgaactggctgcacgagagcaagaacttgctgaagagctttggggagtcggtcctcaggagtgtcagccccgtccaggacctggacgatgacacccccccatcccctgcccactctgacatgccctacgatgccaggcagaaccccaactgcaaacccccctactccttcagctgcctcatatttatggccatcgaggactctccaaccaagcgcctgccagtgaaggatatctacaactggatcttggaacattttccgtattttgcaaatgcacctactgggtggaaaaactcagtgagacacaatttatcattgaataagtgttttaagaaagtggacaaagagaggagtcaggtaagcctctgtgtctggaacccaaggttttctttttttttttttaatttaaaatttttctctattaaaaatgaatttctattcaccacattgaagtagcagttgtaagtgggttttagtctatttaattcatttagataattttaaagaatttcctttccctaagcctattagttatgtactgtttattagcatttgtactatttgagagtttcccactgatagggtttccataaagataaaacagtggtttacagaattgattagttctcagttaacatccctcagtgtggatgggtcactttggttttagggtcttaacaaaggtcagtattccaaggacagccattaaccgtgaagtatgtgtgtgtatatacactgccaccatgggctagagaaaaatggtgtttctttttttccctgaatatgaactaggagaagggaaatttctccagtgttctggcataagtggacagtgatgaacattgaga

SEQ ID NO: 9314 - DNA, 1205 bp, Homo sapiens
atggcaggggagatggctgggagaaggattaaaaggagcaagagggaacttttggagatgatgatcatggtgatggtttcacaggtgtatatatatgttaaaacctatcaaattgcattctttaaatgtgtgaataatatcccaataaagctgttttaaaaaggtgagtttgctactcgggaggctgaggcaggagaatggcatgaacccgggaggtggagcttgcagtgacctgagattgcgccactacactccagcctgggtgacagagcgagactccgtctcaaaaaaaaaaaaaaaaaaaaggtgagtttaaagtcaactcacctaggctcttcacgcttaggctaaggtatttatattcttcagttggctattcctctattcaaacactaatttaaaaaatatttattgcgtgctgattatgtgctgaacactatgcatggctattaatataaatagagaaccttggagaagggactgggaagtaagtgatgagtttcattttggacatgagtttggggcgtctgatgtgttacctggtagagatgaggagcgggcagctgaaaataccaagacatacttgggaagagaacaaggatggacataatgatttacatgcttcccacagacgggggactgttggagccagaagatttagtaagattattagaggagaacgtggggaacatgtggcatgacacttggtggacacattagtgtgtttattctcactgctgcagaagacctgaaaaaattttcttccttccttcccaataaaacagtgaaatgtttgtactctgaatctggtctcccttgcctcggagagttgttacaactttttgtcctggggctaaatgttgggtttccagatacctagaagtcaaccccaactcagacttttttaggaaactggataaaagtcaaggatgtgaggaaggcagatgctaggaattgagaatacaaaaatggctcagtgtgaatgatgggggattgtgcggggctgctaggcttctctgactctaggagagggaatccctgaagtagaagagacccatgtccactgtcctgtggtataagagaatgtgccaaactctgggatagcttagcatgtggatgctggaaggacttaacatcaaacaccatggccctgggagccacagtcaagcactcctgtggtcccacttggttttgagggaaaagag

SEQ ID NO: 9315 - DNA, 1200 bp, Homo sapiens
agattgtaacagattttccaagagtttgttagcacatctcaaaaaacagagcctggaacagtgctttccagcaggcttccgtcatgaccctggtgaggccccactcactatacctatcttgtcattagtcattgtccctttggttgggctgtgtccttcagtgaatcacaaatgacttgggcagagtgctctaatcaggcattgtggacggtacacagaatggctttacccttcccctcccagggagctcataggctagttgggcagggtggtcatagagtcagatggccacctgatacacctaagcaatgagacagagacatccttcctgggtgagagctgggtgctgagatctgagggaggtgcctacctgagtgagcagagccagaggactttgttgtgcattacagaaaccaatttgtgcccacagaagcccacagatggaaggagtttactgaaaagatgctggggggatgtcatgggatcagaggagttgctgagtagctgagacttgggagcaacgggcccaggccctcttaggggactcagcagcggcccttctccctgggttctgcagctagcatggctctgcagcccaggtgctggccagtccgcatcccagtgacacctcaggcctagatctgccttccatgactcaggactctcccagctccattcccggagaaagagcctgtttccagagaagggaggatggatgtgagcgaggaagtcaccctaaggggtagatactaccaaggggtttcacccataagtgagttgatgtgcgtcttgtcagtctgtaaaaagggttgttgggttattttgatataggagactttatcttaaagtgcttatatcacaacatctatgttgtctactgatatgtgaagcttctggaaaaaaagtagacctttgcttggccttcacaaaattaacattgatggttttgaccttgaggatgacccagagatttgtgccatgaggtagtttgtcgtttcgctgagtttatacgtgcacaggagtgagatgcttaacttgtgaaggagaggctgtccaacggaacagcccgacggttccctcctcaaagcataccccaggctcctacctggacgttccagtggcctgggactacccacctccatactcacttcagtcccacacataccctgtgcctgctgtcttccaggcccctgcgaagag

SEQ ID NO: 9316 - DNA, 1129 bp, Homo sapiens
ggattcccagacccttttttccagcactgatggtttcctaggagtttactttggctctacagccctgggttggatgggtcaggttaatgtatgcaactttgaaggggcccaagacagactcaaccagagaaaaaaatgagatttatttcattactggaatgaagcaattcttcgtacaggtaattatagttcgcagcttttcaggggaaactgggtcaaggttggaaaataaccaagtaaaaagtattttctgacgttatcataagttcagcaaaatagctaaggataatccaaacatgttagtagatttttctaaatgtcctcttatctacttaggagaatggaatgtcgtgacacttgaattggtgccatgccttagcatgagggcccgcctgtttttggtgtccatttaaggtggtaatgatacgagtttttaagttaaaatggcacttaaggtgtcttttttttttttatctttttcatccaaaataggtaaaaccttgttagccaaagcagtagcaaaccaaacctcagccactttcttgagagtggttggctctgaacttattcagaagtacctaggtgatgggcccaaactcgtacgggaattgttccgagttgctgaagaacatgcaccgtccatcgtgtttattgatgaaattgacgccattgggacaaaaaggtagactttctcatacttattttgccttgtttagtagggaacaccgcatagctcttctcttgagaatgagcaatctcagggggctctccctatggccacagttcttgctgtgcgtggccttccatgcatgctttaggctctgctctcccaggagccagctaacaactgcccagtaactgtgaacgtctggagagattggtcagttatgaataaccatgtcttgagcacccgccctgatccaggaccatctggactctagggacacagttgtgagcacaagtctctgccctggaggagctcacaggttgtagggatcagataccaaacatggaaacagaataaatgatacaatttcagacacagaaactgctatgaaaaaatatgatctgtaacttggctgatgggagcgtcttagtccatttgtgctgctaaacaaaataccttagg

SEQ ID NO: 9317 - DNA, 1382 bp, Homo sapiens
aagacctactttcaactcctttttcccccctctagaagaatcaaattgaatcttttacttacctcttgcaaaaaaaagaaaaaagaaaaaagttcatttattcattctgtttctatatagcaaaactgaatgtcaaaagtaccttctgtccacacacacaaaatctgcatgtattggttggtggtcctgtcccctaaagatcaagctacacatcagttttacaatataaatacttgtactaccttaatgataaggactccttaaagttccatttgctaatgattaatacactgtttgggctggccagtttttcatgcatgcagcttgacgattgagcacagtcaggcctttgtattaaaaatgaaaaatgaaaaaacaaattcaaaacctattcaaatgggttctagttcaatttgtttagtataaattgtcatagctggtttactgaaaacaaacacatttaaaattggtttacctcaggatgacgtgcagaaaaatgggtgaaggataaaccgttgagacgtggccccactggtaggatggtcctcttgtacttcgtgtgctccgacccatggtgacgatgacacaccctggtggcatgcccgtgtatgttggtttagcgttgtctgcattgttctagagtgaaacaggtgtcaggctgtcactgttcacacaaatttttaataagaaacatttaccaagggagcatctttggactctctgtttttaaaaccttctgaaccatgacttggagccggcagagtaggctgtggctgtggacttcagcacaaccatcaacattgctgttcaaagaaattacagtttacgtccattccaagttgtaaatgctagtctttttttttttttttccaataaaaagaccattaacttaaagtggtgttaaatgctttgtaaagctgagatctaaatggggacaaggcaggtggaggggaggccagtgtacatgtaaatgcccacagcccagcattgggtttccctcccaaggccccagcaccaacctctgagcccaagaccttgcctgaaaacaagcagataccgattgcttcatcctatttatggacatgtaggtctagttgcattttcactggggggaggggggaaggtgaattatggtaacttttaatgatctattcaggcagtagagctcttaaggaaaaaaaaaaacccactttctctcaagcatgtatttaggggttgttctcaattgtgctgctgattacctgtcttatgtaactacttgagaccatctgcaagagacatgatttagtgtgtctgtaattcaatcttcgctgtgtgtggtagaagcagtagtcacttttgtaagccagtctcttcatgcctaaaagacactaccagtcacc

SEQ ID NO: 9318 - DNA, 1127 bp, Homo sapiens
gctgtgcagtaggcccagcgctgctgtgtctcgtcagaggaatagcttaccacgaacccctcagcatactgggaatctcttcctgaacaacgaatgtaaatttggtcaagtctactcttccgttcattcaattattttaagcatttgaattatttattgtatatcctaaatatatttctcctttggcagtgactagatttccactaatgtgtcttaatctatccctccagctggcagttactgtttttttaatcccctgaagttgtcctgtaggagacagaaattctttgctgtctgtatcccttggagtaagaaggtagtggcatgggtggagtgtgtgttctttctccaaatctattatgatgtttattaaacacttctgtagcaaagatggtggtagttcttttgttactgaagttgcccttcaccatggctatttgaaaaggagatgtacttggacgtttctgtaaatcttgagataaactgtttggagatttaaccacctctctgatgggggaccaactctatggaaattgtaaatacgttttatttataaacctggcactgtattcaataaacatttctgcagcctttcatctctaactgcgaactgtgtaggtttctagcttgcatagctttcaattccttttgctctcaacaagatagacctgccctcagatgtaatttcactgggtctctagtactgtgagagtgaggggccagaaataaccgtagacacatcccacaaccgtcttaccctagttttaagtagtttgagtgttaatagctgacattttaacctattctcttagcctattaacttgtccatgcttgctttttatgcggaaaatttacaccataaggattagtttccttttaaccccaatccaagcctctttaggacttgtataaagaaatacatttttttcaataagatgggaattttagatgacaaccaagatgataccttggttcatgtcaagagcgggacagctgaggaaagtggggtgggatgcaagtacaatttaggaccttggcattgaagccttccccttagtcaacactggcccagaccctggttcttagatgtagcaggagaggctgcctgcttctgccccctttgcttc

SEQ ID NO: 9319 - DNA, 1546 bp, Homo sapiens
cagcttggcgactattttgactgttgcccctgaacacaggaaatactggagaacttactatgggcccagcccaatggcgatatattcccggctccgaggaactgactggaaactcgaggacaagtaggatgcagagctcctgaagcctccatggctgactgtctctctctctctctgacctctccaggccctgatccttcaccagctaggccgctacagtctggcggagaagatcctccgggacgcggtgcaggtgaactcgacagcccacgaggtctggaacgggctgggcgaggtcctccaagctcagggcaacgatgcggcggctacggagtgcttcctgacagccttggagctggaggccagcagccccgccgtgcccttcaccatcatcccccgcgtgctctgagcaggcgcctgccagcctcacctgccgctcaggcctcagaggccctgccgggcaccagggcttgtgccatcgccccaaggggatgaatctgccacactgaggccagggacgagtgttcagtgggccacagtgaaccaaccaaaccaaccccgaatcatcgctctcgccatgtgcgtttctcttgttttttttgccagcccaatggtagtttctgaacctattgacattgttcaaaatggatcatgtgccatattttgttagttgacatctgagttttcagtaaaatgattatggaattaatcagcaaatgtagaagaatatattcaaagttaaaattcagtggcagcacagattatttttatcagagctgtaaagaaaacaactgtccttttctccccaccacccctcctgccccactttggcccagaaaccaaatgtgaacttcctgtctcccacctcagcactagtccatgccaggacaccagctgacaatttcttggttttactgtcaataattgtaccatgtgatcaattactgtcctcacttagaacaaagcctgagtccgagaatatttatattttaccaatatatgcctgttacaagagaaggaaatatgagttatttaagtttaacttttttatgtgaattcagagtttatttatcgagggaaatatgtacaaagaagcttcaaatggaatatttaccgacattccttatacatgacagacacttggctacatgggaagatgatgttaataataaaatgatttttaaatggactcatagcctgtgtcattcgtaaaagctcaaagacctgagaaaggcttagttcctggggtggggagctgtctgtacctgggggcccactctggacatgtcagcccttgacactagaaagcccagcctctctttccccacttattttatttttattttttggagacagggtctcactctgtttcccaggctggagttcagtggtgcgatcacagatcactgcagcctcgacttcccaggttcaggtgatcctcccacctcagcctcctgagtagctgggatcacaggcgcacactagcatgcccggctaattttgtttgtttgtttttgtagagacgggatctcactgtgttacccag

SEQ ID NO: 9320 - DNA, 2308 bp, Homo sapiens
agctcccatagcctggcccgggagcggaccccacttgtgggaaaggctggcagctcctgtcagggcccaggtccccgcagccggccgctggacacgaggcgcttctccctggctcccccaaaggaggagaggctggcccccctgcatcagtctgccacagcccccgccattgccactgcaggtgctggtgctgctgctgctggcagtggcagcaactcccagctcctgcacttctcacctgctgcagccccggctgccaggaccaagcccaaggcgcccccacgctcaggggaggtggccaccatcacccctgtccgggcagggctcagcctctcagagggagacggggtcccggggcagggctgcagtgaggggcttccggccaagagcccaggtcggtctcccgatttggctccccacctcggccgggccctggaggactgcagtcgagggagcgtctcaaagagcagtccggcctccccggagcccggcggggatccgcagaccgtgtggtatgagtacggctgtgtgtgactgtctcgtggttgagctcgcaaacctgaaaactactgacgcgccttccgactctcacggccttttctcttgcttgcctgcggtgccaggagagggtttggaatgaggaaaggggttcccacgcatttctgctgtttgttctgtgaatggaaacactgtgccaagccccaagaggattacgcttccaggtgtgtaacgtgttttctgtgtctgccgcttccagcagctgatatctttggaacaaataatccacgtcagcatggggaccaattaggatgcaatgacaaactgacttcccccaaagcagacactactccagtatgtcccagtagaacactcatttgcaatgtgttgagctccgttaagcacacacacactcacacaacaggcttacgaggctcaggcctggcgggtcagaaagcccactccctctcccaaggccactggatcccaggagaagcccagactggcgatactacaaaggtctccagggcctggcagaccccagagtcaggcctgctgttaaaaagtgagagtgctgctgttccattcctggggtcccaagcacttccctttaccccaggacccagggcagcctgcagggcagctggcggtggccttggccatttgcccccagcctccagctggctcctgagctctgcaccagggggtttggggaccacacaggcacctgccttcctagatttccctggctcacttttctgcaaacactggatctgccaggcctggggattggggggcaggaaagaggcccccatccagccccctccaggccagtgtgcacagtgcaccgaggggtcatccgcacagagcgaggtgcaagctcgatgtgtaacctggctgcggcacccgacatccccggtctcggggtgttgatttatttctgaataactttttgggtatagaaaccaattttttttaatatatgacatgtatatgtacacactcatgtgaaatatgtatactttggggggatctatttatgttccagtgggagtcactctcttctgtcgggaatcttatctgctgctttgtgtctttggtcagattcctgacaatttagtttcctgttgtaaaggtgcttttcctggggtgaactaaacctattgattttttttttttaagatttttttttccttttgatttaatatactgagaaagaaatgggagacttttgaatgttaacaagatccattttaggagtgtttggggttgtgtattaaatagccattcattctggaactcaaggacaggactgtaataaaatggaatggaaccgaagtgcgttctggctttcctcactgcacattgttagcatcgggtgggcccctggggacttggggctccctgcgcccctccttatgcacccctccctctgctccccttcctctgtgcccctgcacccctccctctgcgcccctccacccctccctctgcgcccctccctgtgcccctccctctgcacccctacccctgcgcccctccacccccctgcgcccctccacccccctgcgcccctccaccccccctctgcgcccctccctctgcacccctccctctgcaccgctccctctgtgcccctccctctgcgcccctccacccctccctctgcgcccctccctctgcgcccctccacccctccctctgtgcccctccctctgcacccctccccctgcacccctccctctgcatgccggcgacccttcctccacagttggaatccaccactttccttgccactaggtgggggaag

SEQ ID NO: 9321 - DNA, 1167 bp, Homo sapiens
agtgatgtaggtggattctggcaatatcataaatattagtaaaaatagcatgttcccaatgatgacttacagcactatgccttttaaaaataaagttaaaagcaactacaatgactgtactctctaggaaaatttacaggtgcaataaaactacataaaaaagagcatgggaatgtgtacttctcattccgtttttggtgtcttgggtggcaggaggtggcagtgtgctgggggcgccatctggttggctgtaggttattgtcaaggccctagcctttgtttcagctggtgggtgtgcaggtggttattacattgtgaaaagtgactaagtggaagtgggccatgtgcaaaccaaagatgagtgtcccgagccaaggactgccatgaacaattaacccagttccctgcatgtcaggcccagcgctccccgggccccaagctggtttagctgaggctgtgatggcctggcgttcactgggggagggggtggagtctgcttttccagttactctttcccctgcttctcttgtcaccccctgtccctccagctcaggcctccccacttcaggatgcctgctggctgtagtgacctctgccagcttgcggctttgcacttcctcaactactgtttcctatctgtgtcacacaattattgccttgttatagatggcctcacccactaatcatttccacatgtgcgtgtgtcttttaatgagctggtaatctccacagggccagaggtcatgttttatctcctctaatgtggcagatttctgcccaattctgtaccactctcctcttcttccttacttaaagaacccccagtctcccctcagctaggcagtgccatgtggctgcatggcatgtatggagcagcgtcgtgtgctcctgggaagccttcctagaaggaggaggcagcgcgcctcccttcccccttcctccttcctgctgcacgcactgcagcgtaatggctggaggtccagtccccacagaggggcaaccagacagagactggtccctgacacccagcactggggggctcgtatagcagctttgggctgcctgtctcctgagaaacttcaatcttgtgtaagtcacaatttttaaggtctttgttactcacagatgaacataattctcaggggtgcatcttgtaaccctccccac

SEQ ID NO: 9322 - DNA, 1816 bp, Homo sapiens
atgcctgtaatcccagcactttgggagtccaaggtaggtggatcgcctgaggtcaggagttcaagaccaggctggccaacatgacaaaaccctgtctctagtaaaaatacaaaaattacccaggcgtggtggcgggcgcctgtaatcacagctactcggcaggctgaggcagggagaattgcttgaacctgggaggtggaggttgcagtgagccgagatcgcaccactgcactccagcctgggtgacatagcgagactccgacttggaaaaaaaaaatttttgctttaattctaattaactcaaagttttcccttattgtaaaaaagtatgcatgtttattacaggaaatttagaaaatatgtaaacataatgaattgaagtttaacacagtcccaccacccagaaataaccaccgttactatgttggtaggatctattttctttctccagccagaaaacaccagtgtttttatatgttttattttctgttctttaaataatccttatttcttaacagggaggcctcgtgggtctggtagattatcctgatgatgatgaagatgatgatgaggatgaagataaggaagatacgttaccattgtcaaagaaagcaaaatttgattcataataatggcaacggcctaggatcagtacctgttgaaaaaaactggttctccacccctcccccatacaaaatccacaacaaagcgcagtggtctcttgtgaatgactgacacagatcagcctcttacacttgacttctgctcatcaagtgccaattcaatggagcaggaggaggggatatcatatatttaggggaaagacttaagcctttgagctctccagcttggaccacacattgcccttttctcagggaaggaaatggaaacaaaaagccaacagggcaggggttttgtaagtggaactctggattgactggtcagttgctacaatcagaatatgctttcttggaccatgtttgagactcagaagaatgggcctttctgccataattcttcactagtcaagaatgccagcagtttctttgtataaagagacctgcctttaaaatcatacattctgaacattttagtcaagctacaacaggtttggaaaacctctgtgggggaggggcgagtataaagttttcctcttttttaactgttccctttgcccttcaaactgcagatatttttttttttaagtggggacttctccctacttgattaaagattgagtggaattctagatgtggtcatttgtgtcataatttttttgttttattttgtttttgattttttttttcctcccctgagtgtatgcttagttgttgagtatatatatttgggaccattaaaactttttttgatgtaatataacctaacgttgtgctggtacctgttttaccatgtgtaatttttgttctacatcacagttcttaatttgtttagagttttatgaaagatggtatagtttttattgacaaaagcaaagtaatcttacaactatgtgcatacaaaagcaatactattttgtgactaaatattttatattaaaatttacatcagcaactgtcttgagaattcagggaaatagaatggaatttaaaacttcaacagttttgttaaatctagaaacatgaaattagtattccaaagagattctgaaatttcttttcttggggaaatgacggtacattaaatcaaaattgaggatggatgatttaaaaacatttgacttttgaataataaaaagaaaagtgaagagtaagagaaattgtattagttgtatgtttcttgtttttgtttttaacta

SEQ ID NO: 9323 - DNA, 1171 bp, Homo sapiens
gactggctttttttcactcagcataattcccttgagatccatccaaggctttggatgtatcactagtttgttcctttttattgttgagcatatagtgcagatatatcacttagttttaacagctaaggtatctatttaaagataccatcttaaaactaaatgttacacaaattcatgcaactttcatataagcattaaaccatacagctgcatctacgtaagtataattagcaaaatcactgaacatgccacttcctgcctccgtctgcggtgttgacatatgaggtacagcaatccgagagtcaactgttatcacggtggccactgagggcagtgaaatcactttgatagcaccagtacccagatgtttgaaacttaagaaagtatttctttaatttttcataaacccatcataaaaaaaaaatcccgacttgaaacttaactgtatctggatgttcatatttttattagttgttgaagttgtacatttaaaaagatatttcttgcaaattttgtaaatttctatatgcttttaaaatagaaacatttgtataacaaggaaggatgaaaataaaacaaattcaaatatgtgaatagtcctggctgaggccagaactaaatttggttatttgcaagttttactgtgattaactgtactttctaatgtatttggaagactggaagtcttaattccatgttgatgggtgaaacttgtttttctgaaaaatgaagtaactgaaaatgctgcttcagaatgtcttgtatctccttagataactaatttatattgccattctttatttactatactttaaaggaagttgtcatgcaagttctatattagaactgtcaaactgcctcttggtttttgcctattattatttctctgtgagttgttactccttggtttttatatgctcctaacaaagatactttcactgactatcctacattatttgctgcttgccattgaaatttcatttcagtgtggagaaatgaaatactagtttctaagttaaaaaagacacatggtcctttatttttaagaaatagaatatgtaaaaagttttctcttttaatttgaaaaagagatgcatggttggtatttaagtagtatgtcatcatatttgaaatgccttttgtgacatttttgagtatttccttctctgac

SEQ ID NO: 9324 - DNA, 1985 bp, Homo sapiens
ttagaaactgtcagaaatgatttgaaaacagaaggaaaaaaataatacctttaaaaaataatttagatattcatactttccaacattatcctgtgtgattacagcatagggtccactttggtaatgtgtcaaagagatgaggaaataagacttttagcggtttgcaaacaaaatgatgggaaagtggaacaatgcgtcggttgtaggactaaataatgatcttccaaatattagccaaagaggcattcagcaattaaagacatttaaaatagttttctaaatgtttctttttcttttttgagtgtgcaatatgtaacatgtctaaagttagggcatttttcttggatctttttgcagactagctaattagctctcgcctcaggctttttccatatagtttgttttctttttctgtcttgtaggtaagttggctcacatcatgtaatagtggctttcatttcttattaaccaaattaacctttcaggaaagtatctctactttcctgatgttgataatagtaatggttctagaaggatgaacagttctcccttcaactgtataccgtgtgctccagtgttttcttgtgttgttttctctgatcacaacttttctgctacctggttttcattattttcccacaattcttttgaaagatggtaatcttttctgaggtttagcgttttaagccctacgatgggatcattatttcatgactggtgcgttcctaaactctgaaatcagccttgcacaagtacttgagaataaatgagcattttttaaaatgtgtgagcatgtgctttcccagatgctttatgaatgtcttttcacttatatcaaaaccttacagctttgttgcaaccccttcttcctgcgccttattttttcctttcttctccaattgagaaaactaggagaagcatagtatgcaggcaagtctccttctgttagaagactaaacatacgtacccaccatgaatgtatgatacatgaaatttggccttcaattttaatagcagttttattttattttttctcctatgactggagctttgtgttctctttacagttgagtcatggaatgtaggtgtctgcttcacatcttttagtaggtatagcttgtcaaagatggtgatctggaacatgaaaataatttactaatgaaaatatgtttaaatttatactgtgatttgacacttgcatcatgtttagatagcttaagaacaatggaagtcacagtacttagtggatctataaataagaaagtccatagttttgataaatattctctttaattgagatgtacagagagtttcttgctgggtcaataggatagtatcattttggtgaaaaccatgtctctgaaattgatgttttagtttcagtgttccctatccctcattctccatctccttttgaagctcttttgaatgttgaattgttcataagctaaaatccaagaaatttcagctgacaacttcgaaaattataatatggtatattgccctcctggtgtgtggctgcacacattttatcagggaaagttttttgatctaggatttattgctaactaactgaaaagagaagaaaaaatatcttttatttatgattataaaatagctttttcttcgatataacagattttttaagtcattattttgtgccaatcagttttctgaagtttcccttacacaaaaggatagctttattttaaaatctaaagtttcttttaatagttaaaaatgtttcagaagaattataaaactttaaaactgcaagggatgttggagtttagtactactccctcaagatttaaaaagctaaatattttaagactgaacatttatgttaattattaccagtgtgtttgtcatattttccatggatatttgttcattacctttttccattgaaaagttacattaaacttttcatacacttgaattgatgagctacctaatataaaaatgagaaaaccaatatgcat

SEQ ID NO: 9325 - DNA, 1108 bp, Homo sapiens
ctcaggcaatctgccagcctgggtctcccaacatgctgggattacaggcatgagccactgcactcggcctgaactttttatagtagtaacgataattcagtaatgtccaataatgactaagtaagttataacaagtacaatgtcagcaataactagtgctttttagtaaacagggtcaggcaaccttgtacccttttaaaaatgttcgaatatcgatatacctccttcctacttggtggaggattgattgaggaggaaagtgtgcagtgatggttaccagcttcagcctcttggcttgactttgcaaatactggtgagaatttggaaagagcttgagaatatcttacatagtcacatgttgctgagaagagttaagaactaacttcttgatgttcatttttaacaatggcttgcattcaaaaccttgtagagctcattagtaggagctaagaagctaatatttgcctttcactaaaattcctgattacttagcctaggtagttcgttgtctctctaggttctgtctttgggagcttgggtctaaggttatcaagctaactctttcttccctctcacccttcccaaattgaccctggtgctgatttgttattcatacgattttctagtttttcttttccctttttgagtatttgaagcttcatactgaatatagtaatcatagtattcatgcataaagaaaatcataaagtaattgcataaatgcataaagtaatcatagttttcatgcattaaaaaaactagttttggctgggcgctatggctcacgcttgtaatcccagcactttcggaggccaaggcaggcgaatcatctgaggtcaggagttcgagactagcctggccaacatggcgaaacctcttctctactaaaaatacaaaaaaattagccgagtatggtggcgggcgcctgtaatcctagctatttggcaggctgaggcaggagaatcacttgaacctgggaggcagaggttgcagtgagccgaggttgtgccattgcactacagcctaggcgacaagagcaagactccatctcaaaaaaaaaaaaaaaaaaaaaaaaactccctattacagattcataatttatgagtca

SEQ ID NO: 9326 - DNA, 1198 bp, Homo sapiens
aatcttcatcaattagattttaaagtattatactacattctgatgccaggcaaacaaagaggcgtattaggcttttaacatctattacatctatgtctatcatcttcttgtttcagatgcaatttatttattttattgagatggagtcttgctctgtcgcccaggctgaagtacagtggcacgatcttggctcactgcaacctccgcctcctgggttcaagcaattctcctgcctcagcctctccagtagctgggataacagacgcgcaccaccacacccggctaatttttgtgcttttagtagaaatggggttttgccatgttggccaggctggtctcgaactcctaatctcaagtgatctgcccacctcagcatcccaaagtgctaggattacaggcatgaaccaccgcacctggcccagatgcaatttaaaagctatttcaaaaaaaaaacaaagcagttgtatttctgataatttttttttcttttagctatcatggtgaacttacttcagattgtgcgggaccactgggttcatgttcttgtccctatgggatttgtcattggatgttatttagacagaaagagtgatgaacggctaactgccttccggaacaagagtatgttatttaaaaggttagtctgcatttttttaaaccagcaattggccaaatttggggaatattctttttgatatgtgccaaaaataaacagaaggggtaatttttcccccttgaggacttagattcaaatgatactgtttttagtcttgtttgttattgaatccttggataaaacagtatgattacctctagaatttaaagtcttcatttaatgaataggctgtttcaggtctttgaaagtatcgtctttttttaattcaaagtgcattttaatatagaaacagtttaaaagtagctggccaaaacctagcttatatacagcttccacatatattgtcatatattatcttacttaagacatgctatagctgagataaatagtaataacagcagctaggtgctgtgttcttagcagcactacctgagagctttagacctggtggtagagtgatagcaactggcagctgcctggtcccattgtgcctctagagatggctcctctggcagcagagagttccagttagcaagacaggatgcctgccagtgggcatacagctgggtaggaggaagcctg

SEQ ID NO: 9327 - DNA, 1083 bp, Homo sapiens
aacaatatatgcaattttcattgaacttaaagagtgaaaaccatgtaaactattgaaactattgtaatccattaatgcttttttagaatggcagaccttgatgtttatttctcaaatggttaagccctcttctttactcttaatttttttttgagacagagtcacccaggctggagtgcagtggtgagattttggctcactataacctcttcctccagggttcaagtgattctcccacctcagcctcccaagtagctgggactacgggcacatgccactgcacctggctaatttttatatttttggtagagacagggtttcaccatgttggccaggctggtctcaaactcctgacctcaagcgatccacccacctaggcctcccaaagtgctgggattacaggcatgaatcaccacaactagcctacccttagatttttggaaggatcgatcttatttaactatgtgtggaacaacccagtaatatcagactcgaattactatttcattctatttcaaatgcttataaagctactattgtagattatagtgttaatgcaaagtttacagacttttgatatggaaaaccagataaaacaatgttacaaaaggcaaatataaagagtatgttttctttttagtgctttggaaaaatttcacttaaactcttattactgtatagattaagccctataatgctatttatattccaggggaacgaaaatctgaatttgttttatgatttaaagcatctggtttgcatattgtattgtaatactgatacagtttggctgtgtccccaccaaattgaattgtgttaatagttcccataatccctacgtgttgtgggagggacccagtgggcagtaatttaatcatggtggtggttaccctcatgctgttcttgtgatggtgagttctcatgagatctgatgggtgtttttttttgttttgttttttgttttttgagatggagttttgctcttgttgcccagactggagtgcaatggcacacgatctcggctcaccgcaacctctgcctcctgggttcaagcgattctcctgcctcagcatctcgagtagc

SEQ ID NO: 9328 - DNA, 1298 bp, Homo sapiens
gaaatcaattttttaaggtgagccatttggcttttttaaaaaattgagattcaacttacataccataaagttcactcttctaaagtgtacaattcattggtgttagtatatttacagagttgtacaactattaccactatataatcccagaacactttcatcactccaaaaagaaacaccatacccactaccagtcactcctcatgcccccttcctatgacccctggcagccattaatctactttctgtctccttgaatttggattttctggacacttcataaaaattgaataatacaatatatgaacttttatgtttgacttctttcacttagcataatgttttcagagtgcatcactgttgtaacatgtatcagtaccctttttgtgactgaatattattccaccgaatggatataccacattttacttatccattcaaccgttgatgtacatttgagttgattccaaattttggctattaagaatgctgctctgaacattcatgtgcaagtttttttttttttgtatgtacatatgttttcaattttcttggatatatatctaagaattagaattgctggatcatacagtaattctgcttaaccttttgaggagctgccaggctgttttccaaagtggctacaacattttgcatttccaccagcatgtgtttgagggttccattttctcctcattcttgacaacatttattactccctttttaaattttagtcatcatagtgtgggtgaagaagtgtctcactgaggttttgatttgcatttccttaatgactgatgatgtggagcctctttccatgtgtttattgactttttatatattttggagtaatatctgttcatatcctttgtccattttcaatttgtttatgttcatatcctttgtccattttcaatttgtttatctttactgttgagatgtaagagtttttttatatattttctggatactaaaccattatatattgatttgcaagtattttattccattctgtggcttgtcttttcactttcttcgtagtgtagtttgaagcacaaaagtttttaattttgataaagtccagtttgtttttttcccttcagttctttgtgcttggttttatatctttttttttttttttttttttttttgagatggagtcttgctttgtcacccaggctggagtgcagtggcgcggtctcagctcactgcaacctctgcctcccagattaaagggattctcctgcctcagcctcctgagtactgggattacaggcacccaccaccatgcctggcta

SEQ ID NO: 9329 - DNA, 1170 bp, Homo sapiens
ccctctctgttatcttcaacatactctggtggttaaatgaccttatctttttgacccatttactatgatattttcttaggggctgacaatgtttatctgttcttttttttttttttttttggagacagagtctgactctgtcacccagactggagtatggttgcacagtctagctcactgcagtctctgtcttctgggttcaagtgattctccttcctcagcctcccgagtagctgggattataggtacgtgctaccacgcctagctaagttttgtatttttagtagagatgaggtctctccatgttggccaagctgatctcaaactcctgacctcttgatccaccctcctcggcctcccaaagtgctggaattacaggtgtgagccaccgcgcccagccaatgtttatcagttcttgttgctttgtacttgactctgtgtttcccttctcaggtgtctgcaattgaactccaaggtgcagaatggtttggaaagtagctgtattcctcagtgtggccctgggcattggtgccgttcctatagatgatcctgaagatggaggcaagcactgggtggtgatcgtggcaggttcaaatggctggtataattataggcaccaggtaagaaaatgactaatcttttttttgttaaggacactggcattctgaaaacaattccagacactgttaatattaaatagaaaagacttgaaaagccattgacggacctgttaggctggctgtaacataggtgtgttagcgaggatgtggggaaatcagaaccctcatatgttgccaggaggattataagatggtgtagccattttggaaaacagtttggtcattcctcagaagttttgatagggccatcttaatctgatgcaaggtttctgaaccttggcactgttgatagttggggaccaggtcattcttggttgttgggggccgtcttgtgcatttgaggtttagcagcgtccatgacacctacccgttagatgatggcagcatctcctgctccactgtaataacgcagaattctccagacgtcgcccagtgtccccagggagccagatcacccaggctgagacccacttagttcaacatcttcattttagagataaggaaactgaggcctagagagtggaggtgacttgctcaaggtcacatggca

SEQ ID NO: 9330 - DNA, 2638 bp, Homo sapiens
ttctctgtaaatgggacgctgacagcacaccctgcctcatcccaggagcccatcggttctgcctcctcctcctcctccctgcatgatgcgtgcccctggctcacgccccttgtgctgtctctctcccacccccaggctacgagggcgtgagcgagttcttcacagacctcctgaaccacatcgccactgtcctgcagggccagagcacagccatggcagccacaggggacgtggccctgctgaggcacagcaagcttctggccgagccggcgggcggcctggtgggcgagcggacatgcagcgccagccccggctgctgcggcagcatgatgggccaggacgcgccctggaaggctgaggccgacgcgggcggcaccgccaagctgccgcaccagagactcggctgcaacgccggcgtgtcgcccagcttccagcagcattgtgtggcctccctggccaccaaggcctcctcccagtagccacggagccgggacccagaggggcagcgcagggcgcagagcacacccgctgggccagcagctcccaacggcgatgctactactaagaatccccagtgatctgattcttctgttttttaatttttaacctgattctctgatgtcatgatctaaatgaggggtagtgggggatggaagagagtaccaggtggtccaccgttggggagtggggccgtccgcctgctctctactgtgcagacctcctaactgagtttacacacgcttgtgtttgcaacactaggtctggatgggaggtgaggggtgtgcgtatggctgccatgccagtgtctgtgcacatccctgtctgttggtctccatggccactgtggaccgggacccttgggggaagcctgcccatgtcgggctgtgggaggctgatcggtgcatgtgagagtggcttcccttctgcctgactccccactccctgacctgccccttccttgtttttcctcctactggtctccaccaaggctttgttagcccccaccctgcctggtgtgcagctaacccctccctccccacagccagaggaggccacagacccctcaggggagttccgcgctggggtctgggctgtgctccctcactaaagggaaggaaaggaagctgggcgtcctctgggccccccaacacacgtcccatttagccctgcacagcggtctccttcccctaagccagcactgctgctccctggagcccgggaaggaggctgcctggctggaggcccgagccgatggcgcctgtgctgaggatttgtgctgtgatttgggcaaatcattccaggtctttgggcctccacccccttgtctctagtggacatttgagatcagagagcaccacagggctggctttgtgccctaacccctgggatgcagcctgcctttccataaagtcacctaggtgaggataggcgcgggagcctcggcatgacaccatggagatcggggccctcttcccagtgggttcactccttttcacacctgctgggtccctcctcacccagcaggcctggtccacctctcattgcaagccccaagcactgagccagcaggtgccagggagccacccgccccccatcgcttctgcacacctcagactcaccccatcaccttggcagcaaagcactggctctgccgtctgacccctgatccaggcagccccctctgcagagaaaagggttggggagaagcctctgcagtcctggaagatgtggggtgctgggtgagaggcatcagcccccacaagtatgtttttgtgtcttaagatagcagtttactttgaaaaagtgaaaaaggcttccgggctgtcctctgcccagtgagatggaggacgctagagaaagtgctgagtgtcccgagagaggcccccgagccagtgcatggaggtccttcggcctggctcagctgggctgcaggatgcccactttgaggagggaggcacagggcttgggcgaggggcagaggccatcagaactgcccggcttttttggaaactgaggacccaacaactaaccacgtttacacgacttgagttttgaaccccgattaatgtctgtacgtcacctttcctagttctgaccctgagccctggggaacaggaaagcgtggctggcctcttgcactgctttgtctccaaaataaactactgaaatcaaaccgcatttcacacgtgtttacacatgttgctcaagtttgttatgtcatactcccagtccttaaaagacgtttaataaaacagctttaccttttaaaaataaaatttcaatcccagtctgcctcaggtacgggtgggggtgtgcagcgtgactcctggctgtgttcctgtaccgtttgtggcctccggggtcttgcgcgtccagggcccagataccgagtaactgccatgtggtgtcgtggtggcgtccataggcctccgtggtggggcgggggcggggctgtgggtgtgcagggcagctgcattttccaagagtggagatggaggatggagatttgcttcgtaaaggcctgggagctacatgggaggtagggaggggccagccacacccagggctggggggccggtggactctgcccagtgaagccaggggagtgtcagcaatgaggggcctggacagcgacgcg

SEQ ID NO: 9331 - DNA, 1178 bp, Homo sapiens
gtgaaaggttgtatgctcacctcagatgtgcattgtgagggagacactaggtaactggtgtacgtgctcagaacagggcccggcttgtcacaactgcttgacaagaggcagccgttgtcatcagacaggctttgacccaaggcctcctgactcctgcgcccgagtcatctgcttccttcctcctcccgggtctttgtggaggatcctttaggatgtcagagggttgagcagcacacaacctcagcggcccccttccctggaccacagtgcgacaagtggtgtcacgctctcagaagttgtgcagtgcacagccagctcgatctcacatggcaggcccggtgaagggaggatctccaaccccgtggcagaagggatgcatccccaggtgttcttcacaagtcccactccactcaccctggctcaaggctcctctaggggagtcctcatgccacaggaccagggatgggccttggtggaggtgctctggacaggtgacacacctgtgtgttggaggctgagaaggtggtggattctgacagagcttttgaccccttgtcttcccagatggctatcgtgttcaaccaggagggcctgaacgccatccagccaccctgcgtggtccagaatttcatcaaccacaacgccgtcctgtacaaggtgttcgtggttggcgagtcctacaccgtggtccagaggccctcactcaagaacttctccgcaggcacatcaggtaactgctcttctcaccatcttgggctgagcaagactcaggggcccagctgggatgtggcagcagctgtctgtccttcggcactgccccaaccaccctgtgttcttggtgggatggagaggtgctctaaaggtggaaacagttgtgtacggtggataaagaggtcttggggaactagtaaaatgtccctattccctgggtcattgtagggggccccacccacctgaaccaccgtagactccaggatgcatccagaagtgttctgtccccagcatgcttctgggggacccacacaataatgatattcatggaggaacacgctgggacaggtgtggccagcatggcgtggattggccttccagggaagccagggcaggtgctgcctgctgtctcccgctgagccatctttaccttgggtctcattttcccctggggagcctgagacaga

SEQ ID NO: 9332 - DNA, 1133 bp, Homo sapiens
ggcctatggtctcccgggtggcatttgggagcacccagagggtgagccaggcgctttctaagctgtaaaagtgccctgtgatgtgagcagttatgtgatgtgctctcccagcagcacccagttttggaggctcaggaagcattcccagcagggcctgtttttagccttgaaacatcatgcttgaaaaatgcttgcatggggtttatttaactttaagtggggcaaattctgaaatgggttgtttattgtccaagttgaatttttaatttctcataaattccccacaaattgctatagtacatctttatttgttgaatctgtcagagttgtttatggcactgaagcctgggctccccctgtttgtggactgttgccatggcaacaccaggctctggaggaggggcactgctctgaggtggtatagaaggttctggaatgggctggtggtgtgaagtagagctgtggctgctgcactgagacccagccgtgggtggactgagctgcttaagaccctggttcctcttcaacatcactgcacccctcttggtccctcttcccttgggggtgcactgctgaggtctcctaattctgcttccctaagcccttgctgctcccagtgtggtctgggaaccagtggcagctgcactgatggggcgcccatgaaaaatgcagactcccttgcccccagacctgctgagtcagtctgcagttcaccaagctttcaggcaccttctcagcatgggtaagctgcagaagccctcacatgccacactgcccttgggtgaccccagaggccttggcctggcggttcttggtgtttgccaccgtcctccctgtgatctttctgactccttccccgacagttccctctgcttggccaggagtgggctttgcctctcaaccctgctgcacccaggccactctcctgctttgcacacaccagtctctactcacacagtcaccccagccttctctatctggggaactctggacatcttggaagaggcaactcttgagacacctcctctgtgaagccctccctcctttccccagaccgggtgatgttcagtttcactggagctctcctgtggcctaaacacctcacctgccccagcctcatcaggctgcctgat

SEQ ID NO: 9333 - DNA, 2682 bp, Homo sapiens
ctttgaagagtttcagtcaaaaaagagaagaagagtggatgggatgcagtattactgcagctagagtggagtatgaagctttctcattcaagccaatgaaaatgcgcttcccattcttggaataaaagaggtgtggttcacatttggccccctttccgtcctcctctgtttggagaggcctcgcgctcccttcattctctttagctgcagtagccaccgtgtggatgctgacttcacagccagcgtcctctgtgactcagctgatgcagctcattccacagacttctccagtgtactcctactccagtgcacccagggttatttgcatagtttttaagtttgattttgttttgagaaagcaaattggtgtcttgtttaatgatctgttatttcactcccagatgtgtgtgttttgccacagagctgttgccttccagaacctcctccgcaggcatcacggaaggctctcttcccgtcacctagaacctctacaggtcccctcgcccctatgatcgtggtgccttgggtcaaagcttcctcaagcctggtctgctccttctttcacgtccctgttttctgaggtttggtcatagcttagaaaggatcttggggcttgttttctctaggcccaacctccagagtagccaggactgatggttttctggtctggatgtctgtcacaggcggagagattaacagatgacagggttgaggaagcaagcctttgttatgaattttactaatacagttcaagtgaaattttcgttcatgattctattggcactagaattagaatttcagtactgtagtgctcacagggcttcctggagaacatttgcccgtatactagtcccttctctgctgcctagaaaacagaccgggtctcacccctgtgaaatcttggtggtttacgaagtcctctggatttcttgatattatcagggatattcataagcatatatcaaaaatggacctattttgatattctgttatgaaaatgttattagaaccccaataaattattatttttcccccttgaatctgctaaagaaaacagatcctgacttagcttacttgaaataagcagggcagggagccctgttttggaagagacagactgtggaagagattacaaacaaggcccgaggctgcacgaatgatgagttttgtgtatataatgttaatgtccaccgccacttccctaacgactatgagatcttttttttgaagatcctcatggaaggttgtacagagccccacatttgaggggaagtcctttcagttgatatgagatctctttaacacccctcagtctatgtaggaaatgccttgtgatacatagagaaccctcagcttctctctgcctctggaggaccaaggtctttcctgacagtcggagacacaccttgatgtatgttaataaaagcatttcaggctgtggggccaccatgtatattaatactccttatgtgtccagcatctgtgtattcattcgagtgcccaatccctggatgagatgaactaggccttataaaaagtcaaagcctcaaagaaatggcacaaccatgttcttcggcactcaggctcctaattgcagatcctcacgaagggtggtatgtggagctggaaggtcttgtggccacaggacatgctggtgagccctgagctggccttgtgcagagggctccgttcaaaggctcggggtgtctttgaggttgtttatcaagctggggaactcttccaagtctgacaatgtttcgaaccctttttgcaaggttgcactattagtataccatcatgtccggaaaacttttaatcttctcaaatatctgatgtaactaccagaaagtcccttacttcctatgaccaatcaggaccaagtcttggaggtgatgtgttacattacgtgcagcacaatagtaccgatcagttaactcagcgctgaagggcttgttttatgaaaggtactattccttctttcacattaactggaaacctctttttttacctgttgttcacaactagttttcttattgactgtattggactgtctcttcttgtagagactgattttggccaacatattaatgcatgttttatgcaaaacacaaatatgatattagttgcttttaaggagttctggcattgtatgtgcatttttgtagaaattgttactggacttataattacatacttaactctgatcaggtttctgtaaaatttaaataaaaccaatacaaaatagttgcttttcagattgtttttagtatatttaagtctacacagcctccctctgcaggttttaagaaaatgcaggcagggcgcggtggctcacgcctgtaatcccagcactttgagaggccgaggcaggcagatcacgaggtcaggagatcgagaccatcctggctaacatggtgaaaccccatctctaataaaaatacaaagaattagctgggtgtggtggcgggcgactgtagtcccagctactcgggaggctgaggcaggagaatggcgtgaacccgggaggcagagcttgcagtgagccgagatcacgccactgccctccagcctgggcgacagagcgagactgtctcaaaaaaaaaaaaaaaagaaaaaatgcatagagccgggcatggaggttcacgcctgtagtcccagctacttgggaggctgatgcaggag

SEQ ID NO: 9334 - DNA, 2704 bp, Homo sapiens
ccgagctcccagagttaacactaatctgcaggtcggctgtgcatcgcattcgaggctccttttttaaagagaaaagcataggcctctgttctcatttgtaagaagtttgactcataatagaagacggtgtcttttgaagcccagtctctgtctgtcttcagaaacaaaagtgaatgccgtcatgttccttgatgtgtgtttctgccacatatgtatgttgacatgttcatgtactgcgccggtactgcaagtaagactcaacagacctaatttggatggggagaaaaactctcatccctgacccttccccccccgcaaatgttagaccagagctgttgatcccacacattcatttttctgaaaattcatgaactattctctcatatccctgaaatataaaagtaagtggccactattcctaagattatttagtttataaagtttgcttttaatcatacaatagcttacctggctaaaactttgcgtataaagggaaaacttgctttaatctgtgggattgcggaccgatgcgacttgcagaaggtaaacaggcgtgggttttgtgtgcgttaggttaggtgttagtggacttttaatgtatcttgtgaagtatggttactagggtaggttcaagagctacatgcctctggcttttgaacccatctattaaatcttttttaatgctgtactaagataaatgtgaagtctgagtaaggttgctctcagaaaaaaaaaaaaagcatatatatatataaaataaaatttaggccatgggaactggcattttacttggtataggaatttaatgagaaccaaatcacaaaaataccagatctccttttgagatcgtggacaatcaggcctttggacaatcaccgcttccagtgcccgctgtgcgttgaggttagagacctaccgtttacacgctagagccgagaggacgttcaagtttcttaaagatgctgttggtcttttttcttatgttattgttttagttttgtgattttgatgaataattgaagttcagagtcacccgtggctcctaaggaaaaaacagcatcatgaaaggcaaaaagtatttgaaacgtaattgtttcaattttccacgcccgttctcacatgccccctttagctttatttctgggaacatgtcactagacctcagctagcctgacaccgcaataacccgttaggctttgaggcttttcagtgaattcttgacatttaaatcttcttatagaattctttatgaagccttaactaattcttgtttttgcttcctcagaaactttttattgcatctgccatccttcattggatttttgttttggtttgttgttgccattctagcaatgagcttagtccttgtacatctgcattaaggtgccgatgcagaaggcaaattggaaacacgcgccagcggcagtggggctcaaagccgacctccatgcatcattctctagagttgaaaggattgacatttctcagtaactacccggcaaaatatatattttcataatgttgaatttgccttttaggaaaacaatgtttcatgaaacacttgtaagatacttattttgaaattaattataaggcattcatatttttaggactgaattcaaagggaaatgcttctttgactttttttcattgttcggttgactttcagctttctggagtgacaaagcagcagtgatgggtgctattcctggttctgtggtggtttactttgtctactaagtgatttactttcaaacctcattacagataatcttactaaaagacttaacatgcacactgctaaaaggtgttttactgttttccattaacgctgttgtatgaacaatatttggtgacatgttgtctttttgtcctgtagattgtcatatctgttatgtagttatccttttggcaagtcctttgatttttttttcctctagaaaatcctcagactgtcaatcttccatattttgaatattataatgctgtggccatttctatagaaagattacttgcaagtgtgtgtcttgaaaataacctcttgtatttgtgtgtttatgtgagttctgtctaagagatcagataagctctggaagcttcatcatctgtacctacatgtaactgtatctgggttacatgggcaggcggtaccaagtcctgctcttcgatggggtggctgagagataaaggttcctgaactctccttgctgtgtatgcaccacatctgtacttcagagaggtggaaaatcatctacaacactgcgtttcttgtggttgtgctgttactggtataaagtcaagtgccttcaatgctaaaggctcagaaatttttcttaaactgatttcatgtcctatgcaagtgttttctacaacctgcataaccagtactttgtaaaacttgtttacgcttcaattgtacatagtgatttttaaagaaatatatagtatttttatttaggtacctccaaacttgaattcgtctgtgtgaagcattgtaaaacgatacatttctcttttgagtaccattacagttgtacagaggttttcactgcttctatttttctactgttactgataagcatgtaacactgactttatcctacatatagttggcatttcaaataaatggcttgtatagaatctgctgagttggatacagtctgttttagcagtggagcatacagtcttcaattatagaagtcat

SEQ ID NO: 9335 - DNA, 1965 bp, Homo sapiens
catgaaaaatatcatgtgttgcaatattataaggtcagcatagaccaatgttttccagaggatctgtgccaccaaaaaatcacaaaaatagagacagagaagagcatactgtactggactgagaaaccgagggcgtcccaataattcacgggctccattctgcccaagtcgacatcactgccccgtcatcacaggctttcagtctgttacagtggcaaaagcaattcagcctttttgatggtgcagagcttcaaccatttcaacaaataaaggggcagggtgtcatgttctggaaaagaagcatgcagctagatttaggcatttttgctcctcagaactacaaaaatgagtctgcacacaaccatccttccaaacttgactcatctttgcaaagtctccttttaagtacaaaaaaaatggcattgcccattaattttgaaaagatagcctttccgcgctacctacagaggggtccatacagcgtcgttctggattcccgtcgtaacttaaagggaaactttcacaatgtctggagcgcttgatgtcctgcaaatgaaggaggaggatgtccttaagttccttgtagcaggaacccacttaggtggcaccaatcttgacttccagatggaacagtacatctataaaaggaaaagtgatggcatctatatcataaatctgaagaggacctgggagaagcttctgctggcagctcgtgctattattgctattgaaaaccctgctgatgtcagtgttatatcctccaggaatactggccagagggctgtgctgaagtttgctgctgccactgaagccactccaattgctggtcacttcactcctggaaccttcactaaccagatccaggcagacttctgggagccaaggcttcttgtggttactgaccccagggctgaccaccagcctctcacggaggcatcttatgttaacctacctaccattgctctgtgtaacacagattctcctctgcgctatgtggacattgccattccatgcaacaaccagggagctcgctcagtgggtttgatgtggtggacgctggctcgggaagttctgcgcatgcgtggcaccatttctcgtgaacacctatgggaggtcatgcctgatctctacttctacagagatcctgaagagattgaaaaagaagagcaggctgctactgaaaaggcagtgaccaaggaggaatttcagggtgaatggactgctccagctcctgagttcactgctactaagcctgaggttgcagactggtctgaaggtgtacaggtgccctctgtgcctattcagtagttccctactgaagacaggagtgctcagcctgccatggaagactggtctgcagctcccactgctcaggccactgaatgggtaggagcaaccactgactggtcttaagctgttcttgcataggctcttaagcaacacggaaaaatgattggcggaaaataaacatcagtttcttaaaaaaaaaaaaaaaagaaaagaaaagataacaatgtccttctttgcaaggcttctgtgaattcagtcctttctcccagtttcacaggcaaataaggacagggactcagttgaggtgactaatcctcggagccacagccccccaattccaggggcttggaaatgctgggatcacaattaaaggctttgaacttccaccagacaccaccaccagagctcactccatccgcaaatgctatgtacattcttggccacaaaaacacttccaggacaaaaaaatgtttcagagttcagaactattcaatcccacatttgttctctatgaacaaacgatgcaggaagaaatggaagaagctgaatctctctgagggcacactttattttgccctgatgagaacttagtagcacctaagtgcttcccaatctgacaaggccatgctacacactccaaggactattgctgaagttggctgttcacctgcaaaa

SEQ ID NO: 9336 - DNA, 1714 bp, Homo sapiens
tggggtgtggttgtgccctgagcacgtgtgtaaaggactggggaggcgtgtcttgaaaaagcaactgcagaaattccttatgatgattgtgtgcaagttagttaacatgaaccttcatttgtaaattttttaaaatttcttttataatatgctttccgcagtcctaactatgctgcgttttataatagctttttcccttctgttctgttcatgtagcacagataagcattgcacttggtaccatgctttacctcatttcaagaaaatatgcttaacagagaggaaaaaaatgtggtttggccttgctgctgttttgatttatggaatttgaaaaagataattataatgcctgcaatgtgtcatatactcgcacaacttaaataggtcatttttgtctgtggcatttttactgtttgtgaaagtatgaaacagatttgttaactgaactcttaattatgtttttaaaatgtttgttatatttcttttcttttttcttttatattacgtgaagtgatgaaatttagaatgacctctaacactcctgtaattgtcttttaaaatactgatatttttatttgttaataatactttgccctcagaaagattctgataccctgccttgacaacatgaaacttgaggctgctttggttcatgaatccaggtgttcccccggcagtcggcttcttcagtcgctccctggaggcaggtgggcactgcagaggatcactggaatccagatcgagcgcagttcatgcacaaggccccgttgatttaaaatattggatcttgctctgttagggtgtctaatccctttacacaagattgaagccaccaaactgagaccttgatacctttttttaactgcatctgaaattatgttaagagtctttaacccatttgcattatctgcagaagagaaactcatgtcatgtttattacctatatggttgttttaattacatttgaataattatatttttccaaccactgattacttttcaggaatttaattatttccagataaatttctttattttatattgtacatgaaaagttttaaagatatgtttaagaccaagactattaaaatgatttttaaagttgttggagacgccaatagcaatatctaggaaatttgcattgagaccattgtattttccactagcagtgaaaatgatttttcacaactaacttgtaaatatattttaatcattacttctttttttctagtccatttttatttggacatcaaccacagacaatttaaattttatagatgcactaagaattcactgcagcagcaggttacatagcaaaaatgcaaaggtgaacaggaagtaaatttctggcttttctgctgtaaatagtgaaggaaaattactaaaatcaagtaaaactaatgcatattatttgattgacaataaaatatttaccatcacatgctgcagctgttttttaaggaacatgatgtcattcattcatacagtaatcatgctgcagaaatttgcagtctgcaccttatggatcacaattacctttagttgttttttttgtaataattgtagccaagtaaatctccaataaagttatcgtctgttcactttgtgtcctttcatcttttttcaattcaagtgggtaataacgtttaaatagtggtagcagaaatgatctttataatgtttcaattccatggtgaatcatatgaaaatgcat

SEQ ID NO: 9337 - DNA, 1119 bp, Homo sapiens
tattcttaattgcaaaggtaatgcttttctacatctggaatttcgttttattagtttgaaaatctttttgaaaatcaaattaccacattttcaaattttgtcagcaaaattgaagatctgtgtgatcagcatatgagtgctttcattgtgtgtcctaccagagttagacgacttagttgaagttttgcattgtggacattaattttaactttatatccatgttcaaagtccttaacttaaagcttcatactggataaaggtcattttataacttagaaaacgaacattcaaagaacatgttttactttgtttatatgattaaataacttattttatgttaattgaaaacaaatggccatgattttaaagttgccttttagtatttgtggttgtcatttgaaattatccataacccttgcttttattgagtttcaaacccttttaaaaacagcagctatgtttcccctccttccccattccccctcgtttcagacaaaagactgcatgctggcgaatggcaaactggatgaggattacgaggaggaggatgaggaggaggagagcctgatgtggagggctccgaaggaagaggctgactatgaagatgatttcctggagtatgatcaggaacatatcagatttatagataatatgttaatggggtcaggagcttttgtaaagaaaatctctctttctcctttttcaaccactgattctgcatatgaatggaaaatgcccaaaaaatcctccttaggtagtatgccattttcatcagattttgaggattttgactacagctcttgggatgcaatgtgctatctggatcctagcaaagctgttgaagaagatgactttgtggtggggttctggaatccatcagaagaaaactgtggtgttgacacgggaaagcagtccatttcttacgacttgcacactgagcagtgtattgctgacaaaagcatagcggactgtgtggaagccctgctgggctgctatttaaccagctgtggggagagggctgctcagcttttcctctgttcactggggctgaaggtgctcccggtaattaaaaggactgatcgggaaaaggccctgtgccctactcgggagaatttcaac

SEQ ID NO: 9338 - DNA, 1212 bp, Homo sapiens
taaaactcatttaccctttcaggcctcccacttctgattaattttctcatttaaaatacttttattcttaatagtccttttcttttctaacatctgctgggtaattggatttgatagttgtatttgtgaagtttcttttttccccctctgaaaacctcactgttccttaatattcacttggatgtgtctgtcctagtgagctgggtaggaacctagattagtttgaaaatgttcagccatgaactggcagaaccacgattactctaagtttagtcattcatgttattctaaagaagtattctgtgtatacaaaaataatgcttaaagaaagggtaaatgccatttcaacacgtatttacacaatacagctgtatatagcaggcattttattcctctgagttattctcgtataaagacgtagactgtggggttttttttgtaaatttattggaggacgattttagagaatagtgaaatttcctgatttaaaataaaatccaattttataaattttgtacttaggtaagaagtgcataacttttttttcaccatgtttctaggttgaactgcttgaagcagctctggatcataataccatcgtctgtttaaacactggctcagggaagacatttattgcagtactactcactaaagagctgtcctatcagatcaggggagacttcagcagaaatggaaaaaggacggtgttcttggtcaactctggtaataaaaaattattttatcaagttgtgcaggggaaattggatgggattttatgtttaaacagattttctgtgtttcttaagttaaattattgaagaaagtttgacagataatgtactcatttaatctcttctggcagaaattgttttgtcctatttctttttgctgtttctcttaaatgttctgcttctgtatttcttttgaatggattgcttttggaacataagtattggaacatatgtacattagaacataatctaagttgttacatttatttttttcttgatgttttagcttcaccaagtatgtcaaaaggtgcttaattatggataattaacgtttgtacttatgattttgctaatcagttgtattaataaagttacatgctgcttagaaattagatattcagttaagagtttaaaatactgatttttatatgcttggattatatataaaaataaaaaatataaaatgtgaacctaagctggt

SEQ ID NO: 9339 - DNA, 1120 bp, Homo sapiens
tgagagctgatggttttataaaagggaattcccctgcacacgttctcttgcctgtcgccatgtgagacgtgtcttgcttccccttcgccctccaccatgattgtgaggcctctccaaccatgtggaactgtgtgtccattaatcccctttccttttataaattactcagtctcaggtagtatctttgcagcaacatgagaacggactaatacacctacatcataggtttattgtgagaataaactgagttaatatttgtaagaagtttagaatagaggctgcatatggtaagtgctgtgtatgtgttaattaaatacacttttgcatgctgagtgtccctgagaatggcagggtaagtaagaaaaacaggctcatgcaaacacacacacacacacacacacacacacacacacacacacacacagagagagagagagaaccagaaaataacatatgttatcctccctggacacctcgctttaagttcataaattgcttccctccaggtaaaactggttagcattgatgcagcagaaatagcagatggcaacccttctttggttcttgggctgatatggaacataatcctcttcttccaggtaagatcatttcttttccaaaacacacaatcatgatcttgtgtctgctgagcagccacagaagagagtggggccagattaagggaggcagtgaggcttagtttatggcagattttatcttttctactcactgaaaaagcactagaagaatctggttgctaaagtgtttgagtctctgtgattttaaaagcggtgcaagttctctagaagagaatatctatcctcttgggtctggaagagttaaatatttacttcaaaaaataactttgttctaaagtgtcacaagaaccggggaatactcctgaccaaaactggaacttggtagagttactttcctgaaatcactcagtgttccttagaggtgattaaagagcttgcactaaagatgcctgaggaagaagaataacaggcgagaccttattgttctgttctttgcaacttcagcctctaactggaaatgcagatttgatagagggagaactggatctgtgattggaataagaagatgacattttattttt

SEQ ID NO: 9340 - DNA, 1231 bp, Homo sapiens
cccaggctggtctcgaactcctggcttcaagggatcctcctgcctcggcctcttaaagtgctgggattacaggcgtgagccaccgcccccggccgcctctgagtttccagcctcgttggccctccagccttttaacctgttgggcctaggatcaggaaaggtttgttgaatggggaactaagaagtgaattcgttcgttcgacaaacgtttcctgagcagccgctgggtgctaggcgcagtgccagcgcggaatgtccagggagacctggtgcccaaagcttggacccatcgtgagaaatgagaagcagatacaaagcagtgtgggagtgcagaggagacaaagcaagcctcatcaggcccattgcttgctctgctctcccttgtacttaccagtgcttgacaatatacagttatttactagcttggttattgacttcctacccagcactcagttttattcactgctgtatcctcagtgcctaggacgatgcttggaacgtggtaagtgctcctattggcgggaagaataaatccggaagagcaggaccagtggacttgctacataatctgtagtcttggagccgcacagggttggtggtaccctcgagcacaccagacttgcagaaaaagcatactccagaggaagctgaggcatgcctgctcgagagccagctgttccatgtgcaattttcctctgatagtttctggtcactgttgccacggtgataatgactgggctatgtcattatctatccgccaacagtaagagaagctttgcagtcgagatattgtttagcagatggagtgttttctgttgaacactaagtactgccacaagttacttttttttttttaaactttgagtatttttttacaatgttgctggaggtgatctgtttatgctttgagagtgttcgaatttaaaatcagaaaatcatgtcagtgagtgagtctttcaaataatccttcggcatgaaacctgagcctagtaaactatgaaagtaaactcggcacattacccgaaagtctcaatgtcatattttcacccccatcaatattattgatgattgctcattttctaatgtgggacctgaaatttaccaggtgcttaaagaatctttttgtttttcagattcattgattccaggtaaatcagaggaacaagcaacatgaacagaaatatgtagaaaaagctattatgcagaagcataattgttgtttcagaagtcc

SEQ ID NO: 9341 - DNA, 1231 bp, Homo sapiens; identical to SEQ ID NO: 9340

SEQ ID NO: 9342 - DNA, 1362 bp, Homo sapiens
gagtcagggcctaaccactggtctctttgacacaaaaactcatgctcttagtggcaagcacagtgttctcaagattgggggaagccagggagggacagtgggttgtctgctactagtgggtcaaaattacatatttagtcatgaatggttcagcttttaccatttaaataacaaataaatgttctttctccataggcattaaagactattccaactggcccaccatcccgcaagtgtacctcaatggcgagtttgtagggggctgtgacattcttctgcagatgcaccagaatggggacttggtggaagaactgaaaaagctggggatccactccgcccttttagatgaaaagaaagaccaagactccaagtgagggcggccaagtcctcgctgagcagagagggagccgttcatgtcagagactcactgccagaaaagccttacccattttggttttcactattgagaccgcaactgcttgcactgatcattttggttcgtgagcagttggtgattttagttggtctggtgttcgggctaagaatattttattgtggacttaattacaaccactgcactgtaatgattcaatgctgtattatgatattgctgtaaacaaaattcattcttatattgtcacttattctttgcctgattcagaagttaaataggagctttggaatcattattcatgacccctctgcaaatgtgtcagtctccaaagagagtatctccccccaaattttgtgtagcttcttttgttatggaaaatggtgaacaaaaaaagaaactgtgataactggggcgttgttttttaaaataaactccagcacagggatgctgtgcatgcctgagttgattccgaagtgcatatgtctgtaaggatttggagtgcctgcagtgttttatgtgtgggaagtaagggtgagtctcatattcttctattaaatttgccacaagaattgccgtcgagccctggtctactttctgggggaagcagctgtttggatggtgagtcaactgtgcagctggaggcgtgggtgggctggagggagcagaggtgggtgaggccggaggaggcggccccacctgcctatctctggagccctgtgcttggcacactgctacagttagatagggagacatcgtcaacagtccaccgagctaggggatttaatgagtattttacttcttaaaaagtggggactttctaaaagaggacataatttggaattgtggcagagattctcccagtgtctggtgtctttataagacctttccatgagttctgcatcccgagactggggcctggtagagcctggggctgtgcagaggcccatgggaaggaagcccgcctggtg

SEQ ID NO: 9343 - DNA, 1108 bp, Homo sapiens
tttttttttttttttttttagtagagacggggtttcaccgtgttagccaggatggtctcgatctcctgacctcatgatctgcccgcctcggcctcccaaagtgctgggattacaggcatgagccaccacgtccggccttaccattgctttattaaataagcactggtgcttgattatatcagctgagccagatattagatacgctattgagttttgaggaaataagagtacaaaactcagaaatgagttgaagtatagtgacatcttcagattacagacccaggtgtcagaatttgccttggctcagaaggcctctgggggccatccctgaccactaggcttcccacttagacctgctccagcagcaccacccctcgccactgcctggtcctttccttcacccttgattctgtcttcttttgtccttctccaggtcttggcagcacctgtctcctttcaccccagggcctgagcctggccagcctacaatggggatgttgtgtttctgttcaccttcgtttactatgcctgtgtcttctccaccacgctggggtctgggaggaatggacagacagaggatgagctctacccagggcctgcaggacctgcctgtagcccactctgctcgccttagcactaccactcctgccaaggaggattccatttggcagagcttcttccaggtgcccagctatacctgtgcctcggcttttctcagctggatgatggtcttcagcctctttctgtcccttctgtccctcacagcactagtatttcatgttgcacacccactcagctccgtgaacttgtgagaacacagccgattcacctgagcaggacctctgaaaccctggaccagtggtctcacatggtgctacgcctgcatgtaaacacgcctgcaaacgctgcctgccggtaaacacgcctgcaaacgctgcctgcccgtaaacacgcctgcaaacgctgcctgcccacacaggttcacgtgcagctcaaggaaaggcctgaaaggagcccttatctgtgctcaggactcagaagcctctgggtcagtggtccacatcccgggacgcagcaggaggccaggccggcgagccctgtggatgag

SEQ ID NO: 9344 - DNA, 1192 bp, Homo sapiens
agggttctcaatttgatttaacgaagtataattagggtcatctctcatatttcatatactatgctaggtactaaaagtacgattacatattagttagaaactttttggttgaaatggacacaaaacatactggcttatatggaaaaaaaaaggtaataacgtcgggtaatttactaggtcaagaaccaaacttgtaggattccagctgggagtcaggttcaattggaaagagaacctgcaacaccctcaaatctttattttttctactttattcctttattccaaaatgacttttacccagaaggtgtgtggcagacagagtttcaggtgccccccaattatcccagcctcttagcactcacaaccttatacaattccctatccttaagtatgggcatgacttgagagttacctctcaccaataaatatggcaaaggtaaaatgacgtcacttctgtgattacgttacctaagactgtaacatgtttcttgctaacgtgttttttcttgctggcttggatgaagccagtgggcctgttggggaggccccagtgacaaggaactaggggcagcagcctctagccaacagtcatgtaggaactgaaggtagcctctggccaacaccagccaacaacaaactcagaccttcgggcccatgggcaacagcatccggttctgtcaacagccgtgtgaacttggaaagggatccttccccagctgagccttgagatgagacaggggcatcagttcccaccttgattacagctttcataagaggccctgctgcagaggatccagcaaagctgtactcagatttgtgacccacagaaactgtgagatagcaaatgtatgttttttaagccactgagtttgtggtaatttgttatataatagataaataacatgaagggcatggccactaaaatccctgcacctgaatctcaagctttggaacctgggcagagctgaaaacaagtttttctcctttcctgttgaaaattcctaatgaagagctttgatcatcccagcttgtgtcaggtatccacactactaaccactgaggccagggaggtggaaattggcaggaggcagcagcctttattcaggctgattgaattggatagaacatttcccatgacaagagaaaaagtgcaattatggtcaggccaaacagtagttgcccaccgcaaatg

SEQ ID NO: 9345 - DNA, 1410 bp, Homo sapiens
aaaagcattttttagttaaataatttaacatcaaaacaacatgcaaccaaaaacttctgacatttatagttgatacttgcctatagaaatgtttggtggctggtgtcaaaggtccttaaagcatttgctgccaagttagtggaaggctcacttttgttaagatgactgtaattctccttgttaccgacgagagatcattggaagctgccttctaacactttgtgtagctctgtggagttggattttcttaaggtttaaaaagaatcacagcttcggaacttttaactgaaaatgagagacagaagccacaggggaagcaaagcaaataggattttcaatataaatatcagtgtggaaaaataacctattctgttgaatttagtgttcatgcacttgagaacaacattatttccatttactccgaaaatccttctgtgggggtttgagaaagtgaatgttgcagacatgttctgttgtgttgcactttatcctgtgtttatgtgtatgtgtttttagattaattcaagttgtgtgctatatttcttgtataatttacaaagttacacaaaatataaagagcagtaaacttgtctgaaagtttttggcaaaggaaggtaacttcaatgtaatagcttcctttaagagtacaggaaaatgcattctgtaatgaagtggggcccatgtaattgtttatattttcagttttaagcaggtatagtgcaggcttgttaggaatgtgtggaagggaagattggaagtgatttttcctcttttaaaagtaaacaaaattcttcaaatatgccctagttaactatttcagcataccatttttacttggttaacagtgtacattttgataacctatcaggaatgaataaagtatttttatttaaaggtgatattgttttatgcttccatgaatattttgcttttcttagagcatattcatagatgcagtactgtgatttaccacaagataattgggaacactttctcaaaatcgattttggttaatatcaggtaaatcattacctaggagtaagagggaaattgttgtcaattcctgactttagattgatccagcagaaagaaaaggtggaactttgtatatatccactgttgaaagttgcatgacctgacttcctgttttctaaagttgggggaatattattgaacttcaatttcagaactgcatttcaatttggggcttggaaaatgtagttaaatcaatttcgttctctaaattttctaagcaggaaagcaatgtaaaccaaaaatcaaaatgtttagaatttataaaaatggggttatatagcttttaattttagtttcctttttactgccaaaaaacttaaaaagacaacagcgtaaccacctgtttaagcaccgtgggaccatctcttattcggg

SEQ ID NO: 9346 - DNA, 1199 bp, Homo sapiens
ccccagtgtggcgtcacttccgccagcgcccggcggcgcgccgggagtctgggtctcgtgaacgcgccaggagcgtccctacagccgggaacgcgcctcgcggatgacaacaaattcgtcgcgcggcggcagtggcggtggctgcctcagcccctgccgcctcctctcgcgctctcttgcactctctccgagccggttgggaccctcctcggaagtcccctggcctggggccaggaggacccctctgcgtcttgcctccgccaggcccagcgcgagcggtgcggcgccggcgatggggtctccctgagggactcccggcaccaaatagggatggaggggccgccccaggcttaggccccgccgcggcctggagccggagtcgctaccccgaggccggagccgtcgcaacccgcagccgcagtcagcccagctgccagcagtcactatgccttggccgttttcggagtccatcaagaagagggcctgccggtacctcctgcagaggtacctgggccactttctgcaggagaagctgagcctggagcagctcagcctggacctgtaccaaggcaccgggtccctcgcccaggtccccttggacaaatgggtaagagctgccggcggcgagccgggcggggctcgctcccctctttagggcgctttgaaccagtgccatccaagattggtgacagtcagtccctccttgggaattgtttggacccgagtgtgacacggctcagagaaatgtgttagagtgttgtttaatctgtttctaacaagtttgctctcctaaatcacgtgttccggaaactttaacagatgtaatggaatctacactgtgggaataattgagtcagtgcttcgggggtctgtgaagcaggctcaataggtccgtgggaggaggtgaccagaactgtccctcgggatgtgaggggccgcagggttttgtggcaaacaaaccctgccttgtgggatgacattctggaaggattaaggatgaagaggacctttggatgtcagaatccctagttatttgttttgggttggctgcttgcgcaccatgtttgccttgtttgtcatcgtgcagcgtttgccatctggaagaaagttaggtgaaggcctcttgtgccggtttgcctgcttttgcttgattatatgtttacaagataggtttgtgtatccagcctgtgaatggtcgt

SEQ ID NO: 9347 - DNA, 1171 bp, Homo sapiens
tttttgctatttgcttcattatctatgaacttcgttcattgtaagccagatgccaggtttcatttggggaatgtcttatattggtaaagtagcatttctgtagcgtgtttatcaatgtttaagaaacagattttggcttcttttcaagaggtgaaatttctcagaagtttactatattctgaattagtgttttctctagcaatgtatttggtctggattctaacttagatgtttaagtagtgacagttaaaatccttggggcaggattttctctttggtcacttgcttttggtcactttttgtcaaaaattttgggggtattgcagggaaccaatcatgtttagaaatgtgtgttactaaattagtttttctggtcttactgatttgtttcaaattgtagaattcttttggcagtaattgtatccaattttgtttatagtccagttacaacacagggatcacaacaaacacaaccgccacagaagcactatggcattacttctcctatcagcttagcagcccccaaggagactgactgcgtacttacacagaaactaattgagacattgaaaccctttggggtttttgaagaggaagaggaactgcagcgcaggtaaatagatattctatatttttttaactcggaaacttttattaatgttgacataaactaattttgaggcattctctacttacttagaagaccagggttatttgcccagatctatatatctgttttggagaagagggatacttaagagagaaaactttttgtttttgagacggagtcttgctcgttacccaggctggagtgcaatggtgtgatcttggctcaccacagcctccgcctcctgggttcaagcgattctcctgcctcagcctctcgagtagctgggattataggtacccgccaccacgcccggctaattttttgtatttttagtagaggtggggtttcaccatgttgggcaggctggtctcgaactcctgagccttggtctcccaaagtgttgggattacaggcgtgagccaccgtacctggctgaaaacttttattttctacatagagttctcttcccttaattttgatgttatttatttttttttctgaagaattaattttgattttttatgcttttggttattatagtactgaattgtctggagaaaa

SEQ ID NO: 9348 - DNA, 1101 bp, Homo sapiens
atcaagcactgaattaatgacaaatattttaccattgtctacttctttggattcttctgcttgaagtttattttgtaggtcccatttaggggcctggtagagaacctataagcaccaaatacgtagtacatagaggaaaactatttttgttttaccaatgaacatggctatgactaatgacatcaagatgttgggtgtatgtttgaataattccctctccaccatgaaagtacttgctgagccatctttctttgggctcccagtttacttgggccactataaatagaggatgctgcaggatcaaaatataccacatcaattaaaatcatgtttgtcctccattgactggtaattttaagtaaggggtggaacatttttagaagctcaccagtatgttaaacagattctcaacatcaaatactaccatgataggatgcaaaataattttcttgtaatattaattagtggttgatgggcttaattttttttaggtgctgatattgatgcgttgtgtgttgcaccaagacatgttgatcgaagtgactttttcacctcattctatgataagttgaaattacaggaagaagtaaaagatttaagagtgcgtaaatgttcggggtgaaatgggatgagttatgaacattcatttagtcagttgagtgaattttatgatatagccatcatttattgagttcttgcaatttgccaaacctttctaaacacttggcatatgtgtttgtgttttattctttacagcaagcctaaaattataaactcatttacagattaggaaattgaggcaaacaaaataaatatgaaataatctggccacaatcatacatctgatgagtgggtgaagtaaaatatttgaaccttgatttctgatctgtctgatcgaacagcccagtcttaaagctagctatttttgtgtcaggtgttttgctaaagtactaaaactagtagaggcttaaaatgtagtttcagagaccctgaacttgtttactttccttataggctgttgaagaggcattcgtaccagttattaaactctgttttgatgggatagaggtaaggtatagttcaaattgacagttcttgcta

SEQ ID NO: 9349 - DNA, 1094 bp, Homo sapiens
ttttttcattgatttgtgaaccttcattttgttgaataatttttttcttgaatcctttcacatgaatgaaccctaacatctagctcaaattctgacacaaagtagatatattctttaatagatgataaaactggttaatgtctacaaagtaactgagataacaactgctgctgtactgatatgatactatgtactatgatgatattttgctgctcctgtgcagctccgagttattttaacgtgatcatttaaacatgtgcttttgctagatgttaacttttattgactctaaagatatataaatattatgtttagtttctgaaataccttttccataatctaataaaactttagggggagtaactaacatcaggaagtatgcttaatattgatacgtggacaaacttgtttatcagtcttaaactgtcctgtgattgtgattgcatgttttttggtttgccacatactctcgggacttattttcatagttttgtcttactgaatttatccctatagtaattagtacccatgggtatttgccttttagatatttttatgagtgagtagaattttctttctaatgaaaggattcatagagccatagagagaaaaatcacccagttatgtaagaagaatgattatgttgatttaaaaaaaaattcattcctatctttggtaatgttaggggcgtacttatttctggggaggtgataatattgtggctatacctaataaagagttcttattgttttgagataaatctggaaatatttatagatgaaatgataagatctctaggatttgcttcagaataacacaaggtgaattgaaagtgggaggacagtggctttgatttgataattgatgaagctgggtaatgaatacatggggatgcattatacagtgctctctactttgtgtatgtttggaattttccataataaaacttttaaagatccatctctgtatttttttagtgttaaagaacgcttgtgatttaatctaattaatatgaaaataatctacctaaaatttaggatgattaaattattgcttagctgtatatatttgtttaatttacagtgtcagaaaat

SEQ ID NO: 9350 - DNA, 2741 bp, Homo sapiens
aatacttttcttcttagaaggtttcttaggaagtaaagcaatggaaaatacatctcattgttaaattatggtgctttgaacaatgttgtgttctttgctttcattctcagaaaacatccagtacagacctttctgatatccctgctctccctgcaaatcctattcctgttatcaagaattcaataaaactgagattgaatcggtaaaaacaacctcaggggtccataaacaatatctgccaactcaacctgttgtcttcaaatgctaaaaaaggagaatggagggtacaagactagacatgactgaaatggatttgggttttttggtgacctcccttactgggctaatcagcacttgatcggaagtccaggttagtatgtgaagccaggagtactattattattgtgttagcaacagttgcattaactatttcaaaaattactgcctttaaaaaaaacaacctcaagctatatttgtattcataattgacatctggattgggtttatgtttgatgcattgtttggaaaatttgcaatacaaactggcataagaattacttattctgatgatgcacttttatgtatttttcattagaaagtagaactaattttagattttcagcttgatggattttcagtttttcctgaagaattttctttaccattagtcttcaaattggatactgttgtgcagtggtgtactgttatacttcagagaaagggtaagagtacatctagttcagttcctatgaggtagctgtaacccttaaaaatgaaacgtcaactctagggtacatttgacattgaaagaatagttaggaaataacttggttttgatagggtcatgattaagaaatgatatattggttttatttatggaattgttttatagtgcatacaaatcagcgatcagccagcaaatatttttctttgagcttgtgaaagctctgtgttcttttgccttcaatctgttgtcttcaaaacaaacaaacaaaaaaagcttcttgcgcctttccctcccctgttttcttcctttttctttttgcttgtatgcacaaggtaggacttacttcgtaagaaacaaaatgccagtattttcttaagccatgatgtgaaaccaatgaccctgtgaccacatggcacagaacactaaattttggtcccatggctgaaacttgagggtgactaaaagtaatgcctgtgaaacatgatatctatctgggatggccatttgatctctaaaaggaattttgtacactccacagaactcctatctatagtaaaattgattttcagttttaaatgtgggcaaaaaggcattttctccaagattttaaaactaattcttatttttaaatggtttaccaaaatttgtcagtacattttacgtgtagaagcattttaaaaatcatttctagcaagcacttgacatctagtcagctctctactcctttattttgttttatcaaaagattaagagctcctttctttgaataaaataatttctcataattaagcagtagaagatctatcttcacaaagtatgagggatgccagatgttgataaacttactctttctgaatctggacaaagtcgacttaacagatttttctgatgagcatgttttatgaatcctccattgtgctccattctatcacatgtgcatttttcatgttaaactgcaattacttaatctcttcccctatccttctaaattaattttctgaagttggagtgtagtcttttcccccttaggctatgcattaatcgaagctttcttttcaccatgactttataatgtctagtaaacaatatttctacttcccacatctttgctttacacagtcaccttgcccttccttccaccaccgaagaaaaaagatggtcatactaacaggtgaaatgtacaaggtgtctgtgtgttttgtgtagcttcagagttagattgaaattaccaggcacagatttagtcttgtcattttgtttacacattggggaaaacaattcagtttattaaacgtttcatgtaactgcacccaagttttgccaagctggaaacttggaccttttctgtgtagtgactttttaattatagttttcataacctggagatcagactgttgctttcgcatgatgtatgtagtgtctcatgactggagtttgctttgttttatagtatctgtactccttgtatttttcaagagctattttgtaaacagatgatgtatttctccattgaaaacacaataaaaaaaaaacagcacaatctcacagttgcctgatttcttttgactactacttttttccagtaatcataagtttatagtatgattctaagtgaggatttgcaaaagaatttggttacattagaaaagatttgtttctggttaacttcagccattggcagcagccttgtatttatagctcagataataattaggtgtttgtttttcatataattgatctttagggaggaaaacattaatatagttactattaattcaattttagctcttccgtcctctaaagtgttctgtgtctgtagacaccatacgttatctgtatatttattctatgcctgtggacagtgtactgtccttttcaaagcatttagcactttaatgtcagcaggtggcactgttgtttttcagtgaatttagaattacagaccacaaccaacaggattctatgtttcttattttactaaatgcaaatcagatattgcttttcttaacccccc

SEQ ID NO: 9351 - DNA, 1207 bp, Homo sapiens
tacaatgaaaggcatacttctgaagcgtacgttttgatgtgagtgtctggtcatgcgaccacctgcccagtcaagtgttagaacctcccgtcaccccaaaaagttccctcatgtccccatccccagccgttgtgccctctgtctctatagttttgctggtttagacttcttgtaattaattttgctcttgttttccaggaagataaatccgtcttgaaaaaccacgatctttctgttcgtgcaaaaatggccatcaaattgcgcttaggtgagaaagagattttggaaaaagcagtaaagagtgcagctgtcaaccgggaatactatcgccaacagatggaggaaaaggctccgcttcccaaatatgaagagagtaaccttgggctgttggagagcagcgtgggggactcgaggctccccctggtcttgagaaacctcgaggaggaggctggagtgcaggatgccttgaacatcagagaggcaatcagcaaagcaaaggccacagaaaacgggcttgtaaacggtgaaaactctatccctaatgggaccaggtccgaaaatgaaagtctcaatcaagaaagtaaaagagcagttgaagacgccaaaggatcttcttcagacagcactgctggagttaaggagtagctcgaggtgaagctggatgggggatccagtggagcaggagttgacggacagtccgttcacatcgctgtgtttccttgttaacatttttctttctgcagagaggaagatatgtttttgctgctttatataaaaatggtttttttaagttattttaaaaatctagcttccctttttgattaagattgccatcttgcttttaggcaaaacaaaccaattaacaaacaaccacaagaaagggagaagaggtgcctgtgggagattttgcagacctattgtgggtataggtattttcttcctggggaagaattcagttcccgtctcagctgtacttttgtgggcctgtcatcttgatgaccagaatgaaagcttgctctgcctcctgccagccagaattggtggcgggacttggggatacagcgtgaaggtggggaagttgcacagcagaaaacagaattgaagttgggaaactctagagtctgggcaaaatgtttggttttttctcttaaaaaaaataacaccccattaccaaaagaaaaggtaaggtggcaaccttatttttaat

SEQ ID NO: 9352 - DNA, 1687 bp, Homo sapiens
taaagataagtatgtagaggaaggaatgttactctggcttcaaaactcagtagtagtagtaattcacatcgacagattagggtttttgttggaggcaggaattttgttttgatttggtctggttttagaacttaaaagtacagtaaagtatacagtaaacgcctttatgctctactccaaatgttatatttgcttcaggttaaagttgaaagtcccttttttgattatttgcttctcagcatatgtagtttttagtttttctgttggaaacaggattttaagctatacttctactcatttaactataagataaatgcttacattttaaaatgtatttgaatatttatttgaagtgctgatatgcagccttaagttgtacttcatgtgtgattggatttctgaccgtagatatggttggattgaagactgtaccgtgttttgatgattctcctattattatttttttccctaggcagaagaattgtttttatgggttccacgaaaattgctaatgactgttgaatctgctaaaaattcagtgttgggtgagaataatttctgactcttcaaggcaaagcacaaatgacaaaaatatgtaaaattccattttatggcactaaggataatacttggtttttctcgactggcgaaatattccctcaaatatgcattaagtgtttttcatttaatgttataaaaaagatgcacatgacctttatttattattattattatttttgagatagggtctcgctttgtcacctaggctggagtacactggcaccatcatagctcactacagccttgatctcccaggctcaaatgattctcccacaggtgtgcaccactacatctggctaattttttttttttttttttttttgtagtgatggggttttgctatattgcccaggctggtctcaaagtcctgagctcaagcaatcctcccaccttgacctcccaaagtgctaggattacaggtgtgagccactgcgcccagcctgtacctgactttaaatgttacaagaccttttagtttttctgtaatttgtaaacgtatatttaaatgaagtttttaagaagtttgtggaacttacgctgttaacttctgggttaattcagggcccttatattctcaagaccgaatccttcaagccatgggaaacatcgcactggcctttcatttgctgtgtgagcgagccagccctaactccttctggcagccctatattcaaaccctccccagtgaatatgacactcctctctactttgaagaagatgaagttcggtatcttcagtccacacaagctatacatgatgtcttcagccagtataaaaacacagctcgacagtacgcctacttctataaagtcatccaggtgagcagctgtttgcaatttaagtatatatttcacagagtggggaggaaagaggaattgagtccataaatattccatttgatgtcttattaaggatacttaaacattttactttttaaattgaaaatataaaatacatttcatcgtttgtttttacagaaatatcaatgaaatgcggttacatatatatatctgatttcatcagtgcccagtgttaatacaagcagcagttgttcctgagttattgaaatcaccaagtttttttgtaaacaaaagatcacaatgaaattttaaaagccttaaagcat

SEQ ID NO: 9353 - DNA, 5488 bp, Homo sapiens
gttatggttaatgggaaatgattattttaaggcaaagtggggagagaatatataggtctttatgcccatatgtgtatgatgtatgcatgggttttatctctctagtatcctggaatatgttagtctgcacagtgaaatctatgtaattaaaaaaaaatctagagtaaaatttgctctactatagtttttgtaggtgaaaaagaacgaacttttcttccagagactacaaagcagatttttttttttcccatttgagaacctctagatactaatactacacatttctttttctggaagaaaacttcatgtaaggtaagatcttagcctctgaagactaagacactgccatgtgttggacatgttttattacttgattttgttctttggtaatgtaatttttttctcttttctttctcttctctgtagtcagaaaaatgggtaagaagagtcgagtaaaaactcagaaatctggcactggtgctacagcaactgtgtcaccaaaggaaatcttgaacctgaccagtgagctgctgcagagtaagtcctcctctgggctctccctgccttgatgtggtggctgtgcctttttcttctttgtcaccagaatggggacgcgtgcatcagacaagctggtattcaggtccaagcttattagctgtgggcctgggcgagtcacagaggttcccaggcttgcagtcctcacctgtgaggatggaaacacccgtcagaactgtgtggctgttaacaaggcttgggtgaagtaattgtgagcttccatggcacagtcacctggaacatggtcttccctgaggacctgtgggcgagaagaagctctactgctttttcacagtgtgccgctcggcagattactgaacccttccgaaactcagtgttcttgtcgtaaacatagataataactgtctcagggaatgagccaagggccttgtgagatgtggtgtgtgaaggtacttcacgggctgttggcccaggggagtccagcgtgcctcttggagacctggccttcagagctctgcccctcactggaatggctcgcctttctttttggtgattcaattaacagtgcttctgattttttttcttttttaaacagggtcccgctctctcacccaggctggagtgccatggcactatgacgactcactgcagccttgacctcctgggctcaagtgatcttcccacttcattctcctgagtagctgggactacaggcctgtgtcaccacgcccagctaatttttttgtagaggtgaggttttgccatgttgcccaggctggtcttgaactcttgggctcgagagatcctcccacctctgcctaccaaagtgctgggattataggcgtgagccactgcacctggctgtgtatctgatttttacatgctgtagtttgagagttcttagtttaaggaagtgaaatatctattaagtgcctctacttgttttagcaagttagtgtaatttggtaactttttaaaattatgaatttgaattggtgcaattagtgccttggctgtagctgtggtcactccgttgccctttgtccatgtttagattatgtggcaggctaaacctcaagtaaaaatgcagctttccctttgagacagaaagcaggccgcagccaagttggagtcaggtccctctcgagtgctgccctggaccctactggccggtggagtgtggctgtcctgcccattcctcgctgagctcccctgcctctggcagcttgaggacaggctcgctgctgcttcatctttgaggcctgttccaggcctcagtgagtgcttattgttggagaatgaagtaagactggctacccttcatagttaagactcagcgtgtgtctagttattgttagttatttgccacatatactcttttaatagagagcaaaggggccccaaaggttaagcaggagtgtgggaaggggctgtctaaaccaatgcagttgtgtgaaaagaaagagctgccaataggcggggtgcccagtgtgcagtctttcaaactcacacctcagcctcgggtgttggtcttttggttctggccccacagtggaatcttggcttcttttttagcagtgactatgccatctcattttgcaactcccccagactgctgaatatagtgccgtacacatggatgtgaaatgtttgtcgactaattgtccttatgtccaatttaactggttcccttagggaatcagtgttatggggtttaactaaaaagaaaggttgacttttactattaacttttactattaacttctttttgccatatagaagagttttggggggatagtttgcattttagcttagctttttatcatagattttcctgttagtaagtatattctaaaaagagttaactaagaataaggtggatgtgagctaggtgcttgctcagtgctctctcttgggtacgttaagtgggggatgtttttatgatgccccagggtttgtctgctttgagaagtgtacctgccttgtacttctcacattcattatcatggctgtcatatgtctgtcttttaaaaataaaccaaccccagaacagcaacaacaaagtccaaatcctctttcttgtgcagactagtaggttaagttgaaagagagaagtgtttcagtaccatgcctcttatgttacagaatgcagcagtccggcgcctggcccaggaaaagagtgggaagagtatgtgcagatccggactctggttgagaaaatacggaaaaagcaaaaaggtaaaattgctagaatgataactgtattttaataatgtcatgtagaaacttgattaggtcaaagggttgacgagtagtaaaggtctcagcatcattggtgtcactctgaaaggtcttgtactggggcttgcagaccgggagagagagcagttagcgggatttctcccctttctgagatgctattacctgcttcggaaagggtgagaatgttgagctttaggagaataaaatgtttgtatctgggtgctaaaatgatacaattttatttatttacattttataaagtattataccgttatttccttttgagtttcaggacagtgcatatagtgtatatcgtcaataacaaataaatgctgattggttaatgcattagcaaggtttataatgaactcacacacatctcagttaaataagaggtgtggtcatattccttaagctgtgtttttacaggacgtatgcagtcgccattgtaatgattctcatccaggctggcgtggggctaagtgtgagtttgaaaaagctcattcactatacctattgtttttgttctgtaaagcacaaaaagtaaagattattatgcaggaccacatggaaggtagaagcagaaaacatcctaaggagcatgcattggaatgtggggccctttcttattgtcatgaagggcctcaggagagggtttgttttttatttgctctctttaagtagtggttttattgctcttccatacacatctctaaacatgtagtcttcagtttagatggtctcagactccaaaatggtgagttcataatgggtgttttcaaacaggttccttcataatgggtttatttgcactaaataggagtctgtgctaatcctttgtcaccaagtgggtagcgccttagtttctcttctgcgtagatactgtttactatacctgacactgagggtaaagcatttgccagttctcaaggagtgaataggaagttccgtctttgaatattcctcattctggtcattttcgccatttagcaggtatcttcgcatatccagcatgccctcttcacatatcaggttgactgttaattatgctgtggtaagatggccacaggcgcctgagctatgtgccacacccagcttcctcatagtaaagttcctgttcccctccttttattcatccaaacagaatagttttttctatgcatgtcttttcatctttttgactacataggacatgctgaaaagttcagaaattaatataacagatgtccaagaatctgctaccccagctgagcacatgtcaaagttgtattctcattgtcctttcttttattctcacccactgatcagctttcctttcccttcctcagcccttggttttgtttttgtatttgtttttaagaaataaaacatcacagatacagccaaagcctcacattttcatccccttccattccctccctccttgcagggtgttcatcttcactgtgaatgttttctacttcataaataaccccataaaaatatatggttgtaattgatatttgaaaaatttacataaatggtgtcatattacgtgattttttaaaagccactgtggtacatttagtgttatacttatgttgatacacatagctctagctcatttaaattgccttacagccttctggcttacagctctacagttttgtgttcttagaatcagggctgtggggctcatcctttcccatgtctccttgtgcacatacgcgagctactcatttttgttttaatggaaattttgttaaagcaaatgtgaacatgagaggtggcatgtttgacttttaaggagaaaactgctctgtaaatcatagtagtggtaatagaagctctctgccctttgccatcgtattacctaatagtacctaatagtcaatatttatattacctagtgtcagtatatatttcactgtaactgacagggagtttaggattttaattcttcttccctgtcaccagttaaggtatgtactgtgaccatctggtgattagttttgatttcaagattggcgtgttaagactatttccagtgttagttatggcctgtttttattttctgagagacgtgtgaatgatatgtgtcctaaaagtagctcttgttttctaaaacgtggattaatataggtctgtccgttacttttgatggaaaaagagaagattactttcctgatctaatgaaatgggcctctgaaaatggggcttctgtcgagggttttgaaatggttaacttcaaagaagagggctttggtttgagagcaacaagagatatcaaggtgagtttataaaatgttggtctcaaggggtctatgtgtttgaactgtggtgtgctgtagagggcgcagggtgaagaggtagacgtgtggtgggggagttctagttctgagcctgtgggcagataggcagcctggaagggccttgggctcatgttctaagcagctcctcccaccttatcctcctggggagccaagttgctaatcagtgactggggcaagtcagttcacatttctgagcctctgttaggagaccatagaacatgcctcacaggattttgagatttacctaaagataaggaggtggactcatggtttggattttgtaacttactggaggtgagtgggtggaggactggcggtgtgggtatgcctactagtgtctgaaatggatgactatgaggctgaaggtactaggagctcactgaaatggcaataccagt

SEQ ID NO: 9354 - DNA, 1310 bp, Homo sapiens
ccccacccccacgcctcccgcctacccacgcagtcccccctcatcctcctccagggttgggcctgccgccagccagctacccacctcctgccgtcccccctggaggacagcctcctgtgcccccgcccattcccccacccggcatgcctccagttggggggctggggcgggcagcctggatgagataacgtgagccttttttccctctttgtttttttaacaagattttctaatcgacttgcagagtagttgaagtgggtaagcagcagggtaccttgtataatgcacgacagttgcagtatgggaagaatggaccgggcccctgggataaaatcagagtggtcctcacacctagaggacggggacaaccagctttcagagtagcctcatcagtgcccttgcagtctgactgtgtacacttggttcagctaatgtctgagagtcctgcactgggttactttatactagtgaggacgttaaccagccatattggctcaataaatagcttcggtaaggagttaatttccttctagaaatcagtgcctatttttcctggaaactcaattttaaatagtccaattccatctgaagccaagctgttgtcattttcattcggtgacattctctcccatgacacccagaaggggcagaagaaccacatttttcatttatagatgtttgcatcctttgtattaaaattattttgaaggggttgcctcattggatggctttttttttttcctccagggagaaggggagaaatgtacttggaaattaatgtatgtttacatctctttgcaaattcctgtacatagagatatattttttaagtgtgaatgtaacaacatactgtgaattccatcttggttacaaatgagactccttcagtcagttatccaaataaaagcagttctgaaactatccctttctttgttatgggtggaaggtggggctccaggccttcgcagtctgtggcttataaaatgtgcagaggccctccttccagaccctggggacgcgggagaggcctggctgcagctcacagcagccacagccaaccccactgcctcccaaggcactctgggtggatccgcacagctgcctgccaagccagcctgcccccatcctgtgcctgccttggtttcctttggaggacctggttgagttccaaaccagtttgaaactttgaagccttgctgcgtagaacgcacacaggaacccgggggcttggatttgaaaccctttccacttctggcctgtgatgagacagaggcagctggaggagcagcggcctcactgtccaccttgag

SEQ ID NO: 9355 - DNA, 2909 bp, Homo sapiens
tggcctggccccaggccccccaagcactgggtccccggcatgtggacaaggccactcaccacatctgtggctggctggaggctgccctgggcccttcctgtgaccctcagccttggaggtcagggtgccctcacacctggggatctgtgctcagccacccgatgcccgctgctccttgcttttggaggtcatccccctcccccccagtctctgcaatgtccccctgccaccctgtccaggctatgcccttcttgggctcctcctgccccatgcctgaggcacgtcccttttcgtggtttacatgacaggccagtaacaggaagggcctggggagagtttctgggctgagccacatgtgattttcctgatgggcagcactgggccacagctggggctctggttggctgtgacctcccccagggcctggctgcatcttgggtccctgtggacagagctgtgtaggctgcagatgagagttctgttctttttgggaaggagcgtgtctggccaggttctgcctttagtttgtggtgtgacctttagcagttcactcagcctgtctgggctcttggtggaaacaggtctctgaggttccttttcggccatgcttatggctccaggtcatccagcgccacagggcaggggtcctcactgagggggcgtgagccaacagccgacggctgagggcgggccgggtggagctgagttctgctgccttgcagtcgctgcgggtggagagttgcctccccactctgagcccgtgtcctcagtagtaaaatgggcagcataaggccctcctcacaggattctggcatcaagtgagatcttcagtgtaaatgaccatgtataaactgtaaagtgcaatagaaaactgtgtgtgtgaggaaagtaaggcctagagggggtgatgtgtggcacatgacagggattttgatcccacagctgcagcacggggacaggccgcttccccacatccgctcatgccactgtaagcagccctagctcttgggtccaggacctcaccaggtcctcgtcagactcctgtgctcttccaggggctgctcagccccacctgaagagcccagagaggctgtcttcctacccagcaggtctcatgcaggcccagggctggggatgcaggcaagaggagggagatggccgccctgtccctctccctagctggcggctctattctgagcagttcttgctgcccgtttgctctcaggggaaaggctcacgccccccatcttagccccaggggggtaagtgggtgctggtgatgggatggtgtggcgctcctgccgtgggtgttgccaggaggctctttgggaaggagtgtcgcccggtcaggtggtgcgctcccggtcactaggggtgtacacgtgaagttgggtgaacacctgctgctcatggtacccagtgattcttgcccgagtgggcagctgagcagaggcccctctgggtcttgcagtccaaagaaccgcagagtagcccaagggctgtgggtccattttgagtggcagccaagtctgggagcccgtgtgcatcatgtttgggtcaggttggcgtggccaccactgaaataagcaataagtacgggctcctggtacctgcggatctcctgcaaacaggcccagagaacagccttgaagccacctttcccctcaaggggactgaccctgtctttaatgctgcagtggcatccagggatcagtggaacattgctttgagaaccctcctgctgttacggaggcagcacaaagctggtgacccctgagccaacacggcactgggatggctttctaggacagaaccctgtcggcgactgtcacatctcaaactaatagctgattttaaaagccagcagcagcgacgccatgtacctgagtacaggtggcagttgcagagccgtgggctgtagaaggtcagatggggcttcccacaggggaaatctgggcatgctgtagctcagggtgactcccagctccgtcactagcagggcgacccccttccttctggagccttagctctgaaagcccccagtgggggtgccctttcagatgccccctttccatttcaaaggctctgactcttgatcttgaagccggacgcggcactggcactcggcttcagtttccactgtgacagatggaggtctcctttcgccccagcccaggtggccaagcccatcctggcctcagaacatgctgagcacattttgtagggtggcacctttttatccaagttactagctacacatcagtgtttaaagagaaaaaagtgacctttcattttttttttcttgaaacttgaggaaacaagatacatactactgattttttttttttcttaaaactaaatgcatgactgcagagcggtagaggtgtatatttttcatactgtggggcaaagtatttgtgctgctttttggagatggactggaacgtctggtttctgtccccgggcccggcagctacgtctattttctgtagaaggtgccacagtgagacctggagccaccccttcctgccctggcgccgtttagagctgggagcccgtggactcccggcctgtttctaccttctattcaaccactctgacgtggggagacaagaagaaatagaactttttgatagtgtggtaaaaacattgatttgaactattttagtaaaaggagtaacaaacaagattgtgatagtgtctactttgagctagataaataaaggcctctttgtgagcctcctggctgggtgctcagtgcttgtttctgtcgtgggtggcagggtcagcaggcagagacagggccaaggcccctcaagcaccgcagatgggggctcagtcggggccccttccacagacagagccgtggcccctcaaggtggacagtgaggccgctgctcctccagctg

SEQ ID NO: 9356 - DNA, 1165 bp, Homo sapiens
tcaaggcaggactgggtttagagggatattttgttactgattagcaatctatggctacaactcaggtttctctttgtaacactgtatccacccccacctcccaccacaggctgcttcagggcagtgggagtagcgcaaagttaggtggtttaatttgctggggctgttcagagcacctcagcccctttgattttgccgtcctgggggcttttgaggggtcagttatctgggcctcggtttccctaagtgcagtccaaagagcagattgctgcagtctcgtggctggaaagtgaaatgtttctggttttcagctgcgtcatcaatgacacttggcaagagtgcctctctgcaggacactggagggctggagtgtttagagcatacttgcaggaaaggctctgtcgagttttgggcaaggagatgcggccccagtctggctcagcatgtcagctgcgacagtgaataatacaggagtggaggactaggctacactgagttttccaccccactgggggtcagtgggaggttgaagtatagggtttcccacagaacccatcctcccccaagcccacttagcacaggactgctgcaaatgttgtggcagcaaaccttgctttggggtgaaatgaaaattcagcattattattacaaatttcggttacagatggaattattattatttagttttgtctcttaaagccatgtgtggccttgggatgtggtcccactaatgtaaatggaaggcttggaaaccaggaaaggcccttctcttagaaactgagctgttctttctttcttttttcccttttttcgagacagggtgtcactctgtcacccaggctagagtgcaatggaacactcatggctcactacagcctcaacctcccaggcttaagtgatcctcccagctcagcctcccaagtagctgtgattagagccatgagccacctcacctggtgaaactgggcttttctattctgggacttgtaactttaaattgagcaaagattgggcctgagctgagggagataatgagtctctgtctgggtggtgtctaaagtggggtcagacaccaggcttgcgccttatgtgtttggtctttgcttcttctcacaggaaccctggggaagcagtattatccccatttgacagacaagcaagtgga

SEQ ID NO: 9357 - DNA, 1186 bp, Homo sapiens
ggcagtccctggggtccagggccaagatttcctgctgacccctgcaggagctgggagggcagagcctcagcctccactatgttgggggaagggctcccgggcccccggcacctggacacccacctgtccagagcctacagagaccctgcgtccccacacagcagctcctcacaccagagttctggtgcccagcactcctcagcagcagtgaggccacaggcagggcacaggcctctgtccctacgccaggtcctcccctaaaagggcagtggcagcaggggccgccgcagaaggaatggcagatgagacccaaagcctttggtcatcaccccagaggtctatgccaaagcctgggtggggctcccaggagatggaacagggacacataccaggcaggtccacgccaggggtgcggggccctgatgaggaaccgggctgcactggtcatggctgcacctgagccgccgccacctgtcccgcagccatcaggcaggagctgagtgggatcagcaccacgtaaggggccggcctcgctgcgctgattcgtcgagcccatccggcgacagaggacagccagaagcccagccagccccagactccagtgcaccagagcacgcacaggagcctgggcgcgctgctgtgaaacgtcctgacctgtgatcacacatgacagtgaggaaaccaagtgcaactcctgggtttttttagattctgcctgacacggaacaccaggtctgctcgtcttttttgtgttttatatttgcttatttaaggtacatttctttgggtttctagagacgcccctaagtcacctgcttcattagacggtttccaggttttctcccaggtgacgctgttagcgcctcagctggcggtgacagccggcccagcgtggcgccaccacacaccgcagagctgtccaggcacagctccgtccccagcgctcatggtgttgaaactgtctgtcatgcaccacggtgtctgtgtccacacagtaataaacggtttactgtccgcaccctcgggctcaggccctcgcattggtccatcacgctccgggctggggatgccccttttcagagaagggcccgggaccacggtgaccaggagtcgtaggagcaagatggcggtcttcgacaggaagctgggctcagaacattcccaagccccgggaaggtggggtggt

SEQ ID NO: 9358 - DNA, 1654 bp, Homo sapiens
atgtgcgaatccataccggagacaggccctatgtgtgccccttcgatggttgtaataagaagtttgctcagtcaactaacctgaaatctcacatcttaacacatgctaaggccaaaaacaaccagtgaaaagaagagagaagacccttctcgaccacgggaagcatcttccagaagtgtgattgggaataaatatgcctctcctttgtatattatttctaggaagaattttaaaaatgaatcctacacacctaagggacatgttttgataaagtagtaaaaattaaaaaaaaaaaactttactaagatgacattgctaagatgctctatcttgctctgtaatctcgtttcaaaaacacagtgtttttgtaaagtgtggtcccaacaggaggacaattcatgaacttcgcatcaaaagacaattctttatacaacagtgctaaaaatgggacttcttttcacattcttataaatatgaagctcacctgttgcttacaatttttttaattttgtattttccaagtgtgcatattgtacacttttttggggatatgcttagtaatgctacgtgtgatttttctggaggttgataactttgcttgcagtagattttctttaaaagaatgggcagttacatgcatacttcaaaagtattttcctgtaaaaaaaaaaaagttatataggttttgtttgctatcttaattttggttgtattctttgatgttaacacattttgtataattgtatcgtatagctgtattgaatcatgtagtatcaaatattagatgtgatttaatagtgttaatcaatttaaacccattttagtcactttttttttccaaaaaaatactgccagatgctgatgttcagtgtaatttctttgcctgttcagttacagaaagtggtgctcagttgtagaatgtattgtaccttttaacacctgatgtgtacatcccatgtaacagaaagggcaacaataaaatagcaatcctaaagcaagaatatggcagaacaagatctgtaagcacagtcttattttcttttgttgtccagaatacttataattcttgagcctcccagaaattggaagctaaataaagcaactcaagtttcctttattttgcactcaattacagtgattattgatgaaagcgatgcatggatattttaatacttcctacatgtcctgacttctgaaagagagtaggtaacaggcatcccgagttcaggaactacctcagaacaccccaggccaggttggtcataggctgtgattttagcccccggcaagtgtgagtgaagcatctgtaccaccgcgcaggctgagcgcctgcgcagggtaaggtgccacctggcagtggggcacacagagggaagaccaggcctgtccatcagccggctgccttcagaggcagctccagcaggaccttggcttgtctgacaggaaatgcttgtggtcgttggttatttggtttgagagcccttgttcctccatctagtggagtccttattaaatgctagcaatgtggcaattgagtgccagtagcttaatttcatgtttctaaatggacactgggtgcaaatcggcaaggtgattagattattagaaaattctgctcaatgagtacctctcacattgtaacctcttaaatgta

SEQ ID NO: 9359 - DNA, 1172 bp, Homo sapiens
aaacctggccccctaaaaagaagttttggaattggaagcctgataatttcgggaggctgaggcaggagaacggcgtgaacccgggaggcggagcttgcagtgagccgagatcgcaccactgcactccagcctgggtgacagagcaagactccgtctcccaaaaaaaaaaaaaaaaaaaaaaaaaaggaaacctgacaattctacccacctccccccacccccgactataggcaaagagagttgatcacttccagggtctctgacttctgtgacctggaaatcagcctggcttgggaaattcatgttgttgatctttaattatttaattattctttaataatccttctattttcttgacatctgacccccagcaagagtaaggatcccagaggtcaaaacagtggtgagagccaagctgctcacagacacccacttgatgccacagccatgccatgaggcttcctcccagctgctctgctggcttgctgaagccagctctgagtcacagggttgccttggaccctcggctgtagggggcacctgtctggctccgggccctttgtcctggatacactgacagtaatgtgagcgcagcacttcagagttcaggcccagcaggtcctggcaagtgcattccacccgaacttttaacccaagcggtggggaaggaagccaaaactccaagctgcactttcttggggttctggccatgcacttcttagccttctctctgactttacaggacaaaaggtaccccacgccttcagaatcatgcttacctgcacggcagcatctgactggatggctggctaggtctcatccaccccaaattactgacccttgatttatgttgttactgctcaggttatgctcagatgccctggttgcctgaagatggtttaagtgcaggcccttcagacaagtcacgtcaggcaagagagggctggcctctgacccacaagagggcagatttgtggccaagaggcttcctggcatccacccccaggcccaagggatcagtgtggtgccagagaggatctttaagctgggactgtactgaggcttgatgggaagtatgggcagcatgtacttgacacgttatcacccagtccccttgtaaaatctggaatggagcgtttaagctgagcgttagcatcaggtcagcaggcaaa

SEQ ID NO: 9360 - DNA, 1267 bp, Homo sapiens
attttacagaagccataaggctgccaggaattgttgttgtttagtgcctgggggaatggcccctagcatcggtaggggtggggactgccctccccattggccctttcactgtgagaggccaagtcatggctatcgtcagagccaggtttctagccgttttaggaaaagtgtagctgaaggtataggttattgttgtggtaacaacagatctcacttctgagtgccacccacgtgccaggctctgcatgggtggtgtgggctgagctggtgcccgaggcaggaaggagccactcaggacatgtggagccatctctcacgtggctgtctccctccgggcaggattacaccagcggagccatgctcaccggtgagctcaagaaggcactcatagaggttctgcagcccttgatcgcagagcaccaggcccggcgcaaggaggtcacggatgagatagtgaaagagttcatgactccccggaagctgtccttcgactttcagtagcactcgttttacatatgcttataaaagaagtgatgtatcagtaatgtatcaataatcccagcccagtcaaagcaccgccacctgtaggcttctgtctcatggtaattactgggcctggcctctgtaagcctgtgtatgttatcaatactgtttcttcctgtgagttccattatttctatctcttatgggcaaagcattgtgggtaattggtgctggctaacattgcatggtcggatagagaagtccagctgtgagtctctccccaaagcagccccacagtggagcctttggctggaagtccatgggccaccctgttcttgtccatggaggactccgagggttccaagtatactcttaagacccactctgtttaaaaatatatattctatgtatgcgtatatggaattgaaatgtcattattgtaacctagaaagtgctttgaaatattgatgtggggaggtttattgagcacaagatgtatttcagcccatgccccctcccaaaaagaaattgataagtaaaagcttcgttatacatttgactaagaaatcacccagctttaaagctgcttttaacaatgaagattgaacagagttcagcaattttgattaaattaagacttgggggtgaaactttccagtttactgaactccagaccatgcatgtagtccactccagaaatcatgctcgcttcccttggcacaccagtgttctcctgccaaatgaccctagaccctctgtcctgcagagtcagggtggcttttcc

SEQ ID NO: 9361 - DNA, 1235 bp, Homo sapiens
tttctgcttctgccggcctcctcgtggtctcagtccacatctatcccccttgcactgcctcattaggcatttccttgcttatcaccttctctggttgattcgggcatctcagaccagttctgtccattgaggtctgagtgtcgtggaggctggtcccctgcctcctccccggtgtcttagacttccttggcaggggtggccctgagcaccctgcccatgtccccaggaggcaagtccttgccgttcagggctgcctcaggttggatcccctccaggaggctcccctgcctggggattgatcacttcttcctccccagtgctttgtaccagcaggttctggtggtagtaagagaattacagagagaatttgttggttgacatttttcttttttgggcttctttttactttgtttctgatcctaaaggaagaaaaacatattcatacagaggaatggaaaagtaccagagagcctgagaggcagtggggaggacacttcatcccctggaacttgcacctggcttctctgctcctgggtggctctgcacgtgtcttagttctgctcattctgtgtatgcaggcacttgccattttctctgtggaatttgagggcttggatgtgatttttagcatggacactttggaggggctcagttacattctccttggtgcacctcctggggtacaactggcattagcaggtgctgatgaaggagtaggaagtgctgcaaagcacttttgctcaatcgtgcgaggcttttaaaacccagttattactgctactcccatgaatgcccataatggcacaggaggttttctgaacctttctttattgcacaaatgctcctggaacagatcttgacaattcaggtgaattattattctacccctcagaaggtaaagggaaagctttctgtttgtaactttttcttcccaagtgtcctctgtcaaaaggtagtgacatcttctctcctgatatgtgacgtccattattacctcggtataatcataaagctcacacccaaaagctttccatccagcacgtcagagggacaatctttatttaagacacactcccccacttttctttgttattgctttctcctaaaaaaaaaaaacaaaaccaaaaaatcaaaaaattcccttggctttaaaggcatgatctgggctaggagtgactcgttcttttgcaaggttattgtcataggcaggaacaagacaggtgggacatgggggt

SEQ ID NO: 9362 - DNA, 1129 bp, Homo sapiens
aatttctttcgtcccgttttaagccaaccagttttgtccggacaagacaaaaacaacttgggctgctttagagaagcccagctcagtgtagacaatagctgcccagcctctgaaaggggctgattggattatgtggcaaatggaggtgcaaggatgacttggacggtgacaaatgaagtgggcggagacctgctttgagttaatccaggctattaggaggggaccttttgtcttccagagactggcaggagcttttaccagtggtttttacatccttaatgttcaggacgaataatttatggtcagtgaaaatccaggccccagtgagattcgagtgggctgtaaaatcgagagtcctgctcccagtgagtaatggtagtgaatgtttctgtcactttttgcaaccgtccattcatttgatcctcacaactccctgtcctgagccaggaccggccactgccactcccagggaaacagaggctgtcaagaggctccacagattgggccccactggatcattgaacccctgttccctgagttctagaggaagaattgtacctgtctcagtcccggccacctccagaaggcctccctctgcatttctgactttgctgtgccggcagcctggagcctcccaggtccctgctgtcatcttttctagccactacagtctctgtctttcctttcacagccaagcttcttgaaaggcctgtctacacttgctgtcttccttcctcacctccaatttcctcttcaacccactgcttcctgactcgctctactccgtggaagcacgctcacaaaggtaaagacttttctgtggcttaatccttgtcatgttttcggctcatggacacaaggacacattttcatgccttctctcacagggctctgcgtctccggttcacttctgtgtctttacactcccttcacagagacacttgctcccccttctctcgttcttagcatcccctaggaacttgcacacccaggtctctcgacttctggacctgcttcttaccatgccgtcttaagcagtcaggagtcgctgcctgggttcgagtcctagttaaattacttagtgctgagaccttggggtaggtaaacttttccaagccaggtttatctc

SEQ ID NO: 9363 - DNA, 1214 bp, Homo sapiens
gggaggagcgtgcaggagagacaggagaagagaataactaaacaaagacattaaagacaaaaaaaaagtaggaaagggagacttagaaaatattaaaagccaccaaaaacacatccaaagacggtttccccttacgttagttgggctaaaagaaagcaaatgggaagaaggttttaaattgattatcccagtgacaaatcccaggaagctttcacatcaaatcaccctattctgggtttttaactccttccatcgagtttaacctctttacctcccacatcctggtaaaccctgccccctccctaccgccccctttgctggtgattaaatcctgaaggtacacgaagtatttcagtgaatgaatggctaacagaaaagggcctcccctcccccttaccctggcggtgtttttcagttttattccactttccgcccttttcccttaatgaacacagggctaatctcgggccttgtcgaaggaagaggctgcagacgttaatgaggttagctgctggattccagtattcgtcgcataaggatccttctttgtctgcgaaggaaaaacacactgattatcataatgaggtgaactggccaccgccgggccggggcgatgtggcttcttaagccacacttctaattttggtgatggagccgacatttctttggcttctcatttaagtctttgcctctgtcccagtgcgaagtccattcagcggggttgaaagttgcaggcagctttgggaaggggggcgtcggacagggttgcattgtagaaagtggctttgttcgatccttcgcacagatgcaaatggccagagcattcattccctttcttcaagagctgaggactgggggggccactggtgatcagttcccaactctagctctcctctgactcatctcaggacccattgaggacatccaaaactcactcaagatcaccaagtggtaggaaagtactaactcctgggcatagccctaggggagtgactacaatgtgaatactcatggaatgcctagccaggtgaagaagtgaatgcatgttggcatcccagagggaccccccttaagagggcatagtttggggttcagatttgactccagcatactgttgaaattgggcacagggggctagtgattagtcaggatcaatcagtggagaggagattaaaactcacatctgggagtccggaatcagaacttgtagttct

SEQ ID NO: 9364 - DNA, 1442 bp, Homo sapiens
agactttcccagtgacggtgatgtagttggccactctgactatgggtggactcgggtgtagacctctgaagctgagatcacacgaaaacctggcctccccgccatgtagctgttggagagtagaaaaatagagcacgcctgatgtttctaaatgagaagactttcaatagtaatgaagaatccatggcactctcctcaccctcaaacacatggcagtcattcacatacaggccccaaagccactgttagtgctgcagtagctcctgtggacattggaaagcccggagagggcgtggaagaaatcagctggcccccggcaggttctctggggttttgtgcccaaggctcctggagccctaaaaactttcaaaagttaactccccacgtccccatcctgcttgggtttctggacttttctgaggcaccggcagaggggtctcgttgctcccttgagtgtaggggcagccctttaacctggctccttgagtccctgctttttctgcttctgttgccttcttcctcgtcttcctctctctcaatatctccctctctttgtccctccccagttcctgacctggccatcccggggtgcccttgaccagccccgtgtctcctcagggtgtcccagcaccagcctggcacagagtggggctcagttagagtatgtgggatgttggtttcgccaggtgagtgaatgaaaggactcgaccaccacagctgagccactagctgggccatgcgaagagttctaggtgcaaaggctggagggtggaattcatttttgagaggtgtgtgagcagcttccgacccctgccccatttgaacgggggccttgctggtcgcgtccctgcattcacccgcgcggccatcccgtcatccaacagttgatcctaactgagcacgcccacggccctggtctggcctgggcaccggccaccgtagcccatcccttgatggcctctgtgtccccaggagggcgggccggggggttgcccaggggctggagcagtggactgtggctccatagaggtaggccggagggtgtgagggcagattcaagctatccccagggctctgctctggtcggagccagccccttctccctctctgccttccccgccccattcctgatgctgaactgttctggacccctggccctgagtctctcaggaccaaagtgggcacgggaacagctgtagtgtgtgcccccccgggctttggccacaggtctccctctcgaggtgtggttgtgactgcgacccttcccttgccgtgatgccttcctcccccggggcttggtccagctccttcactctctagcagctgctggggcccacctcccatgccgaggaccagcaggggaaacctccagggagcatctgcaggctctgcttctgcccggctgctggcttgctctccctggtggctctccagcggccagc

SEQ ID NO: 9365 - DNA, 1222 bp, Homo sapiens
actggaattaatgagttgtgaagtgtcccaaggactggttccccctccctgctgtttctctgagccctgtcccctcttccaaaggaggaataaggaggtctagcttcgtctcccatccccgatttgagcagatggaagagtctagaaaagaggtgtaccttttgaaacgaggcctcagatgtggggttcctggtctggaaaggggaaggatgaatctggggtaggagagggtctcgtatggagccccattcagacagggcagtcccacacctgggctgcccacaggttcttgggggagtctaaggaaaggggagccacagaacaggcttgcctccttggcatggattgggtcagtgtttcagagccaggaaaggtgggagtgtggggggccctcggggctgatgagggcgtgcagaccctcccctcccacctcctgtcccaggagccctgcagacactgcagcaggagggcactctgccagaagaggggttccagctccagccggatccagcagacatggagagaccccttatctttgccaagacgagctctgcggtgcctgagaggcccgtaggtctggaattctagggccttctgggtttgagtcaggtcctgaggccagggcctgggccctgatcctcaccatggaaaactggtcactttactcaggataaactgtgatgaggacttgggacatatctctgtctgtcctctcagctcgcgtcacccctgagcccttggcgatcgtgggcggcccgtgtacagagcaggtgctgggtcactggggccgccgtgggcctcccaacatgagggactgtgtgtgagagaggagttcattaagggagaggatggtggtgaagggtgtagccatgactttcttaactgctctccaatttctttgagcttaaaaataaatccagatggagagttcttaagtcccctatcctgggagaaaggaaggctgcccaccaccttcggcttgcctcgactctgagcagtgaatagggtctttggcaggggcttaaggaggagactcttagcctgggagctcccagggctgtttcagatggaaacaaaggctcaggccgagaggaatgtgggggagccccccgtggggaacagccacctggggataattgggagggctgagcgcagatgagttttcccaggttctgtgaatgcgccctttcaatggaaggtgcctttttttccagatgaaaag

SEQ ID NO: 9366 - DNA, 1199 bp, Homo sapiens
gtgttctagacagtggaatgaagtggtccccagggagggtggctgtaggcatgtcatgtgcttgtcacatgcacttgccctggcagggaggagctggctcaggaagaccctggtcttggggtgctgttgccctatcttggctgtgtgggccatttcactgcatctgtctcttcctcagtttccccatctgtaaacctggagtggcaccagctgcctactagagttgatcttatgtgtctctgttgatggtaccccatctatggcctggataggcaggaagggcttggaccctgagccccgcagaaggttgcatgaacgagtggtgtgaagcctgttgggtagcttggccactcccgcggcatgggtcacctgcacaggaggttttgcccaccagggggcagcagagggtcagggagcaataggccctgggtggagcatgggccccgcctgctgtgtgccaccctgggtgtggcacctactcacatccaggggttggtgcagggaaaggccagaaggtggccaggcgcacctgagaagggggacccagaagccccgggacccaggagccctgggcaagccaccagaaaccttgttcttgcaactctctgcagtgtgcccaggccaccctctggcctggtcttccatggggcagggcgcccacccttctcaactcaggtttccctgggcagcaggtgcacctcagcacccctggggttgcagaagtggtccggggaccctggcttccttgacatgccatccccagagcctggttcaaggcctctctgtcttctcggctgtttcacgacgtgttttgtaacttggcgggattgcgtttcgctgtgtcgaggttgtctcttctctgactcgccctccgggggactgccggggtaaatctggagagttgctcgtgctgacagtcctcccccagggcctccccggttctgttgagtctcctttctctgtagtggaggaaatgtgtgtagttttgtgttgtgtgcctgtgtttgtctgtaaaagcaaggaccaaagtctcccttgttgacctctcaattcctatttgggacatataaaaacactggattcttaacaagcgcccggagcagtaggagcacagcttggatggactcaggacttgtggcagggagcacgtgggaggcaggggagtggggtggggccaggccatctggagtgggaggcgt

SEQ ID NO: 9367 - DNA, 1172 bp, Homo sapiens
gggggagatccgtggctttccaaaatcccttcatggggtctgtaagcagaaatgtctgctgccccctgttccagggcacgtcccactcctcactggcagggctctcgggctcactgattattctctgaggatcacacagggtcgattttctgtgaatgcaagtgcgtggggtgggtggtggggcgtcgagctgaacgctggtctggacaggaaaggctcctgcttcatgtcccaccttgaccctcagaggtttccaggcccagctcttgggccctggcttcctcctctccctctcgtctttggggggggtccatctcatgcatgtctgttaccatggactccatcatcacggctcccatcacctccatctggcctctgtcatcctgggcacagcatctcatctctggccattccagcctccatcacccgcctcacctccatcatcctcgcttcggggctcattctggcctccagggctttgtacatggtaggctttcattcattcgtttgcacattcggtgaaggtctactgtgtgccaggccctgtgccaggcatcgtgtagatggacgttgcccttgtgagtgcacgcctcggggagacgcacgccagccggtggatggcaggagagcctgggccagggctgggggtgggggcgtgggtgtgggcatgagtgcagaggagggtgagctggtttccagaagggcgggatcagctggggtggtgggcagggggaggaagtgcgggctcagctgaggtcctgctgtgtggagcctggagggagagattgcatgtcccctctctattccccatgggtcatctcagtaatggctgccggagttcaggggtccctagattgctcccaaggtcctcactcccaagtccttggcaagattcctgcgccccaggagccttttggcacctgaactctgccacctagtctgctggtcagcctctgtgctgcccgcgttggtgggtgtcattggattgttaacgatgtacgttttgctctaaaatgatggtgattgaagatgggaattattttgtcagttgattttaatgttttcttttttgtgtgtgaagtgtttgttgtgaaatatctattttggaagtttttaggtgttggaaagccagaatctggggccctctggtgtctaggaagaacctgtgatgc

SEQ ID NO: 9368 - DNA, 2867 bp, Homo sapiens
agtttcacccctttgggggtgacgacgaagcccaggaattccacggtttggcggtggaactggctcttgtccagggagcagtagacgttgtgatggcggaagcggaccaggacttggcggacgtggtggaggtgctcctcctgactcattgagtagatcaggacttcctggccataagaaagcacaaagaaccctagcatgtcctttaggatgaagtgaatcacgttctgaggtatgatagggtctggggagagcgcaaacggctggtagctcttcatctcttcaagctccaaaccaaacgctgctttccacacatcttcggtgcggtgcccgttcacgctttcctccacaatggtcccacgcagctccagttttgtgaaccactcggctccgtgtaactggtcaaacagttccggaatcatctgtatgtagtcctgtctgttggtcagcatgtcctgcaggtcccagtattcctcctgtagcctggctctttcttgcatcctggcacccacaggttcccaaggcgcggtggagggacactcgtaaaaggtctcgctgtgatcactgtctccagcctgctgaagctcagagggctctgattcagaaagatcatcggatccgtctgagcttggctggtcggaagtctcatcatctgcttccttcgggttaaacacgtcggccaggtctgagtatgggtgtggcagtccgggtagcaggctcatgccgtgcctctctagggcaatgcatggcgggggcgggcggaagcagttcttcaggcagtagggagagtggaaggtgcagcggcctttgatccagtcgacttcgggggcgtggactcggagccagcggatgcctaggaccacagagaagttcggtgaaggtacgatgtcaaattcgatggactcctggtggttctggtggatacacaccaggggctccgtgtagagccagacaggctcgttgccaatcagcgagccgtccacggattggaccggctgtgggtacggcttctcgtagagctcgacgtagtgctcttgggcgaacttctcatccatgaagttgccgtcagctcccgaatccaccagggcctggaccgcgacgctgtggtaggggttcactctcaccatgagcagcaggaagaggtgggcgcgattgatgtccggatggacttcgctgggcaaccagctgctgaccatccacctctctggagcaggtgagtcgatccaggtcaggttccgggggcgggcctcggggggcagcctgagcatagctcttctctctgccagcttctcttctatttgcaggatgagcacaatcagactgtctagggaatccggctgagggacccggaatagatagtgcctgatctcctcgttgagcccctggcacaagtgggcctgcaggacttcatctggccagcccaagatgggtaccaggctctggaactcatcgatgtactcagtggcagagcggccgccctgcctgatggtgaacatggcctcttctgccacacgcagtgcctggcggtactcaaacacttcggacatggcctccaggaaggctgggaagtctccgatcagggggctgttttcctgcagtagagctttggcccattctaatgccaagccggacaggtgattgatgacatagccaactctcagacggtcgttatagaacattcttgggtagctctgtaaggtcagttggcagagtacgatgaactcgtggaattctctgcgatcgccagagaagtgctttggggcgggcagttggcctgcattgatccctttgatcaagatctcttctgctactctctgttgctctttgaggtcttgcattcggaagtacagcgagatgatggacctcaccatggccataagttctgcggttgagtgctcggtctggttttgctcttgaggagtctcctcccttcccgattccttcaggtcagtgtgagcctcttgttcttctcgggctcccgatgggttgactgatgcttctttcatcctatcagatgctccactgagtggatccccccttgcctggtgtgaaccgttgcatgactcctccaggtcttggagtaggtcattgggtggatcctctatttccttacgtgggccactggatggctcctccatgtcttggagtagatcagtgggcagctcttccatttcctggagtgggccactggggggctccttcttttcctgggctgggccgctggctggccctgcctctccccgcactccactgcccgacgtcgcctcggtggtgttggatgagccctcggaggactccatttgttttgatgatggattcttatgctccatcatcgtctcaaatgagtcttcagagggttctatcatttcgtcggatggaaaggagtgtattctgaagattggtaaggttgtgatggcgtccagtcagtagctgggaccgtggagatcagaacctggtggtggaaggggagtgtggggagtaaaggcagtagtttaggatcttgtgaagtggcagtatcagggtctcaaggacaaatcagatgcccaactaatcagagcagagagaaatgggggaaagccttcttgtatcgagccagcctctttggctggtcacttggggtgcccccagggagggaagatctgtcaacccctgacctgcctcccaggcttattcagtctgcctgtcctgtccttttcctccatagatgtgagaaattcacagcccataaattctgtggctgggagcagccaccgtggcaggcgggtacctggcagggtgcacaggctgctccattcccccctggcacatgcacctggtcaatcctcttttcctgctttggtcacctgagaatcacagaggtcacatct

SEQ ID NO: 9369 - DNA, 2867 bp, Homo sapiens; identical to SEQ ID NO: 9368

SEQ ID NO: 9370 - DNA, 2867 bp, Homo sapiens; identical to SEQ ID NO: 9368

SEQ ID NO: 9371 - DNA, 1236 bp, Homo sapiens
cttagtgatgccggtggcttcctgtcctcgaagctcagtcggtctggtgggggaaacaaacagggaataagacactggaaattgaggtgatcaagagggggtgcaggcatggagatttatggagccccgtcttggagccaagtcccgaactgggctgtctgcaaagaactcacccgggcaataaccctgcacactggtctcatgagccccattagattgatgaggaaactgaggcacagaaaggcaaagtcctatactcaccgtctctcagctggtgtgaggctgggccaggatggaaccccagactctccgaggctccccaccacaccctgctgctgaaggctgctcagcgaggctgtgccgagtgctgggggggtgtgggtgggcaggggacggattgattagttataagcacctcccagcggtgcttgagatcccagctcctctgtggcccaatccgtttgaagggcagattcaaaattaggtggtagcacctatgggcagaggcttatgaaaatggcattattaacctgatgtggagagggccctgcctgtctgcaagtagattgcagatagagacggagggggctgggcttgtttgtgtggacagtgagttagagaggacagagaacatccaggggccctccagggcttccggacggggagaaccagatctggaggggctggacaagtgggagggggaagaggggtacgtcttaagggtgccccggcacctcagggaaatgccccaggctggacttggaggaggatctccagccttgactctgacacagacagggactatggccctccccgcacctcggtttcccatctgtgagataagagatggaaaccaaacgtcatttcgagaaaagcccccattcccaccaccctcctggccccccccttcccccaccaccccaatcacgtttgccagacacctgtctgcttgtcagagcaatattcaacaggagagttccttcgcttcctccctggagggagaagggagaggtgtggacggggagaggggaggggagaggtgccccccactcagagaggccgctgagcagagttctgcatcgggtaggagttgggccaccgaagatttgtgccaactcacggtgcggtggaatcagacagtctgaattcttcagacaccagccaagagtctgtggcgcccccacgtgccacaagggggctgcctgggccacatttctgagcccgaaaagtgaggag

SEQ ID NO: 9372 - DNA, 1204 bp, Homo sapiens
ccacaaagacagtgttttatgacctaaagattaagatttatccatttgtgtacaattgtggactatataaaataaaacaagactttgacctcagtggataagaagtatttggatgtactaatcaatatttttggtctgggtcagtggtgggttcatctgtgtttgttgtatttaaaaaaataaatgaaaacattgaaaagggtgagtaggaatcaaatatgattgtcactccaagtctgcgtcatctgcatccgttaggaagaatatctgggttggttccttcttgggtaagatgcacagggacatatgtttgtgagagtcatgattcttgtttttgattagagtggtgaattaatacacactcatttgtaataatacaaattaataaatgaataattgcggagagctatgcttgggccagtggtgagactgtcatgaaccaaagattatgattaatactgtgcttctcacctgatggccattaaaaaaatctaggttttttcatcctttttaatatcagccttgtgttccacagaatggaggctccagagtgaaattaatgacactttgtcgatgaagatcttgattgtgacctctgtggaaaatgagccatgaaccaaccaatgtgagtaatgtttagtgttgttgttttgaagttgggtggttggttgatggttgtttattacattattaaacatgaatcaatacataaataaggtcaaagatgacgggcatgatgagaatgtcatgaaccaagggtgattaatttcatatagcgtaactgttaccaaattaaaaaacaatattactgggctgttctctgtagcaaatgagcaaagaaaaaaaggaacacacacacacacacacacgtatactacatatatatcacatgtatcatgtgttatgtttatacatgtatcctatatatatatcacatacgtaatatgtgttatgtttatttttcatatttgcaggctggggtgggtttatatatgtttatggggtaattaaacataaatggatgcatgtataaacaagatcaaagagagtcaagcatggactaatgaagacaatgtatcatgatctaagatttatgattgcacagctctgcaaattggagagacattgaaacacaaatatttatgctgtttcattcatttcagtagcattccactattaatttatgcactacacttttgcatga

SEQ ID NO: 9373 - DNA, 1218 bp, Homo sapiens
aagcatgggccagtgaggaacaggtgttatgaaccaaagataatgattactccagttatactctaatgttgtccagataaatagagctccaggttgcccctgctttggataaagcacacattgaaatttccatggagtaattctttagaaaaacagatatgtaatttattccatgcataattgtatatatgagtaaataagtgaatcactagacatgtaaatcagaaagattttgcatcattaatgagaatatgccataaaacaaaggtttacatttatctaattttgcacaagtgagatccactaaaagtgatcacctatctggtaaatttatggatctggagtatgtagacagatatttatgatagatatggctcttattctcatgttgatattcattgtattatttaaaagcccaaactacacaagtcaataaataaggagtgccatttttgggcaatgatgagatgaccgaagtttatgattaatctaatactgccaaacaaatttccattaaaaagtctaactgtagggtctttctttctcttgaaagtatgtattttacttcaccaaatgagcacattatggtgaagaactgatttagtcattctctaatgctaaagatcttgccttttacttctgtgggtaaggagagaagagatttatgtaagtaacaattagtgtttactgttcttggattgggaggttggttcatgggtgttgcctgaatttattaaaataataactggatatattaataaataaaactaggtaacaccaatatgtaccagtgatgagaatatgttcagaattgggatttatgattaatctgatttggtactagtaaaattcaataaaaaagatacagggtatttcattcattttcagagatgattcagattgttttattattgcgttgtgattcagttaagtacctctccattgataaagatttaggctattaattccttgagggaggagcacataggaagatggacagtgttgtcagtgttctagttgtgcagtaagattatgattccttggtgattcattataccatatttggcacttgaaaaaggaccaaccgtggaccagtgagtagcatggagctgacatgaaagaaggaagttgattaatttataagtgccaaaagtgcatatatgtatatatatgtatacaaactcacacacacatatgttgcagaaagtgacttccatc

SEQ ID NO: 9374 - DNA, 1160 bp, Homo sapiens
tattttaagtgaattcaatgcgtaaatagagaaatgtgtatacatgagagaagattaacagtcctacttatggaactattctttgagtacaatgaaaaagtattataaatattaacactggcaataaaacaagtataattattaatctgaggtaaaatcctattatacagaacatattgtatctgcagttgagacaatttttttggttttatagtttgctttttttttaattaagaaaagggaaagtgtttgcatcagccagaaatccattaagtaatatctacttaacagatttttatatagacaaatattcataatcattacagatcttattcttgggctaggtgacgcattagtgtctattatactatttaaaactaaaagttcaatactggcctgaaaaaattgcatttttgagccaaggtttattgttatctagttctgcttgactaacatccattgagaaaaccgtatatctattctaaatctgcctttttccctccagagtggacataggccagctgatttaataatttaagaaagaactgttatcctgagtaaggagcatagagacaaatataagtaagttccttatttcaagttctttctttgaatggtttgtttttgggtgttagctaaaggatttcaaaggaatcaatgtctacatacgtgaaataaataacacaccccaaatgcaccaatgatgggaatgtgtaatgaaccatgaattatgtttaatctaaatcgtcacaactgagttgattataaaagaagacaaaagttaacttattctcagagcagctcaacattattctttatttcatgccatggttattttacacgttcccttatgggtagagatcctggctgacatccgttttggggcagcgcatgagaatatggaaataggtgatttcgttgttttttatcaggccatcgttgacatatgtatgaattaaatagaagtgggctatatcagaacgaatgctgaatgtgaactgagagcatgcaggggcattgaccaattcacatgtgcacctttacgtgtcatggcctaagaaatgtagtctagctctatgggccaagagcctaaaatttaatgatcttgttttggggatttttgattgtatcgttatttgtgagtcaataggtcaatcaat

SEQ ID NO: 9375 - DNA, 1186 bp, Homo sapiens
gaggttcttagtcccaataaattagtggctaaggctctattcattttggtaaggagcatatggtcatctgtgcacaagactgaatgtttttgttctgtgttgaggcaggttactggttgatcattttattaaggaaaaagaaatacatttacataaataaatagttgactgagtaactgtaattgagagagggagagcatggaatgatgatgagatctatatacaacgacactcatgattaattcagtcttttatggaattttacttaagcaaacagacaagtttggtactagattcacagcgtttattatattatctaaaacaaaaaatttcatggtgagagatatttcatcttgacaaaaacaatttatgtaagttaataaatagaagtgttctctcttctcaagtgttcagaatagggtacaaaacaaggtttatgattgtttactacagagctatgattcattttaaagagctaaacatatagtatttgattctttttaaaatttgcgttttatgctgcagaatgaacgcactctacctgatttaattatagtcttctggtgaagatcttgctgttatctctgtgaatcaggagagaagagattgatgtaagtaaaaatcaaactttgtgttctcgcttgggaaacttgatcaagtttattcattgaattatttcaaaggaataaaaggctacatacataaatgagtcaaaggtggttatgcatggaacaatggtagaaatgtgttatgaattaagaattatgattaatccatttcagcacaacgaaattcattaggacaaaaagttgaaaggtatttctgtcattttcagaatgccttaatatgctgtttttgtaccatagtggatttaaatacttccccattgtgattgttattgacagttaactaattgagggaagaacataagaaaatggaaaaccttgcctatagctgtggtataacttggtggttataccatgatataaccatagtaacgtcttaaaaatacggatgttaaatgaaaaaagcccaaccatggactaatggaatatatggaattgacgtggtgcaatttgtggaatgaattaattcacctttgcaatactgaggctcattacagagagagccagtcctctagttctgtggaatatgaatcttacagacatagttacttcttcaagga

SEQ ID NO: 9376 - DNA, 1164 bp, Homo sapiens
catgaaaagcatttctgttgtgggttcttcatgagtttactgctctgtgtgtgtgtgtgtgtgtgtgtgtgtgtgtgttagtatttgtgaatgtataatgaaatattccatgcgtcataacataaacaaatcaaaacaataaatgaattcatatataagtagggtaaagcatttaccattggtgataatatgccatgaatcatgaatttaaattcatccatttctacacatgttgagtccattaaataaaaaagatgatctaaagcggttgcctgtgtaggtgtctatagacagatgtgtgccatagtcatagtttttgttttgggtgatgaatttaacagtgtttattgtattatttaaagttaatagttaaatcaggaaataaaaataagtgcagttcttgggtcagtgataaaaatgggatttgaatcaactttatgattaatttaatatcacacaactaatgtcttttaagtcaatctaaatctgtactgttcattcttttgaaaatttgtattcaactccacagaatgaagaccatggttgatttaatcagtctctgctgatgaagatcttggctgttacctttgtgtgtaaggaagctaaagacttaagtaaataacagtccaaaaacttgtcaattagggtaaatttttcattaatgttcactgaattatttaaagttaaggcatatgtagatcaatgagatgaatgtgttatgaaacttagattgtggttagtccaattaagcacaattttggttaaaaataagatgaaagacattttattcatttttttatctgattaataattcatcttattttgtactgcatttaatttaagatttattcactaataaaatctatggctgcactgttcaatgtcgtttcctctatccacatgtggctatttatatttaaaataattaaaggtacatgcacttttaaatgtaatttcttggttgcattagccacatttctagtgctcagcagctgtatgttgctattggtgactgtaatggagaacgcagttacagtacgtttacattatatgcaaagtcctgttagacagctctttaatgagggaggaatgcatggaaaggtggaagataagtggaatgagatggctaggaagcaaggatgttcattgatctatacttgcttc

SEQ ID NO: 9377 - DNA, 1088 bp, Homo sapiens
gaggtccaatataataaaaaatctagtcttcaccttctatcctagggatagacattaggaatatttgaggatgttgttcttggtcttcacgttcatgcattttccctctatttttataattggatcaatgaatcaataagcaaatatattttaactgcataaagataaaaataggcgttgtccaattatggaaatatatggtgaaataagaaatactattcacatttattaaaaacactgaggtcttctttctattaacaaataaatgactcagaggtattactcgcttgctgcaggatggcatatacagtaaaaataataataacgtatgtgaggtcatttgggtcaggaccatgttcatggttgtttgttttctcaagaaaaaatagtttcacacatacttacatgactaatagaatgaaaggagaaatgtgtggataaatggacagaatatttccatctttttatcttttttgctttgtactctcacaatgaacaccctcaagttgacttaagcacccttccatggtcatgaggtttctggttgcctctgtgtgttagaagcttggagaccaatgtgagtatagtcaaagttcttgtcttggttctgggtttttaaggggtagtcattgttttattaagaacattacagataatccaaaaggttaaccatggtccaggggtaattatggcattgccatgaaacattatgttgattatctaatatttataaaattaaaaatgattaatgataaaatcactgtgagagatgatcctatagagagctatacagtatttcttgttcttaagtttttgtaacattatttaattactattagtgaaaggatgaattaataaataaacaaatgtagaagtaatggagaagaggagggccagtcttcagtcaatgatgactctgcctctgttgaaaataccataccctatagacagatttaagaatacacaaggctcatgttcttggtttttgcattaatggattttgattctattattataaatagatcaatgaaagaatcaataaagcaatagaaacacacatgagtaatgaaatcatcgtacaattatga

SEQ ID NO: 9378 - DNA, 1212 bp, Homo sapiens
atatcctcccaatgaatgtttgccttaattactggctaaacggtagacacaaagcagggaaccattgccataaggtctcaaattttttatcaacagtcctactttgtacaccttagaatgggctcacctgagttgtctcaagcactccttcatgccctcaggctgtacagttgcatctgtgtgttaggagcttggaggccactgtaagtaatagtcaatgttcttggcttgagtgcttttttaaaggatagttactacagtattaaaaattatacaatatataaaagaaggccaactgcagcccagtgacaaacatgaaatccatatgaagtagtatattgattaattcattgaattaattcatttaagaaaactgaggatatttagtaaaggagttacattgacctgagaatgattctatacacatattagggacatcgaggcttttttcaggttttgtgcattatagcactttaaacatattattagtaaattgctgaattaatcaataaacaatgcagaaacaaatgaagaaaagatgggccatttctggaccaatgatgatgactggtggtgtatgagttaaaggtgatgaatagtaagtgtctttgttagtggcaagttcagagtcgtttgttttaagagaatatgaaataaatatattccaaataatgatgatttaagtgactaaatgaaaggtgaaaggcaaggatcattggaggaatgtctgaatttttaaatcatctgttctgtttatactcctcagaatggccccattccagctgatataagcactcttccatggcatgtgcactatggttggttctctgtgttaggagcacacaaaccattgcgagtatgcattcatttcctctctttacaaggtgcagtaagttggtgtcagtgatatacaagaatctttgtgttcatgcatttttttttttttttgagatggagtctctctctgttgctcaggctggagtgcagtggtgtgatcttggctcactgcaacctctgcctcccaggcatcatcattggtccagaaatggcctatcttttcttcattcgtttctacattgtttattgattaattcagcaatttactaataatatgtttaaagtgctttaatgcacaaaacctgaaaaaagtcttgatgtccctaatatgtgtatagaatcattctcaggtcaatgtacctcctttactaaata

SEQ ID NO: 9379 - DNA, 1076 bp, Homo sapiens
atgaatgactaactgatagttgaaaagcaaatatcaatattgaaaatgtctcaattttgtcattatcttctctggtctgtattcctcagaatgaacaacttgtgctgtgttaaggattcctccatgatcacgcgccccatttgtacaccatgcttgggaaggtgcatgcagaccaatgttagtaatagtcaaaattcctgtgtcggtttgtgtggtttgctaaacaggactcaatgtatcatgaaacagtgtattatatagtcaactatggtcaactatgtcccagtgatatttatgagagggatctgaagtatttattgataatgcatatatgaaaaacggagaagaattaatgaaacagatatatctgtgttagaatgattctgtataaagatagggaatatcaagtctgttcttagtgttttgtgaatcacagagtgtaaaattattcccagtgaattaatgaataaatttaaagacaacatagaaatgaatgcagaaaaagagggtcaaccctggatcgatgatgagcactggtggagtatgagtcacatacgatgaatacgtgtctggaactctgaggtccatcgcagaagtcagtttcctctgtttcaactaactctgtagatagatgacaagaatagagaatgaattttttttgtttatgagtttttattttataattggttcaatgaaagaataaaacatatatgaataaataaataagttatgcattgtccaattataaaaatgtgtgatgaggtgtatttaatacgtatttaaattgatgaaagccaaaaataaatctaacatacctaacctttttggccaataatgaagagatagtataaattatatgctattttcgtgttcttggttagtggcaagttcaaagttgttcatacttcaaataacgattgcctaaatgtttaactacagataggtaaaaaggaaagatcaacaatgagaaaaatcacatttttgttattattttctctgctctgcactcatcagaatggacgtacttgtgatgatttaaagatgcctccaaggtcacgtgctctgtttgcaccatg

SEQ ID NO: 9380 - DNA, 1944 bp, Homo sapiens
ataaaataggacaggtagatgggctttctagaagcacagaaggtatgccttcagctcaatctcagtgtcagttgagttgtggaagagatgactcctgagccagtgacagactcattagtccatagctccgcaaagctggggaccacactcctctccttcactgctctgccccttgtgccttacatggacagcacatgcaataagcatctgttgaatgaataggtgaatacatggtgaataaaagaatggaggagtgaagcagtatatgaacaaatgagtctttgagtagacaaaggaacgaataaatgaagtaatgaaaatgggaatgagtacacgaatgagtgaatggatcaatgataggtccatgagtgactgaatcagtgataagtggataaatgcatggcgagttaatgagtgggtgagttcatgtgtaagtaaaaatgtcacaaagtgaatgagtggatgatgaatgactaagtcattgagcgaatgaatggaagattaataggtcaagtagtcaagaaatgaaagacaaacatgtaaatggatgagtgaatcaatgggtccatgaattcttgaatgaatttatgaattaacagataaatgaaagtcaatgagtaatgagaaaataaatgaatagatgagtctatgtatgaatcaatcaatgagttaatgactcattgaagaaccaaatgaatgaattaatctaggaattagtgagtttactaatgaataactcaaagaaagaggaaacaaccaaataaattaactggataaataagtcagtgaatgaaacaaattatgagcgaatagatagacaaagggatggataattgatggatatattacagctagtgaataaaagagtgaattagtgagtgagcaaatgagtcagtgaatgagtatgtaatcaaggaataaattagctctgggaatgagtaagtgaataagtgaatgagtcaataaattagtgaattagtcacttattgaagcataaggcagtgagtgaatgaactcacactgggactctttccctgactgttcaacagagagtagtcatgccccagcttcacaccacagcataaataactcaatcagagcacccaccctacgctatcgtgggcgtttgtttacatgtcatcactaaactgatgtgccgcaggggccaggaactgggtcaaattattctctgtatccctggtgcctgcccagctctgagcctcggaagagcacagtaaattgttgctgaatgaatgaacgatagctaaaaatacattggcttttttggaaccaggatggcccatctgagaatggtctgggagctgttctttggggagatgtgctgtgtgtcagatggtttgtggcatcctcctacgcaagtctagattctgccttgaatccagcttcctgtgtccagtgccagacagcgagacaggatactggcagttcggactgccctggacattgccccatccttgggcaatgctggcatggcatggtgaaatgaaagccctaggtcttcccgaaagctgcccttgcctctgccaagacaggagatcagaaataacccggtcttgtttttatgcctccagcgagtgggcccactccatgcctttccaagcaaccacattcctccttgctgtagttgtgggacactgggttgaagcaccccttgacctttatctggtagatgagaataacaatccctgtctggctgggtggatgtgctgctttacgggagattatttaatacatgttacataggtagcatggtacctgggaggaaagagatgtctcagaaatgttacatgccagttttcatcatccccacctaacgtagctatatttgattatttcaaatgcattaatttaaaagctctcaaatggatgtgatactcaaattcccctcttccagaagattggagagttcaactgagttctagg

SEQ ID NO: 9381 - DNA, 1212 bp, Homo sapiens
tgctgttgcctccggggtatccagggtaggcggctgctgggtccatgtagattgggtgctctgctggctacggaggggtcaaaggacaggtggcaagggtgcagagccgcagcctggccctgggattttcttctcagacctctgctccggggtccaccttcgggggaaaagagggcacaattttacaactttgtaagaggaaacctgaagttttctgacccctgattctccccagccctgtcaggattgatctaactctctgttgagatgcaaaagagtctggagataacagtactccccccaccatgaaaacaattattgtcaaaggagttttatagcaaacagaaaatccggcccagaattggctaaaacatttggggagctcacatcaggaaatgagattcgtttttatttcttgattctgctgaattggattgaaggcagcagaaggcattaagtgggatttgacctggaggaaggtggcctggcggtgctcctggcttccccgaccctccctccctagccgtgtgtagcaggcactcactttgcttacagcttcctcggtgccatgtatctgtttttggaatcacaccttgcctggaaggctgcttggacccatggccagtgccacacaggggcctgggcaccggctaactgcagacccagccacctgcttcttgaccacagaattcgagatttactcatgagctctcttgacgcactgactttgggatgcaaaccattatgactaggggcacttcccgtggcctggacttccacaaggaaaccctggttccaccgtcaggaaagctccaatacctggaaagaggttgtacctaaagtgttctctgtattggcggaaaatgtttcccgggcaacctcttttcattgtgaaggcttgaagagcttttggctgacttcccaaaagcaacctgggacacgcaaatagaagccatctgacgtctggtctacccagtgccatgtagattcggggaatcttcctggaggtgacaccaacatcggcgaagattcggcagttctgttttgattttttttgtttgttttttgatcagtgctaatcttcgatactcgaaggagaggttgtccgtgttgtcttctctttatttatgatgaaacatacacgggaaacctcttttttagtatcaaatcccaccctggaggcacttcctgttcctgatgcagccttcaggg

SEQ ID NO: 9382 - DNA, 1212 bp, Homo sapiens
catcctcaggcggactagctggaaggaaggcagactctggtgaagacgtgggccgtcaccgtcagccttcggtacttgaagagtggttatccctgctgtgttcgcttaatttatgacgaatcatacagggacatccagtttttcagtatcaaatactgctttggaaggcttcccggacagcgtcccgccttcaggcaaggggtcttggcttcacctcccacccaaggtatgtatgtgaacgggccatcgcagtgcactagcttcttcatgtgccacagccatgaccagaatcgaatctctgaggaagatggttacttctaaggctgtgattttctggaaggggctttggtgtctgcactacattattgggggaagttgaccagtgagaggcccattcacacaagacgtctgtcacctgctccaagtgaccctcacccttggtaagatgaatctctggagacatgctggctcggtagtgttactgtcatcagccggactgactgataggtaattggtcatcattattgcttttgttccagggcagaatttttgagtgccaaatcttgccagggaagggtttctggaagcagcaccgccctctggggagacttggcatccacatctgttggagtttgtggagagttagttgagcagtctgagctttgtttctgaggcgtctccctgagctcactctcctgccagagctgtgtcctgcccatggccataatggctattgagagggttggtgactttggccaccatgattttgtttcgataaagttctctctttttaaaaaaatcagattcttttgtttatagcataactacatggttcatgagttgatcaaataacaaggaatgacttggtcattccataaatagtgatggagtgcacactgtgttctaggtgattctggaccttagcagagagcagtgaatgaaatcaagttcttgctcatgtggactttacattctggtggaagagacggatgagaacacatgaattaggaagcgtaattttgtccactgctaggttttatggggaaagggaaagcgggttacagtgacagaaagaggtaaaagcaggtggacctttgtgttaaatacaggggtctggaaagctctctctgaggatgtgggtgggaatggagtggggtggaccagaggaaggtctggggtaggagcatttcaggaggagggcaaggcccatgg

SEQ ID NO: 9383 - DNA, 1404 bp, Homo sapiens
ggtctacacactgcggagtgctcctggcgtgtgacaagtggcttccctcttcttatttctaaaccttgtgcgtgtggattcaggaccacaatttcaactccagggaagggggactgtgccagcaccactccaagggaggtgagtgaagggttgcccaaactccagtgtgttcctaggacacccgtaagctgcctcactaatgctcggtgtccactctgtccacaggatggtggttggcagccactccccttggagaagtggaaggggactccttgtctgtcttgtctctgcttttctgtggtacttgaagagaagttgttcgtggtggattcgctttacttatgacgaatcattcacggacaacacttttttcagtaccaaatgctacctctaaggacttcctggacacaatggcagcttcaggaaagatagtctttgtgtcaaccatgtggaaaagccaagaatggatggcgggccatggacaatgcgctgacctagctgtaagtcacctggcccgataatccgagcctcccatgcacctataggaggtcttcccatgggtctcaccaactctggggaatcagctgtggttctgtcaccagcgtcacctcacaagactttgaagagaggctccctgggccccaggccgacttccagaagagatgttggtgtcagcaccgtccagggtgtgtgactggttgaccagaggggcatgcactgtgttcaccctgtgggccacctagtcaccaaccctcagcatcactcccactccaggaagactttccagagctcccaccaactctggggaagcggccatggacttgctgtgactgcttggtggactgcgatgacacgtgctcttgggggtgtatgtttacttaaaatgcaatgagtcagccttggcagccccttcaccactgtgacagcctccttgaagtgttgacttccgatgtgggacgccatgttgtcttctgttgagggacctgatgtgggccagcttttctcctgggtgtgtgactgaatccttcttcccagagcatgtgctgcctttgttaggtctgtcacgtcgtcctctaatacccagcatcctgtctctccctaggaggctccatggagataatgcggctttgggaagcggccatgattctcctgtcagggaccagtgagctacgcaaaagctccctgtcttgtctggaaggacgaactgcatccttgctgctggggagaaggcagtgccctcagcactcccttaaggtaagtgcgcctcgggtgagcatgcacttaatgtgggtgtatgtcactcggctcggcccactacccaatactatcccacccattcctaacaggactcccgagaagggcggccacctctgccagagaggcaatggatttctcaccagtgtt

SEQ ID NO: 9384 - DNA, 1404 bp, Homo sapiens; identical to SEQ ID NO: 9383

SEQ ID NO: 9385 - DNA, 1404 bp, Homo sapiens; identical to SEQ ID NO: 9383

SEQ ID NO: 9386 - DNA, 1120 bp, Homo sapiens
ggacgacgaatgttgctcggtgaaccccttttcggtatcaaattccaccagggaggccgtcttggaggctggggcacctcggggaaggacgccggcatcagcaccattctggggtacggggatggatggtcgaccagttggaaagtaattgtttctaatgtacttcacctggtccactagccgtccgtatccgctgcagcctgtggggcctgcgggccggggagccgatcgcgcttcagctcagcgcctttcctggtacttgaagggagatcgaccgtgttatattcgctttattgacttcgaataatacatggttgatcttttctcagtatcaaatctcaccttggaggacccgttggagatgaagcccttttgagggtaggagcaggacgggtgctttggagtcgctgcctcagtggggcctggtcaccgagagtgggccgggcaggggtctctttcctgtctctgtgtcttctcacctttgatgtcccatccgtcctcaggactgcttcccgggggcagcgctggcaccacgggacgcggcagccacgttcttgagccgatggcactctgggtacctgagaagaggttgtctgtgatgagttcgcttttattaatgacgaatataacacagatggcctgttttcagtaccgctaccgcccggtggtgtgcgggcgccacgcctgaggcgggactttccagggtacgtgaatgcatgggctggtgtgacatttgtcatcctttcccctgacccccgccattgaatcattttgggagagctttcggggggccatgtggactttggggaagatgctagggttgtgcactgtggtggggggcggtcatgaagctgatgagcaatggtgacggggctcagtctgtttttcatggccagtgtcatcgaggcagaggacacgggggagctagtcccgctggaaggcatcctgctggaaggccacccacccctcgccaggatgttgggggcggctgcatgcattccctgcacctgggctgccttctgctcatctcagtgctgtgagaccctgggtgggagctggtgccttgggtggccgtgtgcgtgtgctgctccttgtggtgcctgaggagaggtggcctgtg

SEQ ID NO: 9387 - DNA, 1120 bp, Homo sapiens; identical to SEQ ID NO: 9386

SEQ ID NO: 9388 - DNA, 1120 bp, Homo sapiens; identical to SEQ ID NO: 9386

SEQ ID NO: 9389 - DNA, 1120 bp, Homo sapiens; identical to SEQ ID NO: 9386

SEQ ID NO: 9390 - DNA, 1135 bp, Homo sapiens
cgtgcaagcgcctcaaaccaagtcacgcttggcgaggccccagtgacactgatgtgctgagccaccatttcagactgagtctgcaccctcagccacatgaacaatctcccctacctccctgggactctgcttctgtaactgtctcattcacacctgcctggctcactggaaatcctcttttgagcgcgggatatggcttgcccttgtccgtgtgcccccaggactttgcctctacagcattttcttacaccccctccccagcgtgccctcagccaagtgctttggcccggtgcttcccgcagctgcacagagaccttggccacgcccgcgcgccctgagcgcagctgggttccaggagactctcagctcagctgagctagttgcctggcacccacctgtcgcgcgcggagagggggttccctgttgcttttgtgtctgtttcctgtccctggtaggggaagtgatgtcgtggatggggaggggtgggcagggtagtttcccccgcttgttttgggtgcacaggagccccactgctgatgacgaactatctctaactggtcttgaccacgagctagttctgaattgcaggggcctcaaagcagcacctaaaccttgagggggagggtgctctgggtttccgtgaggtaaccaccttaaatgggagggaagttggggtgtctgctttgggaccagaggaagatagcttgagaggcattggcgaggttcgcagcgccccagggagagagaaaaagctgagactcctggggaatgacgttggggtgatggagtccggggaaagagaggtggggggagagcctgaggtccccaagtgaggggagtcctaggcagagctgctgattgtggggctgggaggtggagggcccctgattcgaaggccatttggtgagtgttttgctggaaatatttcctgtatataaacttctttcaatctacaataataaaggcttgaggtaaactgctttctggttgcctttggtccctttattttcttttccctctgaatagcggcaggaattaaacacaaatccctccctcgcgtccccatagtgaccttgggaagcgggacgggaaggagcctaggctggcaggggcgctggaggaggatggaggagga

SEQ ID NO: 9391 - DNA, 1157 bp, Homo sapiens
taggtgctttatgaaggtatatgctatatgccttttttttttttttttttggtcttttgatctttcattaaaactgctaagatttcttctccccagagctttcttgctaatgtgcctatatcctcttactttagctatattccttatacaaaggagcatcagtgtgtatatatcatttatttctatttttagtgggaagatcctggctgtaaggatgaataatgttaagtttaaacctgaaaaatctcagtagttcaaagataccaaaatcactactatgtgaaatgtgtgttttgaaagcagtttgccagccgtgtgagacctgcggtgtggcctgcagtgcctgagtatgatgccccacttgtctttttgtattttttctagtgctactgtctaagagctggagctacagagcttgaaattaccactgaaaacactgaaatgttgggcccttcactgcttcctcataaggataccagaggcaacctggcatattaagcttgacacttggcagatcactgtgtaaattgtttttcaggaatacaagttgggacacttctgttcatttgacctttgagttgacccttaaattttattattgttttttttcccctcagtcttcagctcactgcttcacttctagttccacccacttaccaaatatgattgactcatgcaggtgaattaaaccattattgcacactttttccctctcctctctctcagtattactcttaacttgaatattttaacctgaacaatttaaataggcttgacattcccatgctgctttcaagcctttttttttttttttttgagacagagtttcactcttgttccctggctggagtgcaatggcacagtctcggctcactgcaacctccacctcccgggttcaagtgatcctcttgcctcagcctcccaagtagctgggattacaggctcctgccaccatgcccagctaattttttttttttttttttttttttgtatttttagtagagacggagttttaccttgttggccaggctagtctcgaactcgtgacctcaggtgatccgtctgcctcagcatcccaaagtgctgggattacaggcgttagccaccatgcagcccctttcaagccttttaacatcatgtcaccttcacaatgagca

SEQ ID NO: 9392 - DNA, 1124 bp, Homo sapiens
ttctctaaaaaaaaaaataaaataaaaataaaaataaaaaaaaattaagtagtcagtggaatcatctaaactggtctctgggaccatgagagctgagagcatccggagcccacctaaccctgagccttcctcttgccttggtcagtttccttctttgtttttcaaatctttttttaaaagccattttcaagtaatcaattaatatgtgaatacggccccatttacattttttcttcattgcaaataaaactgaaattttccctaaccttatcccctgagattggtctaccatccccacatctcaaagtgactgctgcctggagtttgctgtgtgtcattccagaccattttctccctgtggggggtgggtgggtgggtgtgtgtgtgtgtgtgtgtgtgtgtgtgtgtatttatccacataaataatataaatatgtatttattcacagagtatatagcattttttgtttcatttctttaaaaaattgacatgagagcagttttagtaacaaaaaccttttatacgtttttaggatcttggtggcgctctcggttcataatgctctgagttggtgttacgtcatattatcctgtattgtactgtgtatacatacgttacgtaaatgcttaatgtggtctcgcatgtttttctgtgaatttggcttaaactttcagactaggcatctaggaggtggcggcaagtggaaggtggagctgtcacagacactcggcccccgcagcctgtgcataggtgctctaggctaattttacaggtgtgatgaccgggccagagtgaaaccatgttgtctgattttagaacagaggtcacttatgcttcaccaagctgctggaaatgtggaattttgtttctcaattattggacctggtcctgaggagatgtttccctttagagaacatcattgacgcttttaagagtattttactagatgttgaaaacgttgaggtcttattaatgtagtgaccccaccaccaccaccccctgccccccccccacacacacacatcccttgctaaattattacatcaaatcatacaggaatctggcgctatcagagccagggttaaggcctaatagtgtcactagttactgagcttcttgatta

SEQ ID NO: 9393 - DNA, 1175 bp, Homo sapiens
gtatttggttggctctgcgccttggcattgtgggacactcctaggcgacaggctgcaaatcccccctgcagagttgggtcatggcttggtttgtggcatctgtgccctgtagtccctgaacagtgtactataactgatgacatcagccatggagatcattttgtttaaatgccgtttaagggtgtagtctgtgggtttcaccaaataaaataattaccatcaccatttatcattgaattaagccatgtaatttagcattaattctgtagatatgtggctttgagaggctaatatttgcataccaataaagattcaatttctggtatattttaaccgccattcaataaaatctcatgttatttgactcattgttttttttcctcctagcttgtttatgaatttttcttaagatttttagagtctccagatttccaacctaatatagcgaagaaatatattgatcagaagtttgtattgcaggtaaggtacaaattagctgacactctgaaagccctgatggaatgatgacacccagccactaagtgtctttttcttctcaaagcttttagagctctttgacagtgaagatcctcgggagagagattttcttaaaaccacccttcacagaatctatgggaaattcctaggcttgagagcttacatcagaaaacagataaataatatattttataggtaagtcacgtgtggatggcgttgtccttgtgtgtggtgatgctcatttcccccctcgatgctcccctaccccatcgtctcctctgacaggactcagcatgtggagggggtttctcaaagcctatttgtcatgtgcaggtggacccccttgtgcactgtgtgcagggggctgctgggctcatcctccctgccttcctcccctctccccacagctccctcctgagccaccaagctccccagcgcctcatcctgggtccctccattgttcctgtttctactgaaaggtcaagtttcctggaaatgtggatgaattggttccatccagaccaactgtattagtgaaggttctctagaaggacaggacgcataggatagatgaatatatgaaggggagtttattaggagagttgactcacacgatcacaaggtgaagacccacaataggctgtctgcaggccgagtcccaaaacctcaaaagtagg

SEQ ID NO: 9394 - DNA, 1421 bp, Homo sapiens
cccaggtctcctggctcttaagacgtttcctttttaatattataggaatgggaatgctggctccttttacagtactggtccctttacactgtactgcatactcgttttttcagtggatatatgagcttcttgtcaaaattatgtgggtcccatgaagaaacatctaaccaggggaagggggaaggattgagacataagacgtacttatataagatttcttttaagaattccaatcttggacatgttaaatttttttatattttctcatgtttaaatctcagttcgtttttcatgctgtgctcagcacgtaagtgtggggaaatggagcaggggggctgcgggaggagccgctggctgggctcaacatgcctgtgccttttccccttcagtgtgttcttgtgtctgatgcatctctaacacagatgacattttactgtttttcagagagaagctaaaaatgaaagaacgggaagaagcatgggttaaaatagaaaatctagccaaagccaatccccaggtactaaaaaagagaataacatgaaaacgcccagggttacttgaatgtttttataagataggaatatatgtcttcaccatggggggggtctcgatttcactaacgttgtatatgaaaatgtctgcaataaaaagtacttttaaactttgtaaccctccttttgtacaagtacttattttgccccatatcgttttaccacagaattgacttttttcctctgctttttaaataagatctgaatcttatgcatatactgtggtaaaaagaaaacttgaatacagcctgagactgtgcctcctctctcagatatcatagatgctgtcactcaaacagcatttccctttctttttcatatgaaattagttctaaaagaaaggaaattagattggaaatagattaagtatgacgttttgatgtcctctttctttgtatgaggtttctgtaagcccagccttttatcattaaaaatcagctgaattctgccacattagcagccaaccctccttcccaccccagcagcgggtgccagtgtgctctggtgagtctgcgccgatggccggacgtcccggagctgccggcagttccagctgccggggctgccagggtccgggagggtttcctggtgtcatggtctttgggtttgatgtacgctgctgtaaatgactagagcgttatgacagtttcttcacgttctgtgtgcctgattataacagtgcctcttaaaaagaaaatctttttcagaaaatcttttgtctgaatctttgccactcttaagaattctcaagctttccttcaactctccagaaaagattttaccgaacaatgtatttcttttagtgagagatatgcatagttacctaagttggtttttagatttctctgacacttaataaaaagttataca

SEQ ID NO: 9395 - DNA, 2676 bp, Homo sapiens
ccgccaccccagcgtagtccaagtcagactatttcacaaagtcagagcgataggaaagcaccctgcccttcatcttcatgttctcccaaatggaacttaggatcttttaacataggtggttctgtgataacatcagtgttttccaaatcaaaggaacgctttaaaaaataggacctattttttaagactttacagcctttgaaatggtttccacgtgattgttacgccagcagttctcgttttgtttgtttttcaatctcagtgaaatggctctttgctttcgagttctcacgcaacgtactgggcaaatgacaatcctcagccgctggtattttctaaggggtctcttcactttgatgagtgacatgaacaccgtgtctccttctcttgtgtgtacctaaagccatatttccaagtctgtggtactccaggattccaggagtaagcctgtagaagagatttattttaaaagagattgctctgaaatttatcttaaaagagcttgctctgtctaccttgacagaaattggagttttaaaattatgtgttaatatttttatttgcagatttcgtttccgtcaacttaaacattgttgcccttcaacaaggctcttgaattaataaaattatagtctctaagaattccacattttatggaaagttagagcaaaatcattttgagttaagccagttcttagcctaatgcaaactgcagcgcctttaagcataaagtaacacaacagcattgcacggggccggcactgccgctgccttcactgaaggctgcagtgctgttctgagagcttggaggaggcaccagcgaggatgacgtttagtggagctctttctgttgaaaagagctcacgttatcaacaccttgtaaggaaaatacagtgtctgagttttcatcggtcttcacatgctgctatatattccacagagttccttgcatgtactgagcttttgttttagatggaatagcacaaggagaaaaatctttaaacttagtgctttgtctattctttatttctctcagggtggccagtattttgacttatttatcctgcttgaaagctacttgagatgtgtactgctattctaaacacgtgatctagtttctttcatctctggcataagattatataacttaatgttaagtgtcttgaggcataaaagacaaaatgtggcttattttaggatctgttttttcatcgaggtctcgggtatcctttcaaagatagtgagaagcagacactgctccttgtgcagctctggtacctcctgcccactgctgtcacttcaagccactggcaatgcttctgtcctcgtgtcttggaggaaaatcacctggggggaggggacttcttgtggtaagagcaagtgcaggtatgaaatgcgaagattgccccagctaaaagtggacaagtccgctttgtgagatgaatacttcctgagaaacttgacaagtatctctccattttaccattatgaaaactatcattaaaaaaaacagtttagatgccttctccttttgagggaaaaagggtgctttttattgtataaagcagcgtcttatgtattttgatataccattgtttgaacttccgtctttagctgatagattctcaaatatccttgattttggatgttcagtatgtttgtgagagaggtttctgggaagactctctttttgccctcgggaaaaagcaaaatatcaatgtttgggtgactgtgtaaagctcagtgtgtaagaacatctttttgtctaggttttctttctgctctttattgaagacaaacactcaccaaaaagaaaaataaaagttttcagagaaactaattttctttggcaagagtattacttaatattttggcctcctaaagtttccctagttagtactcggactcctgtgctaattgtcagcttacatatcattgtatagagactgtttattctgtaccaaactgatttcaaaagtactacattgaaaataaaccggtgactgtttttcttcataaagttctgcgtttggcatcttcactctttccaaaatgtatctgtacatcagaaatgtcactattccaagtgtctttttagtgtggctttagtatggcttccttttaatattgtacatacattgtatctttgttttatggtaataagtaataaaaatgtagacttcatattttgtacaaaatgtcctatgtacagaataaaaaagttcatagaaacagcaaatataggtaagtggcacaattatttttctttagaaaatatctgtaactttatgcattagtgaaatgttaagtaccgacatattttttaacattttgtaattcaaaactttttgttttgacattgtttatgaagagaaacttcatacacttgccatttaatatgctcttttatctaattttcaaaaactctaaaaaacggtgtatcatatggactaaataaagaacatgtgaattttattgctcatcatgaaactaaatttagccatggtgttgagcaagctggctctgacgttatcgggttcccgttaggtcagggccgcccacacacagggacgctgactgcagaggggctggccatctccatccagcccgcctggagcgctggctgcgccagatgctagccacagctgttcaaagctaagtctatccactgatttt

SEQ ID NO: 9396 - DNA, 1223 bp, Homo sapiens
aggctgaggcaggagaatcgcttgaacctgggaggtggaggttgcagtgagccgagatcaccccactgcactccagcttgggcgacagagcaaaactccgtctcaaaaaaataaaataatagaaataaagtgcacaataaatgtaatgtgctcgaatcacctagaaactacccacccccccaccaccccccaaccatctgtggaaaaatcgtcttccacgaaactggtccctgttgccaaaaatgttgagggccactgatatagaaagcaaagcaaagcatggtaaattctctgaggctgccaccttcagcctttagagtatgtaggaattgactcatactcttaaataagcaaaaatggagcgccactagggttatcctgttaataacgtgttgttttttcaaatatgaatagtttttgtctcgctagatattttgcaacatcaaaatgttccattgtaatggcatattttagtttacttagttttgttactttatgtgaaaaccattaactctttctctgttaatataggtctaaaacaggctttggaaactgtgaatgactacaatcctctgatgaaagatttccctctgaatgatttgctgtctgccacggagctggacaaaataagacaggcgcttgttgccattttcacacatttgagaaagatccgaaacacaaaatatcctattcagagggcactgcgtttggtggaggcaatttcaagagacttgagttctcaattactcaaagtattgggcactaggaaattgatgcatgttgcttatgaagaatttgaaaaagtaagtttgaatatataagacaaccaacctcaagacattgagatgaaaatatgtcttaataataagcctcacttttgaaattatatcctaggttatggtagcatgctttgaagtttttcagacttgggatgatgagtatgagaaacttcaggtattgttgagagacatcgtcaaaagaaaaagggaagaaaatctgaagatggtgtggcgtatcaaccctgcccacaggaagctgcaggcccgccttgaccagatgagaaaatttagacgccagcatgaacagctaagagctgttatcgtcagggtcctgaggccacaggtaagatttgcattctaaaagtttgtgttttgtttttgtttttgttttgttttttgtttggtgttttttttttgttgttgttgttgagatgaagtttcact

SEQ ID NO: 9397 - DNA, 1104 bp, Homo sapiens
gaggtccctgaaccccaagatatgaaagtggctgaggttctctttgatgctgcagatgcaaatgccattgaggaagtaaaccttgcttatgagaacgtcaaggaagtggatggactggatgtttccaaagagggcacggaagcctgggaggctgctatgaagaggtacgatgagaggatcgacagagtggagacccggatcaccgctcgccttcgggatcagcttggcacagccaagaatgccaacgagatgtttaggattttctccaggtttaatgcactgtttgtcaggcctcacatccgtggggccattcgcgaataccagacccagctgatccagcgcgtgaaagatgacattgagtctcttcacgacaagttcaaggtccagtacccacagagtcaggcttgtaagatgagtcacgttcgtgacttgccccctgtgtcagggtctatcatctgggctaaacagatcgacaggcagctgacggcctacatgaagcgggtggaagatgtccttggcaagggctgggagaatcacgtggaggggcagaagctgaagcaggatggagacagcttccgcatgaagctcaacacgcaggagatctttgatgactgggcaaggaaggtgcagcagcgcaacctcggtgtctcggggcgcattttcaccatcgaaagtactcgggttcggggccgaactggaaatgtgcttaagctgaaagttaactttcttcctgagattatcacactatccaaagaagtccggaacctcaaatggcttggtttccgcgtcccactggcgattgtgaacaaagcccatcaagcaaaccagctttacccgtttgccatctcactgatcgagagcgttcgtacctatgaacggacctgcgagaaggtggaggagcggaacaccatttcccttttggtggctggcttgaaaaaggaagtgcaggccctgatcgcagaaggcattgcgttggtgtgggagtcctacaaacttgacccatatgtacagcgcttagcagagactgtcttcaacttccaagaaaaggtatgctctcatgtaatcctcaggtgtcctggtaacgaatgaagcacagtaatagcg

SEQ ID NO: 9398 - DNA, 1174 bp, Homo sapiens
ccgggttcaagcgattctcctgcctcagcctccctagtagctgggattacaggcatgtgccaccacgcccggctaattttgtatttttagtagagacagggtttctccatattggtcaggctggtctcgaactcccgacctcaagtgatctgctcgcccggcctcccaaagtgctgggattacaggcatgagccaccgcgcctggcctgaaaccattttttaaagaaatatttcaccatttaaagaaatgttggcaagctaaatagcatcttatgtttctctcgacagcttcgacaaaatttggatgccctcctgaaccagctgaaaagcttccctgcccggttgcgacagtatgcgtcctatgagtttgttcagaggcttctgaaaggttacatgaaggtaggtggccagtatcgcacggtgatgagtgtccattagaaacgcacctgcacagatcactttgtttactttctccacagataaatatgctggtgattgaactgaaatccgaagcacttaaagaccgccattggaaacagctcatgaaaaggcttcacgttaattgggttgtttctgagctaacccttggccaaatctgggatgttgacttgcagaaaaatgaagcgattgtcaaggatgtactgcttgtggcacaaggggagatggctttggaagaatttttgaagcaggcgagtaataggactgaacggctgctttacgttgtgtttcgggctgttacatagatctgagctatgtaaaaatggagccttgtcatctgtggtccttttggttcttataatgctgggtcccttgtgcaggtagtgaatgcccacatattgataacatgcatctttctggtttgaattcagataagagaagtgtggaatacttatgaactagacttggttaattatcagaacaagtgccgcttgatccgtggctgggatgacctcttcaacaaggtcaaagaacacatcaacagcgtctcggccatgaagctctctccgtattacaaggtgctgttgctggggaagctttccctccccaccagtggtctcccacgctttcactgtaatgccttttcactgacagttactaggtacctgttttttattgtattttttgagacagggtctcactctgtctcccacgctggagtgcagtggcaccatca

SEQ ID NO: 9399 - DNA, 2573 bp, Homo sapiens
tacaaaaaaaaattagccgggcgtggtggtgggcgcctgtagtcccagctacttaggaggctcaggcaggagaatggcgtgaacccgggaggcggagcttgcagtgagccgagatcgtgccactgcactccagcctgggcgacagagcaagactccgtctcaaaaataaataaataaataaataaataaagtaacttactaaggcaaatgacatgaaattctttgcattcattgaattcctcttcaagatcttgttaggtaagtgtgtatcttttgccaagggctagaagaaattctgatgtgatctgaatttgggctggagattgccaccaccagacacatgttctttcccttcctgcagtttgaaatcttaccttgattcaccttatatgtgtatataatatttttgcaacttgagtgttattttaattttaggttctattttgtgggtgatgaagatttgcttgaaatcattggaaacagcaagaatgtcgctaaattacagaaacacttcaagaagatgtttgctggagtttcgagcatcatcctgaacgaggataactctgttgttttgggtatttcatctcgggaaggagaggaggtaaatttatgttcgtaacttttaaaacttctctcacatttttgcatacctcatttcttaaaattgtatttatttcaggttatgtttaaaactcctgtgtcaattactgaacatcccaaaatcaatgagtggctcacattggtagaaaaggagatgagagtcaccctggccaaactgcttgctgagtctgttacggaagttgagatttttggtaaagcaacttcaattgacccaaatacctacatcacttggattgataaataccaggtaatctatagtagaagtgagtgggctcgtggtgaaaacgcagaccaatctttaaaatgatcctttgggatcttgtttctgtgtctttcaggcccagcttgtggttttgtcagcccagatagcctggtctgagaacgtggagaccgcactgagcagcatgggcggaggtggagatgccgcgcccttgcactctgtgctgagcaatgtggaggtcaccctcaatgtgttagcagactctgtcctcatggagcagcccccactccgaaggcggaagctagaacacttggttagtctcacacctgactccttccttaccagttagactcttacaccctcaaccacacagttaaatggaaatcatgcttgaaaaaggtttcaggtagtatcaaggagaacagtggatggtgtatggatatcctctgagggtgggcatttggctccctgtccctgttgaaaggtaatctcaggggcatgcaggggttacgcgacatcacggtagagaggaagggatcaaccttggtcaggatctcttgctctttcctgtcatctccccagagaggtggccacagcagtgctaagctgcacggcacgggcagtgcttgctgcgagccccatggcggcacgtggcagactcctaggatagacgtcagaaagctagtcttccatgatgttttagaatggttgcagaattttaaaatatttaaagccaggtgtttctgtttctttgtttttgctgcagctctgggttctgtgtaataccatctcatgagtaacatttctctcatctctgaaagtgaatttgccttttggaacatttactgaaagccattgtaactggacctagaacctcaatttcagtttaacagtccacaaacccggagaatgcactgtattgctttagtgtagatgaacttttaaagtgactctctttcttcagattacagagttggttcaccagagagatgttacaaggtccttgatcaaaagcaagattgacaacgccaaatcttttgaatggctcagccagatgcgattttactttgaccctaagcaaactgatgtgttacagcagttgtcaattcaaatggcaaatgccaaatttaactatggctttgagtacctgggtgttcaggacaaactggtccagacccccctcactgaccgctgctatttgacaatgacacaagccttggaggccaggctggggggttccccatttggtaagttcttccacagatctggacagatggaatcatatattaaaatgtttaaagataaagctaatgatttgaatgtacttctttttgagatggagtgtctgtcgcccaggctggagcacagtggtgcgatcttggctcactgcaagctccacctcccgggttcaagccattctcctgcctcagcctcctgagtagctgggattacaggcacacgccatcacaccaggctaatttttgtatttttcatagagacagggtttcaccatgttggccaggctggtctcgaactcctgacctggtgaccccctcaccttggcctcccaaagtgctgggattacaggcatgagtcaccacgcccggcctgaatgtacttcttaattatgtggtgtgtacattctaaaatcttaaatttgtttgcatttattactactttgatttttttttttttgagatggagtcttgctctgtctcccaggctggagttc

SEQ ID NO: 9400 - DNA, 1126 bp, Homo sapiens
aagcagattgtcagagtcagggtttgagccccgtgaagccagcactgaggcaggtggtatggtagtctgctcaggccaccatatccaagcagcacaggctgtgtggcttaacaatagaaatgtatttcctcacagttctggaggctggggagtccaagatcaaggtgccagcggggttcagttcccagtgagggccctcttcctggcttgcacgtggctattttgtcgccacaaggcctttcctcgggatacatgcagggagagcgctctggttcctcctcctcttcttagaagggcaccagtcctgtggatcagcggccccaacccttatggcctcatttaaccttagttatgtccttacacgctctttcgctaaagacaaacccactagggttagggcatcaacatactgatttgtggcaagggagaggggagacaattgagggcacagcaggtggttttagcgcctttcttcctctcctttccaggcaatgggccggatctttgtgggcctttgccaggtgggtgcctggggctgctttgacgagttcaaccgcctggaggagcggatgctctcggctgtgtcccagcaggtgcagtgcatacaggaagcactgcgtgaacattccaaccccaactacgacaagagtaagacacctcttcttcaaaaattacttagagaatgtagagggaaattccctagtgaactaattttctacctcttggattagaaataagcaagaatttagctcacaggagctcactgttacaggcagtgtagtgagctgtggttaaagacggaaggtaagaaacccaggccaggcgtagtggctcacgtgtgtaatcccagcactttgggaggctgaggcggacagatcacttgaggtcaggagttcaagaccagtctggccaacgtggtgaaacccatctctactgaaaatataaaaattagcctgacatggtggtgcacgcctataatcccagctattcggaaggctgaggcagggagagtcccttgaacccaggaggcagaggttgtagtgaactgagatcatgccactgcactccagcctaggcaacagagcaaaactgttcccccaaaaaaagaaacccaggactgtattgc

SEQ ID NO: 9401 - DNA, 1100 bp, Homo sapiens
agtgcaggcaatgtgaagagagagagaatccagaagataaagagggagaaagaggaacgaggggaagcagttgatgaaggagaaattgctgaaaatctccctgaacaagaggttcgttacaaacgttttgatcactcaaaccttatacgttatttaaatttacctttttaacatttaagccatgacttgtgagttcttcttgcagttcacatgtcttgggatggctgaaatagactgtaatgttgacccagtgagtcgagtgcacgaatgtgggcgagtggtgctcgcaccctttgttcaccaacagttactgatcacgcacctcctggggatgcagcgggcagtacttgagccatgctgcgctgctcacagcccagccctctccccgtagattctgatacagagcgtctgtgagacgatggtgccaaagctggtggcagaggacatcccgctgctcttcagcctcctgtcggacgtgttccctggagtccagtatcacaggggtgagatgactgcccttcgagaggagctgaagaaagtgtgtcaggagatgtatttgacatatggagatggagaagaagttggtggaatgtgggttgaaaaggtaacttggattgtttcactggccactgccctcacagaccctgctggctttagtgtctggtaatgacaaccgtgggcccttcgatgaaactgtccacaaaggctgtggaggtgcataatatgctttatgaagatttgcccaaggcctatttgaatttttgttgttgttgtttaaatgaagaggaaacaatacttaacctgaaaattttacatgatacagttcaatttctgaaaatgctaagtgcatgactatattggaaagttgtttatactgataaaaattctgcttaccagactttccagtgccagagatgaacaacctgaatcgctgatcaatacgtagtttacattctgtattggcttctttccttcctctatgtgattcatttaagaaaaagtttattgtttacacaagctgtgtgtgtttggcctgagagatgctgtacgggattgaacacatagctcatccattgggtctcttgttgtcctcggcggga

SEQ ID NO: 9402 - DNA, 1367 bp, Homo sapiens
ttccctttttaatagcgatatctggtttatgccatactctggtccctgtctggagacagccggctaaaaatgagagcagagctgggtgaatacatcagaagaatcacgaccgtgcctctgcccactgcgcccaacatacccattatcgattatgaggtgagcatgcagctaccacccgtgtttctgattctcgccttgttgatttaactcatcctggaacaagctgaccatggaccttggcttcgtcttttcattttattccatttcatagaaggactttatccttttagttccatgtgttagcaaagagtgcagattaacctgaccaattacttccttgttctgaaagttcaagtttgtgttcaggtaaacaaacctcgtgaggaggcaccttggttgcagccggactcacacttccatctccgtgtgtaggtgtccatcagcggagaatggtctccgtggcaggccaaggtgcctcagattgaagtggagacgcacaaggtggcagcccctgatgtcgtcgtgccaacgctggacacagtccgccacgaagccctcttgtacacttggctggccgaacacaagcccctggtcttgtgtggccctcctgggtctggcaagaccatgacactcttcagcgccctccgggccttgcctgacatggaggtaaagaggccaggaggtgggcagcagaccttttggtgctgagcatggggttggtcttacagtgtggttttgtgtcttccctccaaaggtggtgggtctcaacttctccagtgctactactccagagctgcttctgaagacttttgatcactactgcgagtacaggcgcacacctaatggggtggttttggctcctgttcaacttggaaagtggctggtgttgttctgtgatgaaatcaacttgccagatatggataaatatgggacccagagggtcatatccttcatcagacaggtttgtttctatccacaaggcccttcctgccccacaatgtttcttgttcaagttttgctcttaatgtggtacctgtcccttccttcagatggtggagcacggaggcttttaccgtacctcagatcaaacatgggtgaagctggagagaatccagtttgttggggcttgtaatccccccacagaccctggaagaaagcccctctcacacaggtaaaacagctcggtagactgctctgcttcacacacgcacagctccaggattgctgtaaacacagcgccacaaaaacctggttttgataataaagacaacaatactgcttattgtggattcctcttgggttacttctctgtgctgtaatgccaggaaaacatgttaaaaataaaagcattggccgggcgcagtggc

SEQ ID NO: 9403 - DNA, 1581 bp, Homo sapiens
gagtaagtgtgtgtgccgggtcacaccaggcctcatgctgtcctaccacctccacctcagccttctccaccaagcagcttcccccttctcttctttctaagtccagcttaaccatcctcagtttatcctaagcagaacttcattcttcctcccccagcactgcatacctgccataattatggccctttgaccttctgctggaattgcattagtctctcatgtcagtctagaggacaggaccgtgtcttactggtctttgcattcctcctggacttcacaaataacagttgctcagcaaatgtttaatatacaagttcaagttaaaacatgtccaaaatactgtagacactagatatgagtcaaaaggggaatgaggcattataagccttaacattgatcagttctcgtaatgtttcagaatattccgtcaacctcaaggccacttgcttctgattggtgttagtggagcaggaaaaactaccctgtctcgtttcgtcgcctggatgaacggtttgagtgtgtaccagattaaggtgcgtctggtcggtggcctcttaatcccagcaacagatgtgtgtgcagagctcagtgagtaggaatggacctaacttgcctctgcttctgtaggtccataggaagtacacaggggaagactttgatgaagatctacggacagtgttgagacgttctggctgtaaaaatgaaaagatagcatttataatggatgaatctaatgtgttagattctggattcctggagcgaatgaatacccttctggccaatggagaggtaattaggtgacgtgttgcgttgcattacgtgttaccgggggaccagtaagtcagcactgtgctgtttcccaggtgcctggtctctttgaaggagacgagtatgccaccttgatgacgcagtgcaaagagggggcacagaaggaaggcctgatgctggactcgcacgaggagctctacaagtggttcactagccaggttatccgcaacctccacgtcgtgttcaccatgaacccgtcctcggagggactcaaggaccgggcagctacatcaccagcacttttcaacaggtacgtgggcctttacttggctctgggtcaggaaagtcggtgtccttccaagggacaaagcctgcccctcatagctgtcctgaaacatgggcctctttctcaggtgtgtgttgaattggtttggagactggtccaccgaagcactgtatcaggttggcaaagaattcacaagtaagatggatctggagaagccaaattacatcgtgcctgattacatgccagttgtgtatgataagctgccgcagccaccatcccatcgggaagccattgtgaacagctgtgtgtttgttcatcagactcttcaccaggtgggttcagttttgagatcaacagataaaccacaaaactaaccatcatgctaatataaaactaaattgctataaaaatagaccttaaggccaggtgcagtgactcatgcctgtaatcccagcactttgggaggccaaggcgggaggatcacttgaacccaggagttcaagaccagcctgggcaacatggcgaga

SEQ ID NO: 9404 - DNA, 2109 bp, Homo sapiens
actaaaaataggaaattagctgggcgtggtggtgcatacctgtaatcccagctgctcaggaggctgaggcaggagaatcactagaacctgggaggcagaggttgcagtgagctgagatcgcaccactgcactccagcctaggcgacagagctagactcagtctcaaataaatagtaaatatattcttaatctttatggggataaagaaattaggacttgtgagacattttaaaggtaatatcctgctttttaaggaatgctagcattttgtaagatcttcataatcatttaagagatcagctacttaccctattccagagggtttaatacagaaaagtctctcatttcttagctcttctaagcagctagctgtcctttctctcattggagttggagctcctggctgttttggttcattctcaccatgctttgctctatcttctcccacccatcgaccctcatccactcctgctgccactcagctgtgaagtcgatcaagaagcagcacctggtggaggtgaggtccatggccaaccctcctgctgctgtgaagctggcgctggagtccatctgcctgctgctgggggaaagcaccacagactggaagcagatccgctccatcatcatgcgggagaacttcatccccaccatcgtcaacttctctgcagaggagatcaggtgagaaagtggaagtgccaaggtattgccagaaattgaaatcagttgttcaggccaggcacggtggctcacgcctccaatcccagaactttcggctgttcaggccaggcacagtggctcacggctccaatcccagaactttgggaggctgaggcaggtgaagtgcttgagcctaggagttagagaccaacctgggctacatggcgacaccctgtctctacaaaaaaatacaaaaatgagctgggcggggtggcatgcgcctgtagtcctagctacttgggaggctgaggtgggaggattgcctgaacccaggggatcaaggcttcagtgaaccgagatcacaccaccgcactccagcctgggtgacagagaaaaaccctgtctcattaaaaaagaagaaagaaaaaaattgttcaagtgttgagcacattttcagctttcacctgagaaccaagggtcagtctagctcatccccagtggtcagtcactggggcaatgagatgggagctggctctggtctcttccattttaattttatgaaaactcttccttgcttttgtcctgcatgtgtttagaaatatcattcgtcttttacagtgacgccataagggagaagatgaagaaaaattacatgtccaatccaagttacaattatgaaattgtgaatcgggcttccctggcttgcggccctatggtgaaatgggcaattgcacaggtgattaacacagccaggagctcccgtgtgaaaggtgacctcttttcctgtcacttaaataacagttatcaattggttcttcccagcttaactatgcagacatgttaaagagagtggagcccctacgcaatgagctgcagaagctggaagatgacgccaaggacaaccagcagaaggccaacgaggtggagcagatgatccgagacctggaagccagcatcgcccgctacaaggaggaatacgccgtcctgatctcagaggcccaggccatcaaggcagacctggcagctgtcgaggcaaaagtaagattatcatcattgatcctcagcctttcctgctgtggaagcagagattaacacacttcaacatgcgctgcatgcaccatgctggcctcggtgaattcgctctttaacatctgtaaggccccggaggacttttttcctggaaaataatacacactgagtagtcactaagtgttgttaattaggatagattgatacaaactggacacttttcagccgttgaatcccccaccagcagctccagacctgtttgctctgctgcctgagggcctcgctccgtacccagcttctgccccgctgagattctgagtcgtgtgtggtcattagttatatatgatctgggtctcatctcctctgggactgtgaacaacttgggcacgtttctaacccacccaaaaccctgcacataatgtg

SEQ ID NO: 9405 - DNA, 1202 bp, Homo sapiens
taacgttttaactggctagaccgtaggtagatcacattagcttatttgtgtcctttcctcatttgtagaatggttcgataacagtgtcagcctcatagggctgttatgaggattacgtgacgtagtgtctgtaatttgacacggtccttggcaattaaaattctgtataatgttaatcccttgctgctgcgacatcattgatgttgatacgtgctgtctagaaggatcgtaaacatgaaaaagctattctaacagtgcaggatgctgagaggatgattgtcccagaaggaaaaagatttttaactatggccctcttggtgtatgactcaagctacctcctcatgccaatagttgttcaaaaggatgaggtgatgttagcattaagcatgtaagctttattggtaaacctgaaaacgtctccggaaaccactctcgggtggtggtaacagcctatcaatcagggtctctcatcagggactcggctaaccgtgatcctgtgctttccccattcggtgtttcaaccttctcttctgtggcctcatcctcaggtatccgctgatcattgacccctctggacaggccacagaattcattatgaatgaatataaggatcgtaagatcacacggaccagcttcctggatgacgccttcagaaagaacttagagagtgcactgagattcggtaacccccttctggtccaggttggtgttggcctttgaattcttgaaacactgcattcaagagtgaattcctttttgggggctgcctttagttttcaactttgtaagacttcattttgtatcagaaggataaagctttgcggtggttctgtaatagataaattcaacagaatcattatttgcatttaaaattctattcagtggtcgggcgaggtggctcacacctgtaatctcagcactttgggaggccgaggcgggtggatcatctaaggtcaggaattcaagaaaagcctggctaaaccccatctctacaaaaaatacaaaaattagctggttgaggtggctggcacctgtagtcccagctactcgggaggctgaggcaggagaatcacttgaacccgggaggcggaggttgcagtgagccgagatcatgccactgcactccagcctgggagacagaaagagactgtatcttaaaaaaaaaaaaaattatattcagtacagccataaaaagcaagaaa

SEQ ID NO: 9406 - DNA, 1101 bp, Homo sapiens
gactaggatgttccacgtttgtggcaaacacttctgagagcataccttttgaaggattattgcaaactctggatgttttattcatttaaggggaatttcagctccgtttgcgtcagctggaaaaatctctactacaagctctgaacgaggtgaaagggcgcattttggatgacgacacgatcataaccactctggagaacctgaagagagaggctgcagaggtcaccaggaaagttgaggagacggacattgtcatgcaggaggtggagaccgtgtcccagcagtacctcccgctctccaccgcctgcagcagcatctacttcaccatggagtccctcaagcaggtgggtgccttggccatgcagagactggcgggccccgcacagtagctccttggccgcacagaggctggcgggccctgcacagtagctccttggccacgcagaagttcagcggggtgccgagggagctgcctcaccgctgcccactgcttcctttcagatacacttcttgtaccagtactccctccagtttttcctggacatttatcacaacgtcctatacgagaacccgaacctgaagggtgtcaccgaccacacacagcgcctgtccattataacaaaggacctcttccaggtagagtgaggtcctcagccgctccctggcgggggggaagcagggtgctgcttctcttatggaacaacatcgtctcctgctcttgtcccaggtggcgtttaaccgagtggctcgaggcatgctgcatcaggaccacattacctttgccatgctgctggcaagaatcaaactgaagggcaccgtggggtaagagcactcacgcccacaggaggatgccatattgctggtggcccccaagggtttcatgatcagatacatgcttttattatttcttttattttctcttttattttctttattttattttttgagacggagtctccctttgttgcctaggctggagtgccgtggtgtaatctcacctcactgcaacctccacctcccaggttcaagcaattctcctgcttcagtctccgaagtagctaggactataggcgcaggccaccacatctggctaattttttt

SEQ ID NO: 9407 - DNA, 1099 bp, Homo sapiens
tccatgcttccacccagcacccacccctctgtacctgtttcagcacccattggccaggccatccaccgcctgctcctgatccaggctttccggcccgatcgcctgttggccatggcccacatgtttgtttcaacaaaccttggggagtctttcatgtccatcatggagcagccgctcgacctgacccacattgtgggcacagaggtaatgtcctggtacagcccgggcttcccacgagactccatgcccacctccccagccacaggtggcagcagccctggcatctgctctcactccgggctacagtctcctcctaagaccaggaactcgctgcagattctcaactcctggctgcatggtgcccacacctctgggcccagaaagaacatcttctcaggcccctcactcggggctctcctttcccttgacaggtacacactatttgctggcactgtaataacttctgccttctttgtttgcaggtgaagcccaacactcctgtcttaatgtgctctgtgcctggttatgatgccagtggacatgtcgaggaccttgcagccgagcagaacacgcagatcacttcaattgcaatcggtaaggatgcttgaggggcttcatgggctggagccctgcaggatttgtggtgggcattgatgtccgaggctgccgctgctaacactaagtttccctgcaccaggctctgcagaaggctttaaccaagcagataaggcaataaacaccgctgtaaagtcgggcaggtaggcctgttctctttggctgaagaaagccttagtccccaggcattcaggcaggcagcctggcatgctgtgtgactctcactttgtgtgtgcaggtgggtgatgctgaagaatgtgcatctggccccagggtggctgatgcagctggagaagaagttgcattccctgcagccgcatgcctgcttccgactcttcctcaccatggagatcaaccccaaggtgggtggttgaaggagtggagacgttgcaggctggcctggcactgtgctgtcggcacgtgtgtggtggaattgaacaggcgccctcatccacacccgagcataactggaacggcgctctcc

SEQ ID NO: 9408 - DNA, 1501 bp, Homo sapiens
ggcaatctcctctcccccagcacaggcccccaagaccaaacagagccctcccaggcgccaagtgaagaccgaaactcttgggcgagaggagggggattgtggcaggggtttcgttctgtcaattctgttctattttgtgccacattcacgttttctgacattcttagaaactctgtcttctctagatttcttactggctgaataaattctgatggtctcattggatgacacgtctattaatagaaaagttggcatacttttctcctagcagcagtactcatgtgaatctgctgccatcgtcaggatgtggagagctctttgtaaagctttgactgacctggcatctgcactgttcttggcgaagtgctgttttctaatgactctgtgcttggtcactttcctcaccagtctcccaacgagcgtgcccgcttgtacttcctgctggcctggtttcatgcgatcatccaagaacgcttacgatacgcaccactggggtggtcaaagaagtatgaatttggagagtctgacctgcggtcagcttgcgatacggtggacacgtggctggatgacacggccaaggcaagtgtgggccatgccaggacagacagtggacgtgtatctgggaaggatgctgcagggcgtggtgctgagaggccagactctgcgtggaagagcgagctgacccctcgtgaccgccaaagcctagctggccatggggagtgaggaggaaagctgtgcccctcgaaaggaagccccgggcctgcccgcctctgaccacacacacgaaccctgcttttcctcccccagggcaggcagaacatctcaccggataagatcccgtggtctgcactaaagaccttaatggcccagtccatttatggcgggcgcgtggacaacgagtttgaccagcgtctgctcaacaccttcctggagcgcctgttcacaaccaggagtttcgacagtgagtttaagctggcatgcaaggtcgacggacataaagacattcaaatgccagatggcatcaggtatgctgctgcctgctggaatggagacagttgtgatgtcagggcgtctggtgtcactcagaggtgacccctgacatcatttccaaatgcactggttttctaggcgagaggagtttgtgcagtgggtggagttgctccccgacacccagacgccctcctggctgggcctgcccaacaacgccgagagagtcctccttaccacacagggtaggcaacaaggatcctccccacacgcagggtgggtggcgagggtcccctcacgcggggtgggtggcgagggtccccacacgcagggtgagtgtgcactgctgtcccagggccctccctggttatgctgggtgtggctctgtcagcctcggccttcctgccagtctccagctgctcctagctccactccgaggggaggcagaggaaagaactggctcttctctgcagcatcaactcagttctagagaaaaggcttgatatttatgtaa

SEQ ID NO: 9409 - DNA, 1176 bp, Homo sapiens
aggtcaggagttcaagaccagcctggccagcatggtgaaaccctgtctctactaaaaatacaagaaaaaattagccaggcgcggtgccacatgcctgtaatcccagctacttgggagcctgagtcaggagaatcacttgaacccaggaggcagaggttgcagtgagccaaggtcacgccactgcactccagtctgggtgacagagcgagactccatctcaaaaatatatatatacacacacacacacatatatatatacatacacatacgtatatatatatacacatatatgtatatatacacgtgtgtgtgtgtgtgtgtgtgtatatatatatatatatatatatgtacacacggctgagcaccttccagattttgctgcagttcccagtgtggactcactcaccatgtggcctttacgttcaagtcccttttccctctgtgatttcttgcccgtcccctccctccttcctgctgcgactgtgggactgtggcccaggtgtggacatgatcagtaaaatgctgaagatgcagatgttggaggatgaggacgacctggcctacgcagagactgagaagaagacgaggacagactccacgtccgacgggcgccctgcctggatgcggacactgcacaccaccgcgtccaactggctgcacctcatcccccagacgctgagccacctcaagcgcaccgtggagaatatcaaggtagctgggagggtggcgggccggccaggtctcaaggtcccaggtgctgggtatggtcatggaccattgttccatggaccattggttccactgtgccggacggaacgtactcacaccggtgtcacctcagagcaggtgtccagctgagcccaggcattgggcaagatgagttggcccttttgaaatggactgaaaacaccctagaagattgtgagataggcagacagcgccacagcgagcagccgcagcccttcctccctagagagccccgagagctgcgactcgggcaggggcctcagcgggtttctgagcagcctcagcttcacacaagctcggttccaagtcacgctctgccaaagctgtccgtgaccctggacagttcggaagctctggggctctccccggaggccgagttacttctgtttgacctttacactggagaaaggacctcttcctaacttctct

SEQ ID NO: 9410 - DNA, 1394 bp, Homo sapiens
ccattgttcccagatacatgcacttagggtgaccggctggcagttgggtggagcctctgggcgccctgtgactggggtttgtgtagctgttgtgttcacctcagcctgggttttggcttccgcctcacaggtttgaaacttcaaggggccacgtgcaacaacaacaagctgtcactgtccaatgccatctcaaccgcccttcccctgacgcagctgcgctgggtcaagcagacaaacaccgagaagaaggccagtgtggtaaggaggcactgcctttcccaggcattctgcagggacccctgcggtaacaagggcagaggcggctcctcttctatgcctgggttccacttggaacgggaaatgaggttcacagaggaaatccatttcgcacctgtccaaacctctccttgccgggccccatcagctgtcccgggcagtcttccagttttcttacttttcccttaagccaccagtaaacccctctgcttctgcaggtaaccttacctgtctacctgaacttcacccgtgcagacctcatcttcaccgtggacttcgaaattgctacaaaggaggatcctcgcagcttctacgagcggggtgtcgcagtcttgtgcacagagtaaacttttctagctgcccctttctgtaatagtgaaagttggtatttaacatttattcatttttaaaatatttggaaggtctgagcttgtgaaaagaaagtggttggtctgaggttggaggaagctgaatggaatctgacggttgggagtggtggaaattggaaggataccaggaggtatttgggaaggccaatggcgtggctcctttgaggaaataaaacactaagcatgagccggctccgcctcttctgtctccgctttcatcccagggcacagagccttgccttccatgctgcccagggagggcagcccacggcagccatgcccctccccacctcgctttcatcatgagctcgctcccgagcggccacagcactcatgaatgaagaccttggggcccttcacagacacagatgcagccagctgtggctctgaaggccctggggcccgggcaccatggttcacacctttaatcgcagcactttgggagtctgggagttaaagaccagcctcggcaacatagtgagaccccgtctctacaggaaattaaatcaggtgtggtggtgcatgcctgtagtcccagctacttgagggctgaggtgggaggatcacccaagcccaagaggtcgaggctgcagtgagctgtgatctcaccactgcactccagcctgggtgacagagcaagaccctgtctcaaaaaaaaaaaaagctgggcgtggtggctcatgcctgtaatcccagcactttgggaggccgaggcgggcggatcaccaa

SEQ ID NO: 9411 - DNA, 1453 bp, Homo sapiens
gatctacaggatgatcaaacttggtctgggtaagccttatactatgtaatgttaaaaagaaaataaacacacgtgacattgaagaaaatggtgaactttcagttatccaaacttggagcaccttgtcctgcttgctgcttggaggtattaaagtatgttttttttagggataagtaaggtcttacaagagcaaagaaatgaaattgagactcatatgtcctgtaatactgtcttgaaagcagatagaaaccaagagtattaccctaatagctggctttaagaaatctttgtaatatgaggattttattttggaaacaggtattgatgaagatgaccctactgctgatgataccagtgctgctgtaactgaagaaatgccaccccttgaaggagatgacgacacatcacgcatggaagaagtagactaatctctggctgagggatgacttacctgttcagtactctacaattcctctgataatatattttcaaggatgtttttctttatttttgttaatattaaaaagtctgtatggcatgacaactactttaaggggaagataagatttctgtctactaagtgatgctgtgataccttaggcactaaagcagagctagtaatgctttttgagtttcatgttggtttattttcacagattggggtaacgtgcactgtaagacgtatgtaacatgatgttaactttgtggtctaaagtgtttagctgtcaagccggatgcctaagtagaccaaatcttgttattgaagtgttctgagctgtatcttgatgtttagaaaagtattcgttacatcttgtaggatctactttttgaacttttcattccctgtagttgacaattctgcatgtactagtcctctagaaataggttaaactgaagcaacttgatggaaggatctctccacagggcttgttttccaaagaaaagtattgtttggaggagcaaagttaaaagcctacctaagcatatcgtaaagctgttcaaaaataactcagacccagtcttgtggatggaaatgtagtgctcgagtcacattctgcttaaagttgtaacaaatacagatgagttaaaagatattgtgtgacagtgtcttatttagggggaaaggggagtatctggatgacagttagtgccaaaatgtaaaacatgaggcgctagcaggagatggttaaacactagctgctccaagggttgacatggtcttcccagcatgtactcagcaggtgtggggtggagcacacgtaggcacagaaaacaggaatgcagacaacatgcatcccctgcgtccatgagttacatgtgttctcttagtgtccacgttgttttgatgttattcatggaataccttctgtgttaaatacagtcacttaattccttggccttacagtgtctcaaagttctttacaaatctacttaaagccatcctggctgaggc

SEQ ID NO: 9412 - DNA, 1150 bp, Homo sapiens
tgtagtggcaggctgaggcatgaaaacagcttgaacccccccgggaggcagaggttgcagtgagtggagattgcgccactgccctccagcctgggcaacagagtgagactgtctcaaaaatacgtcccatcatcttcaggttatctttgattttgggagtttacatagtaccagttttgtccttggaatgactcagtgcatttggtttatatttttttcagacttcattagaggggtggtagactcggaggatctccctctaaacatatcccgtgagatgttgcaacaaagcaaaattttgaaagttatcaggaagaatttggtcaaaaaatgcttagaactctttactgaactggcggaagataaagagaactacaagaaattctatgagcagttctctaaaaacataaaggttggtgtaaataaccattagttttccaattggcctctttagttttttttttttttttttaattcagaaagtctttgtaaagaacatactttgtttcagcttggaatacacgaagactctcaaaatcggaagaagctttcagagctgttaaggtactacacatctgcctctggtgatgagatggtttctctcaaggactactgcaccagaatgaaggagaaccagaaacatatctattatatcacaggtaagagaacactatgttacagtcatacacgtcgttcttacaatcttgtaggctctgtgggtgtgttttctactcaggtagcactgttacaactggtattgatctaggcaagataattaacatgaactaggtcattttctgtcttaggttctgcctaggtatctggctagcaagaaaagtcagagctagatgaaaccattcttaactgttaaaaggtctaaaagtaactttgtaatacctcaggtgagaccaaggaccaggtagctaactcagcctttgtggaacgtcttcggaaacatggcttagaagtgatctatatgattgagcccattgatgagtactgtgtccaacagctgaaggaatttgaggggaagactttagtgtcagtcaccaaagaaggcctggaacttccagaggatgaagaagagaaaaagaagcaggaagagaaaaaaacaaagtttgagaacctctgcaaaatcatgaaagacata

SEQ ID NO: 9413 - DNA, 2119 bp, Homo sapiens
gatccctgaagcagccagggccgcgctcccgggcggccgcgctttctattccggaggcctcgggaccgctgcggtttccgcaccccgcttcaggaatgggccgggcggccgcgggctccccgaggctctgcagcagcgccagagctggcgccgcacgcgaacagagcggccccgccgcgggggtcccccgcccggccccgctgggggcgcaggcggaggaggccgccgtggcggagccgcagcccgcgcgggagggcacccggggtgttcgttggggaccgcggcgggggactgggcccgggcctgcggcggcctcccggaagcgcgcacacgctcgtggtagttgccgcgctccgaaatgaggtcatcctttgtcagccgcccttctattttcggtttacttaaacttcgcaaatctccaattcggctttaaaaatatttggagaacgcgatggaatttcgtgttgcctctgtagacgtcctgcaaggttttaaaccggcgcggtgtcgttccagatgcctgaggaaacccagacccaagaccaaccgatggaggaggaggaggttgagacgttcgcctttcaggcagaaattgcccagttgatgtcattgatcatcaatactttctactcgaacaaagagatctttctgagagagctcatttcaaattcatcagatgtaagtcacttattaacccagaatcggattttggtttcagtgtgaacttcttgggggtgctgtatgcttaaattaatattttttgttaacaggcattggacaaaatccggtatgaaagcttgacagatcccagtaaattagactctgggaaagagctgcatattaaccttataccgaacaaacaagatcgaactctcactattgtggatactggaattggaatgaccaaggctgacttgatcaataaccttggtactatcgccaagtctgggaccaaagcgttcatggaagctttgcaggctggtgcagatatctctatgattggccagttcggtgttggtttttattctgcttatttggttgctgagaaagtaactgtgatcaccaaacataacgatgatgagcagtacgcttgggagtcctcagcagggggatcattcacagtgaggacagacacaggtaggcacctgaacattcactggttaagtgagcggtggaagggtggggtgctgcaacccttggacccctggggatgcggtgaagcttacagaatttgtgtttgcccaacgatcaggaacaagctagagcacttaattagtgtaatggcatgacttggtgggcggttcttttgggcgaggcaccttgcccaaaaggttctgctgtggtggcctttgcatctgtagtaacggcaaaccttgctttatagacacgttataagggtgttaggcatggcgttgagcactaaattgaatgtattaagtcaatttttctttcttctcttgcaggtgaacctatgggtcgtggaacaaaagttatcctacacctgaaagaagaccaaactgagtacttggaggaacgaagaataaaggagattgtgaagaaacattctcagtttattggatatcccattactctttttgtaagtttttatgtaattgcagagtgaatttctgtctgtaggtgattggggtgactgtactacatccttagtccctagatctgttcaactagtctgaagcctggggaacctaagctctactacctaactctgtaaaagttcctcgggctattaagtggatgtatcaaatattgatgaaaagctgggtgcttctcaagttggctaatttagacttgggccttaggttgaaaatagtggtgcagcgctgtcgcttagttctggagtgcagcagtgatgtgatttcgtgttttcttttgaaggtggagaaggaacgtgataaagaagtaagcgatgatgaggctgaagaaaaggaagacaaagaagaagaaaaagaaaaagaagagaaagagtcggaagacaaacctgaaattgaagatgttggttctgatgaggaagaagaaaagaaggatggtgacaagaagaagaagaagaagattaaggaaaagtacatcgatcaagaagagctcaacaaaacaaagccca

SEQ ID NO: 9414 - DNA, 1249 bp, Homo sapiens
tttttttgttgttgtttcttttgagatggagtctgactttgtcgcccaggctggaatgcaatgacgtgatcttggctcactgcacacagccaccgcctcctgggttcaagtgattctcctgcctcagcctccagagcagctgggattacaggttcgcactaccatgcccagctaatttttgtatttttagtagagacagggtttcaccatgttggccaggctggtctcgaactcctgacctaaagtgatccaccctcctcggcctcccaaagtgctgggattacaggcgtgagccgccgcgcctggccacagtgcagcttcttaatacgggagtgaaggtttttaatgtgttttgtcattgcagtaacatttatttttaatggtgctataaatgctgttcatacctcactattgcaaagcaatactgtttttacttgatcatactagtttttgagttctcatgcagttttttgttgtgttttttaaggcccaaaataaaatttactcctaaccgtgctgctagaagtttttatgtcctgaaatttctccacacatggtaaatagagtaacaatgaagtgatcctagaaaaactgggatttgatttggttctggtgaaatgtaaggtgcaggaattgggagccactgtaccaaaatcaggacagcagtctggcttcccaggcctgagttagctggtgtaggcctgcctgacaaggccagtgatggagcgagctgcagacacccttaggccctgggcgatcaggtacagttgtgtttgtgggatcaagagtgctggggtagtctgggcccagtgggcacagcaaggtctggcagagctgtgatgggggagtggaggcctcttaatccaccgttcaccatcccatcatccttgcacctccctccaccatcaaaaaaaagccctgctctggccatgtaaattatctctgtaaccccttgctgagaaaattgcacgaaggtctaatggaaatcctgccagagcagcgctgggttttaggttgttggcattagtgcaggtcaggtgctgtttataggtaggtcaccaggcaggaggataaagaggaggtgggggatgaaaatactggctgtgtccccaaggctggcttgccacgtgcctattaatttaagaggaccagccatgccgttttacggcagtaagcagtgacacctgctgctgagtaactgcccaatgcatggtccccagccctgggcccgcatgctgtgtggcgttca

SEQ ID NO: 9415 - DNA, 1245 bp, Homo sapiens
cctttgggcctccatctggccactctcctgctcttggcttttgtgttcttctcttagaacttcttaagctacattgggacaccagataattctgaattgttcagttttcaaagagtgtctaaaactgttttcagatagatgttacatttaggcagaatttaaccactttatgttgattaaacttgacaacaaaaaagcggccggacagggcagctcctgcctgtaatcccagcactttgggaggctgaggtgggaggatctcttgagcccaggagtttgagatcagcctgggcaacgtagaaaggccccgtctatatttttaattaattaattaattaaagtttttttttaaagcactcatcataaaagaatatagcaaaataccaaaaaaggaaaaataagccaataaccaagtcaaaatgaggtgtggagttctgactgtgtgtctttggggcttcttcccatcttcctggcaggtctgagcgtggatcgcccttgtgccagagccgtaaaggtggactgtccctacccgctgtcccagatcacagcccggaacaatgtggtgtgggcgctgacagagcagagggccctcctgtaccgggagggcgtgagcagcttctgtccggaaggcgagcagtggaagtgtgacattgtcaggtactggcgggccagagactcctttcacatcgtgcttgtcctacccttcgttcttgtccacttgacaccacaaggcaccatgaggccgttcctgggaggcagcacctgcagcctccatggctataggctaagcttgaatctctgcctaattctgaccggcaaactggacgttgagtcagagctcgctttttaaaaatgctgccgccctctgcgcagccctgagcatcacagcgtcatgagtctgtcatgacggtctctattcagaattgcccaccgtcaggtagttctggtttagtgtctgtgacggcttaggtccaaatatttttctttattttcatgctaatcgaagttgatctctgaactgtagcttttttttttttttttgatacaggttctcactctgtcacccaggctggggtgcagtgccacgatcacggctcactgcagccttgacctccgggctcaggtgatcctcctgcctcagcctcctgagtagctgggactacagatgcatgccaccatgcccagctaatttttgtattttttgtagagatgagttttgggttttcatcatgttgcccagactca

SEQ ID NO: 9416 - DNA, 3459 bp, Homo sapiens
ttttcagcattgtgaccccagggtggttgccaccccatcttttcctgaccccccccacccccccacctccaagaggttcggcccacatcactgtacctggtgcttgtaaatttggaattggtgccttctccttttggcaaccatggttatcaatcctttttctgttttagtgtcttatttcttctttcaagttatttgctagccaaagatgacatcactgagattaggagacaggggagagcttgctgcagattctgacagtgcagattttaaatgtcaggatattagaatagctggcgctggtttatgaaagctgcgcgttgttccgcgttctctcggtgtgcctggccttttatgtggcactctgtatgtcagtttgtgtccttcatgtgctgatgtgattacacaaacaccatgcactctcttttcatatcagagtacaggacagagaagtgatcaatgtattggtctagtgagactgagatgaaaagaaataacctacagagtggtctgtaatgccttttggttggactgggaacaagtaaaaatttctaataaacattttgagacttccagaatcacttttgttatcttatcagaccatgggcctgctgagggttgagcagacagcctgcattctaacataccctgttcccaccccacggccattcagactgcactcaatacgctgaagtcgcttttgttgttgttgttgttgtttgcatcatttggatttttttcctgctttcaataccaaaaaaatgcagatgctttaaggcctaaacagaattctgaagaatttaaaatatgcaattaaagtttgatatgttttgtctcccaagcaccttgttttttgttgttgttgttgttgttgaagtcagctgattttctctttagaaagagggtcagctagaaacctaggttttttggaattgtaaatttttttttagtatagtctggagagaaaggtcattcaaaaggaaagtacaatgggacttgctgcccttcatcatctcgttcccgtgccaggtgtgtgttggtcacgtaaaagcctgggaagcatcagaggagtcccggattgctgctgctacctggagacagggttagcaaaataacactagtgatgagggagaggcttcttttcaccataagcctgctgtgtacaccgagggcggcaggagaagcatgggaaggagtcagcctaagtttgcacattgcataaagggtacactaaggtatgagctgaagctttaggttctccgtgcttccctcaagacctccttcttgctaacagaagcagtaggcaattgctgcagtgcgtttctcaccctgccaataggtctgtctgtatctctgttaaggaaaatagcctggtccctcctggcagtgcttggaagcttgatgctaatttttatatagcgtggcaaactgaccagcagtgccaggccttgatctgtattctgcactatccctttacttggttcctggcactgaatggtctccagccctgaagaatcacgtgtgatcacagcagctgacctgggctttctccccgagaggaaggggcatgtcatttttatttgacagagggaaaatgggagctgtccttgactgcctttgttgtgctttcccgcgtaagatagcactgtgttttaaactgttgcattacactgtctttgcaatgatgtaaatgtaagaaatcacttagctttaaaagcgcagtggtttgatcttatttatatgaagactttttaacatatcaagaattaggtgcattggcaggtagggtttggggtgtgataactgcttcagatggaatgttcacttaagctttgtcttcttaaaaattatcaatgtgaatgtcataattatatatatttttgtggaaaattttctcctaagtataagttattgtgcaaaatatagtgtcattgatgcaaataatagtttaacttttagtttagaactcctaaaagatataaattgtattgcatatgcattaaaagtttgttttatttaattttatgtagatgtgtgaagtgttaggtaaaatttttttcacttatccatttaaacaccttgttacttgaatattgtgttgactggtctgcaacagtgatccattctgtaatatagctcttttaactgggaaggaaccacaccccagttgtgccgattacattagtgttggcacacagtcgggtgctagtgtaacacaaatgccgcgttgtctgggtgtacagtgtttgtggagacgccacttcctcaaaatggtttttgattgtttttaacctataagacgttctgatgctcacaaacctctattcaacacacaaaacaaacatgaaaaggtagttagttgggttgtaacagcttactggggtggactcataaaacagtggctttctgttcatctaaagtttcctcagataccacagaccactgttaagtgtgctcattgtcactttaaatttcaacgataccctatttttgtcattctaaatatcagatgtactattggtataattgcacaccaaaaataagccaaacagtgcattacgctaactggatccctgcttttatgtgagctaaggaaagatggagccaactccaacgagggcctctttttctctcttgtctagcctgtttctaaaccgaatgatccaggattcaagcttctattgtcaagtgaaactttcctcagatggactccaggtagccaggtcacctaaacctagtggtcctgtgcgatgctctttctgccagtccctgaatctctgcagcttctcttacctgtcttacctgtagtaaagcacaattgcagtggcgtcgcattcagaagaagggaaggtcagcagaggctatgcatgttgtgtgatgatgagtgtttacagccaccttctcctaaaacgaaatttataccggggtggatagtattccattaggtagacttatcgactttgctaagtgctttttagacagcttaaaaaattttcaagattttaaaagatgtataaggttaagtttgcaaatataatggaaatgctgtatatcttttgaagtgatgaaatccacgttggaattttaaagaaaatatgttgtaataatgctgttgtaagtaatattttaatgtctctttgcctgttttctatttcagcacattcattgtggtgaatgttcatagcattataactgcttagccattgaatgataacatttgttagtggaaattggaaaatttatttgtgaaattctgcagaattcatttttctatttccaatatttgctgaggttaaataaaaattttcaagccattgatgtaataaaatatgaaatgaaagcattttctgcacccccacgctccatcaaagcagtacccttccctgtaacaaagtggggttctttctttccttttaagtgaggcttggggtttccaaatgttgaatttcttccaaatca

SEQ ID NO: 9417 - DNA, 1191 bp, Homo sapiens
cactgcactccagcctgggcaacagagcgagactccgtctaaaaaaaaaaaaaaaaaatttttggagacagggcctcgctctgttgctcagcctagagtgcagtggtgccatcatagcttggtgcaaccttcaactcctgggctcagcaatctttccacctcatcccaatttattaagtatactttttaggaagttttttgaataataatatcaatagttactatgtgtttgggtaaaatagaaaggatggaagcatatttgatcatgttttgttcccaacacatattaaagttgggaaggattcttgtgttgcctaaaactgaaagacagcaggtctcaggcacttttgctttcccaaagctgtgtttgtttccttgcatgagaggatatgatggcactctactgttttttcccgacagaactcctctttcctaaaatggagtcgagtaaaaagatggactctcctggcgcgctgcagactaacccgccgctaaagctgcacactgaccgcagtgctgggacgccagtttttgtccctgaacaaggaggttacaaggaaaagtttgtgaagaccgtggaggacaagtacaagtgtgagaagtgccacctggtgctgtgcagcccgaagcagaccgagtgtgggcaccgcttctgcgagagctgcatggcggccctgctgaggtaggcgccctcgcccggcccgtcgcccggccccttctcagccctcggcctcaccctctccttcattcgtttctctaaaaataaacctctagaggtttaaagccctaaagaagtccataaaagcctccgggcccagcttgtgaatcctttagggaggtgcagtgggatcccacgtgtgggtttactgaggcctctgcgtgtctctgacctgccccgcccgtgtcttcccactccgtctgtagagccttggtgcccctcatatgtgttgctgtattttattgaggaacctcacagttccatggaggagatacaccaggaaatgacaagccagtcatttaagggcacgtgtgctggtgtgcaaggatgccgcagagaggagggaggatggggtcagcttaaaggactggacaggtccctacccgagcagaaacctaggccgcatgcttactcagcaggcgtgtgtggaacatgcaccgagcccatggcagccctttgctgctgagtgccag

SEQ ID NO: 9418 - DNA, 1858 bp, Homo sapiens
cgtcatcttgctgcatgccgtcaacggtctccgaaagcaacgttgtgcgtagagctggtggcatacggcccacgtgccttagatgggacatgctgcttctccaccctgggtttgcattgagcatcattctagaaagtgctagtttaaccagacttttctctccaccactagatctttgtctctacaagggccctcagacacctctgcacctgctgaggggaagccaggctccaccgtcggcttctggagcctccgctgcttaattaccacagattccaaatctctaggccccacgagtgagccgcctggtccaagtacggcctggtcccaccctgagggaggcaggtgtggaacagaagccgagcctctccgtgtccccaccggggccgtgggcacccccacagcccgaagcagaaccctctgagcattccagagaccgctgctcgggggcctgcccaggctgaccaacgggcgctcctgaccaccaccctggcgggaagggtggccacggggcccgtcgtcccagcctgtgcctgcccagatggcattttctcaactcactgtttactgtctctcagtgtccaactgtgattagaagcctggagcctgccccctgcaccccttttgctatgcaccacgcttcatggtgctcttaccactgatgggtgctacacgcgacgggtgcttcttaggcaaaaccaatgtgtgcgaactgtcacacctgtgccactcgcccacaagccgcgcccacaattggccagctgggccgtgcacgtcagactgcctgcctcggctctccccgtggccgcgcggggacagcttggtgggtgcccggtggcccacctgtctctggtgctgccatctgtcctgggtgtgccttcgccccagtgcctgctggaagtgccctccgtcgcacccctgtgccctgagctcccgtgaggggcccgccgcgccctttcgcggtcgaagcgttccgttgttcttatctgcctttcctttccccgctctcctgggattactttgggggaatgagtatccttggttctgccctgtgagggagtcgtgtgtccctgctcataaaggaaggacttcctgcagaagctgcggaaaactactgttccctcgaaggtgtcccccacctgaggcctgtcccctacctgccctcaggtagttttcctgaggccaggggttaacaacagggacatccctgcaacttccccttcacaaaatgtataatattagatgaaggatatgcaacatcttggtctagtaagaaccgtttcctcccctctgggttgaagtcctggtgtggcccccagaagcagcagtgcgtgtcactgggacgtctccagtagcccttcccaggcagacgctcctggcgggacgccatggggcccacctgagggtcccacagacgtaacctgagtgacaggagtccttgaggatgggatggcctatgtcacacactttgtccttgaacctgagtgatgggggtccttgaggatgggatggcctgtgtcacgcgctttgtctttgtgtttggttgtatcggggtctctgttctgagtgtgtcttcctctcatgtactcaacacagtgggcagcagcctgggacggcgtcccctctcccggcggcgggcaagccttgcgctgctccaccctcggcctgggcaccctcacttggcgctggccacctgggccagcctggggccatggtctctctgcagctgaggcccagtggccccttgggcagtgatcggccctccccgcatcacagggccctggcagcaagcgggaaatgggggcgcacactgtgtgcttgggggtgctgcttgtttaccacacatgaccagactccc

SEQ ID NO: 9419 - DNA, 2122 bp, Homo sapiens
acatgatgaatttgatctgtgaagcctcttaggtagcattgtgtgtgctgtgtggtttttctgaggggatccataggaaaataagggcagggttttaaacgttaatgatgggcaatgaggtaatgtaagttatggggttaaatttttatttccctttttttctgtagagaatagtgacagtggtacaggaaagaaagaaaaagaaaagaaaaacagaaagggcaaagacaaggaaaatggctccgtatccagcagtgagacaccaccaccaccaccaccaccaaatgaaattaatcctcctccacatacaatggtgagtgcagggttgatggcctagtgggcactaaagttgtgtaaagtatatggcatttggttgaggtgggtggaaatgttgaaactagccttcagtgtgtaatacactaatattgtggattccaagtactgtttgttgtttgaattaaggtgaacccaattttggatggagatggacttgatgccattaacttggcaaaatctgaacctttttgttgttgtttttaaggcctttgatcaagtagctctgttttcataaacaggaagaagaggaggatgatgactggggagaagatacaactgaggaagctcaaaggcgtcgaatggatgaaatcagtgaccatgcaaaagttctgacactcagtgatgatttggaaagaacaattgaggagagggtcaatatcctctttgattttgttaaggtaaaacatttgcttggtctgtaaatcagcttcaacccagccttgtttgtgcctttagatatatgatactttagcagtgtaattaggattactctaatgcacgactttttagaactcttgttcatttaaatattttttgcgcgtgattccaggcactatgtgtcacaactgccaaattaggcaggaaaaatatgttcatcagagcagggactggctggtgtcttgagcctggcaaagtgtgcctccattgcactgaattgttttccttttctttgcagaaaaagaaagaagagggtgttattgattcatctgacaaagaaatcgttgctgaagcagaaagactggatgtaaaagccatgggccctcttgttctaactgaagttctttttaatgagaagattagagaacagattaagaaatacaggcgccatttcctacgagtaagcaaagtgctctggattcataaatgagattacagttgtgtggctttcgagatggtcatattaaccacttttgcttgtcctgtcatgcttgaaagtggggaaattgacccaccttacaagcctctgagtatctgaaagtgccatacctaggcccttacaaagtaacagggatgtttatgcattgacctttttgaacaactatggtatgggccatgcacttgcagacactcttatttgggtaatagagttgtcaacttagaacacataaaaaagattgttaacaccaaggtgtctatttgcagttttgtcacaacaacaaaaaagcccaacggtaccttcttcatggtttggagtgtgtggtagcaatgcatcaagctcagcttatctccaagattccacatatcttgaaggagatgtacgatgcagaccttttagaagaagaggtcatcatcagctggtcggaaaaggtggggaatacataggtgggctcttaaagttcacaggttttggggggtttttttgtttggttgattgtttttggagacggagtctcattctgttgtccaggcaggagtacagtggtatgatctcagctccctgaaacctccacgtcccggcttcaagtgattctcctgcctcagcctcccaagtagctgggattacaggcacctgcgatcatgcccagctaatttttgtatttttagtagatggggttttaccatgttggccaggttggtctcgaacacctgacctcaggtgatccactggcctcccaaagtgctgaggttacaggtgtgagctcctgcgcccagccgttcacaagtattgagacggctttgagatgaagaaaaaatgtcttaatatctatagctaaagttcagtgcctgtgctgtagattgtgattcgcatcatgtcagatttgtagtcataacagactgctgagac

SEQ ID NO: 9420 - DNA, 1478 bp, Homo sapiens
agtcgtgtgcattgcacgttggatgagccagggaaattattacattaacaagcattttgtgtgtacgtagtagttactttgtactgagagaacttgctttggggtgcaattaataaactgattttatttgggagaaacaaggaagggtgcacttaactagcaacctaagcatgatttttcagcttttgcccttagggtttaaattacaattccaaaatgttagacatactgtattttttcgttcagtgtggctttaattttcccctcttgcagtttgttctgtaatgccttttacatttggacacatagtttatgctttttagattttggttgctttcttgccaaaataagtgttaactgtgtttcaaacttgattttctttcctttttcttttttttttcttccagaatgtcttatttaaaaagaaagctaaaagcatacttctaagtcagagcctctattttggtgtaagacttgggatattttttacttcacattgaatatagccaggcacccaagaagtctgatggccacctgagtgcaggtgacaaggacctgacagagcccatgcagggctttagatttggacacacaagagttgataacttcctcatgaactccttgcctgatctaaactcatattatgggttctgactgtttgagtaatcatcttcaaggttaaacctcttggcagttacccttttcacaaagtgcacagtgggaatcgagaatcgatagggttaattttggagcagtggcttataccattcacctctgtttttttgtgattatttcacagataatgagaccttaataacaaataggcgtaaaaaaattttcacattgaaatgatagaaacatttgatgtaataaaacttggttggcttgatattttaaggaattgaaacctagcaatcttattggagagacaagaattggtctccagctgcctttgatcaagattcgggtgcaagtggagcaggagccatatacctggagggaatgtgctttgtcacaccaaagaggatttttttttcttcaaacttgtatgttgcctaggtttcaaattctttgccgcaaggctgatctgctttcattaactggaattctgtaggagatactggtgacctaagctaagttgcactcagcatactcagtgtcaagctaatgaggttctattataaaggttctacttttaatctgagggaaaacatgttcagggcttctagaacactaaaaaatttggcttaaaccagtgttcagtctggtgccaaacttcgaatggaatacaaattcacataatctgaactttgttcacaggttatcctaatagagtaattcttcactttgctctattgaactgtcttaaggatttgtttaaacagctaagttacttgattaaaataatgataaaattgtattttgtctttgctttaatattaaagttaacaagttttcattttataatgagatcaaag

SEQ ID NO: 9421 - DNA, 1139 bp, Homo sapiens
agcacattgttttgaattactgttagcagtgtagtatagaaggaaatcgggaatccagattctctatggatttccccctgaacagttatgtggctgtatccttatctagtgaatggtgacattagcttttcccctgctgcacgggctgtagtgaggctcaggtgtgcaggtgcacttactaacatatggaaaagttaagcactgtataaccagaaggtagcccttttactcctattttatatgacagccacgtatgcaaaatatctaatttcttcctgaacactcaattgaacttcaacacttcgtatttttcgtctcagaatttttattttcctcaaatttatattatgtggttaaattcctttgaagtgctagatactttaagattaaaattaaagtaggaatgttttttcttcaattagaagctcttagaacttggcaagtactctgtgttctctcatttccttatctttgtgtatgctgtattgcagcacacgtcacatggagatgggcgtcaagaagttacctctcgtaccagccgctcaggagctcggtgtagaaactctatagcctcctgtgcagatgaacaacctcacatcggaaactacagactgttgaaaacaatcggcaaggggaattttgcaaaagtaaaattggcaagacatatccttacaggcagagaggtaaataccagttatgcttatttctgttatgacagttgctctgtttatttccatgtaagagaaagaaaagaatatagatataggccttatttcttttttttaagatggagtctcgctctgtcacccaggctggagtgcagtggcatgatctcagctcactgcaaactctgcctcccgggttcacaccattctcctgcctcagcctcccgagtagctggcagtacaggtgcccgccaccacacccagctaattttttgtagagacagggtttcaccgtgttagccaggatggtctcgatctcctgaccttgtgatccgcccgtctcggcctcccaaagtgctgggattacaggcgtgagccatagcgcctgtaatatatagctactatgtattacatgtattacatgtcaagttctaaccacataatataaatttgtaatacatagctgggattaca

SEQ ID NO: 9422 - DNA, 1884 bp, Homo sapiens
tgcctcccgagttcaagcaattctcctgcctcagcctcctgagtagctgggattacaggtgtgtaccaccacacccagctgatttttgtatttttagtaaagacagggtatcaccatgttggccaggctggtcttgaactcctggcctcagatgattcgtccacctcggcctcccaaagtgctgggatcataggtgtgagccaccgtgcccagcccccatattattattatcaattgaaaaactcaaggcttttcttgatcttgggacattgatgtttaaattagtgctagaattaatctgtacttcatgtttgttattgttaatattataaaataaggagttctgacttgtctcctgtttttttctctagaaagaatgttttcacattaattaggaggtaacttcatatcattacagaaagcttttctaaaatgcctaatcctgtcataattctaattctattttggctaaatttcatttttgtcttgatgttttccctctaggctgaaaatctattgttagatgccgatatgaacattaaaatagcagatttcggttttagcaatgaatttactgttggcggtaaactcgacacgttttgtggcagtcctccatacgcagcacctgagctcttccagggcaagaaatatgacgggccagaagtggatgtgtggagtctgggggtcattttatacacactagtcagtggctcacttccctttgatgggcaaaacctaaaggtataagaagctgcacccatgtacttcactaaactaaaagaagtttcctaatattacatggcttaatatttttaacattatatcagtgcggggggtttcagggggttttttgttgtgttttgttaactaaacctaaaggttgacttactcgttttctttcctctgtacctctccaaaggaactgagagagagagtattaagagggaaatacagaattcccttctacatgtctacagactgtgaaaaccttctcaaacgtttcctggtgctaaatccaattaaacgcggcactctagaggtaatcatgtaggtggaaacaagcagtaactttggagagtctttagagtgaccttagatctttgcttgatttgtatgccatactggatatatcctgcggctttttaagcaagaattgaaacattaaaaaatattttttgagtttatgctttgaacgatagtcaatgaaatgttgaaaataaatttttgtaaatattacggttatcagaatatttcattttactctgctaatgaacagtttaccttttttagcaaatcatgaaggacaggtggatcaatgcagggcatgaagaagatgaactcaaaccatttgttgaaccagagctagacatctcagaccaaaaaagaataggtaatcactccatgcctgcatgttcatgtgtttttgtctaagtaacatatttctgttttgactcatgtctgtgcctaaaatgtgaataatggaaagttaagcacaagtcatatgaacagtttatctgttctgtcatatttaggaacgtaactacctgcagtttcctataatggcacccagtaactctgaaacaagtgcccatttatgttacaaaatatatgtaatatgtcatcttttaggtcaaatgaaaattattttaccctacaaaagaatgatttctggccgggcgtggtggctcacgcctgtaatcccagcactttgggaggccaaggcgggcagatcacctgaggtcgggaggtcgaggccagcctgaccaacatggagaaaccccatctctactaaaactacaaaattagccaggcacggtggctcatgcctgtaatcccagctactcgggaggctgaggcaggagaattgcttgaatctgggaggtg

SEQ ID NO: 9423 - DNA, 1210 bp, Homo sapiens
gaactagctgaagtgtaagaggttgattttcctgtacgattaaaaataaacctgcctctatgcatttcagtcgcaatgtatctgctgagcaaaaagatgaaaacaaagaagcaaagcctcgatccctacgcttcacctggagcatgaaaaccactagttcaatggatcccggggacatgatgcgggaaatccgcaaagtgttggacgccaataactgcgactatgagcagagggagcgcttcttgctcttctgcgtccacggagatgggcacgcggagaacctcgtgcagtgggaaatggaagtgtgcaagctgccaagactgtctctgaacggggtccggtttaagcggatatcggggacatccatagccttcaaaaatattgcttccaaaattgccaatgagctaaagctgtaacccagtgattatgatgtaaattaagtagcaattaaagtgttttcctgaacactgatggaaatgtatagaataatatttaggcaataacgtctgcatcttctaaatcatgaaattaaagtctgaggacgagagcacgcctgggagcgaaagctggccttttttctacgaatgcactacattaaagatgtgcaacctatgcgccccctgccctacttccgttaccctgagagtcggtgtgtggccccatctccatgtgcctcccgtctgggtgggtgtgagagtggacggtatgtgtgtgaagtggtgtatatggaagcatctccctacactggcagccagtcattactagtacctctgcgggagatcatccggtgctaaaacattacagttgccaaggaggaaaatactgaatgactgctaagaattaaccttaagaccagttcatagttaatacaggtttacagttcatgcctgtggttttgtgtttgttgttttgtgtttttttagtgcaaaaggtttaaatttatagttgtgaacattgcttgtgtgtgtttttctaagtagattcacaagataattaaaaattcactttttctcagtaaaatcttgcattgtctcctaatgctgtatttaacacatcctcaagttgagcagaagtaatgtgtatgaaggcttggggccacgtggaccttcgcaggggtcccagcattttgtgattaccagcatattttttctcccaaggcaataaagagagaagatggccctcatggtgacccaagaaggaagggaatcca

SEQ ID NO: 9424 - DNA, 1214 bp, Homo sapiens
tcagggcctgtaggggtttcaggcaggccttctccctcataccctcttctccgtctgcagattgaaactctcttcaagtctaaggactatgagttcatgtggaaccctcacctgggctacatcctcacctgcccatccaacctgggcaccgggctgcgggcaggtgtgcatatcaagctgcccaacctgggcaagcatgagaagttctcggaggtgcttaagcggctgcgacttcagaagcgaggcacaggtgagcagggcaggtgctgcggcttcccgtggcctttgggcagccctgtttcctccgccctgacttgctgtctccccaggcggtgtggacacggctgcggtgggcggggtcttcgacgtctccaacgctgaccgcctgggcttctcagaggtggagctggtgcagatggtggtggacggagtgaagctgctcatcgagatggagcagcggctggagcagggccaggccatcgacgacctcatgcctgcccagaaatgaagcccggcccacacccgacaccagccctgctgcttcctaacttattgcctgggcagtgcccaccatgcacccctgatgttcgccgtctggcgagcccttagccttgctgtagagacttccgtcacccttggtagagtttatttttttgatggctaagatactgctgatgctgaaataaactagggttttggcctgcctgcgtctgagtggtgcctctcctttcccaggggggagggggaagggcagcagccaggccccaggagtcttgagtcctgggcctgctgtgggcctcgccttctgtgagatgggacaagagccaggaggtggccactctgttctgcctgccctacctagtccatgggccccttccctcgtgtctatcgggctgtgcaggcaggaacatgggagagagcgagggaggagctccaggcctgagcatctgagggcattcaggcctgggtgtggagcctggcacgttcctcaggcccatcctgcagggtgggggaggtagggatagtggaggtggggggttgacctcagaaacttgagagctttccggtccctccaactggcttcctcctccagtcttccaagctgcaacactatcagatgcaggcatctccctgcctccttcctaccccgccaacacctactctctatcttctcttccctgcttccttccctcccagcctcggccttcaggctg

SEQ ID NO: 9425 - DNA, 1224 bp, Homo sapiens
cgcgtcgcctggagcgcgcgccggaccggccgggggtccccggcgatgatggcgctccccgcgcgcgctgcggaccccgctgaccttggccgcgtcccggggggcgccggggggcccggcggcgggggcctgagtggtacgcgggagcccgggaaccccggcgtgccggtcccctctgaccccgcgtctccccgcagcccgccgccgccatgcccttctccaacagccacaacgcactgaagctgcgcttcccggccgaggacgagttccccgacctgagcgcccacaacaaccacatggccaaggtgctgacccccgagctgtacgcggagctgcgcgccaagagcacgccgagcggcttcacgctggacgacgtcatccagacaggcgtggacaacccgggtacgcgacccctcggggccggggtcccggccccccctccccccgcgcagccgcagggtcctcagcagcgcgctcgggcccggcagtgacgtcactgtccccgtcccgcgccccctcccccaggccacccgtacatcatgaccgtgggctgcgtggcgggcgacgaggagtcctacgaagtgttcaaggatctcttcgaccccatcatcgaggaccggcacggcggctacaagcccagcgatgagcacaagaccgacctcaaccccgacaacctgcaggtgcggggctgcgggcgggccgggcgggcggggccggggtcttcgggcgctcactcccgtctcgcctcccagggcggcgacgacctggaccccaactacgtgctgagctcgcgggtgcgcacgggccgcagcatccgtggcttctgcctccccccgcactgcagccgcggggagcgccgcgccatcgagaagctcgcggtggaaggtaggggccgggcgggccgaggggcggcggcggccgcgtccccctcccggcgcggtccccgcccgcttttgtttacgtcgcccgggagcggcagccgccgtcgcgctcttatctgcgcgcgcccgggttcagtttcccggagggaccgagggacggaggcccagccccgcgcccacagcggcctggggcccagggagggcgggtcctggcgcggggtcaccgcctgggaccgtcgcccgggccgtgaggactggacgcccgcagatccgggcgggtggggccctctgacgtcccccgaggtggggcacgggggcgggcgggtccgcgctgcgggctgga

SEQ ID NO: 9426 - DNA, 1237 bp, Homo sapiens
aggacccctaagaccaagtgacaactgggagagcctcagcatatactcttctcctccgatctcacagcctgtcatgctgctcagtgtggttctcacccctgcaagctcaaattcagttccctgaatggagtcaggtgctggaggccgtggcagcggagggtggttggggttggggctgggggtggactggtgtgagggcagaccagggccaggtagacggggctgtttggtgcctgaaggatggcagacgcctggtgtcaggaggggccgccaccaaggagcagcagctggggcagaggagctggggtcaggggccacccctctctgccgatctccctgcctgggctggctgtgaggccacctttgtcccaggcccagcctcaaggcaaggagggcgcttcactgaggtgtgaattgtacgtacaggctttttatataccaaaagtattttttgactagaccattcaaagctacccgaactatgttggaaattttttttttctcattaaaatacaggcccttaggctctatttttcatgtatgagtcgtgtgtaatttatgtaaaaatgtgtgtacagactcactgatgcagcactgtagcccatcaccttggagcactgactgtacatagtgtggtgaagaaaagtgaacgcccttgtagagcagcccgaccacaggagcatggccgctgccagcccagacgctgctgacgctgtgtaaatgtgcacaataaacccgtctcaccccggcggctgtgagtcttctttctggacccagactgcgctgtggcacgagggttcaggtgatctggacacaggaaggcgaggccttgtccgtatgttcaaaatagtttttaatcataagctttatatacaaattgctgtacagtcatcttaataaagtgaaatagtgagtgaaaagtacaaaacacaaagcccccacgttccccttggtgaagtatcaaaggatcactcacagcccagaagccccaaattagtgacaaggtaagtggacaagtctgtgaaacaggctaaggcaagtgctgtaaactggctattagaggcgaacaggctccactgcagaccagaagcctgagttcctactgcccaaactggttctgtggaagaattaaatgaaatgaatattgatgggccagaaccttctagtagacctgcgaactcataaaaatggtatatattatgctaaaaatagtttagcagtagtgtagctcagtctc

SEQ ID NO: 9427 - DNA, 1197 bp, Homo sapiens
ttctcctactcggccagcggcacggcctgaggcggcggtggactgcgctggacgatagcttggagggatggagaggcggcctcgtgccatgatctgtatttaatggtttttatttctcgggtgcatttgagagaagccacgctgtcctctcgagcccagatggaaagacgtttttgtgctgtgggcagcaccctcccccgcagcggggtagggaagaaaactatcctgcgggttttaatttatttcatccagtttgttctccgggtgtggcctcagccctcagaacaatccgattcacgtagggaaatgttaaggacttctgcagctatgcgcaatgtggcattggggggccgggcaggtcctgcccatgtgtcccctcactctgtcagccagccgccctgggctgtctgtcaccagctatctgtcatctctctggggccctgggcctcagttcaacctggtggcaccagatgcaacctcactatggtatgctggccagcaccctctcctgggggtggcaggcacacagcagccccccagcactaaggccgtgtctctgaggacgtcatcggaggctgggcccctgggatgggaccagggatgggggatgggccagggtttacccagtgggacagaggagcaaggtttaaatttgttattgtgtattatgttgttcaaatgcattttgggggtttttaatctttgtgacaggaaagccctcccccttccccttctgtgtcacagttcttggtgactgtcccaccgggagcctccccctcagatgatctctccacggtagcacttgaccttttcgacgcttaacctttccgctgtcgccccaggccctccctgactccctgtgggggtggccatccctgggcccctccacgcctcctggccagacgctgccgctgccgctgcaccacggcgtttttttacaacattcaactttagtatttttactattataatataatatggaaccttccctccaaattcttcaataaaagttgcttttcaaatttttggctcactttgctgggtggaagagtgggtggccagggagggagtggggagtcctgggagggaagcagcatcctcagagcagctggtcctccccagctcctcctggtgggcaccgccaccccaacaggtttggggacaggctgtgtggtgggccgaggcgggagtatacag

SEQ ID NO: 9428 - DNA, 1215 bp, Homo sapiens
acagatgggactttggtgcccttcatgcatcaggcctcagtttcccccttaggcccaggtgggctgggatgaacttcaccatggcagaggaggtctgggagaattgtgcctcagctctgtcatctctgtccttgtccccccatttctgcctccccctacctcggacaggatcctctttcagaacacagggagagcttgggaggacctggaagccaggatcaacgccgagaacgaggtgcccatcctgaagacatctaacaaggtgagcgctggggccccgtgccccttggcctgcccccagccagcctgcctttgcctggctggccccaaaccttgtcccagctcctgcacacagagccccggggcagggctgcagcccgtcagaagttgactccacctcccttcctgccacgtttccaggaaatcagctccatcctgaaggaactgaggcgggtgcagaaacagctggaaggtgagtgtggcccaagcctggggcagcaagggaggctggcagggccttgtggggaaccctgactcacagggtgggagcaggtgaactggatccgcagcctgaccctccctccccacctccagttatcaatgccatcgtggaccccagtgggagcctggacctgctcacaggaaacaggagcttggccagctctgcacagccggggctggggaagggccgcgtggctgcccagagcccaccctcacccgcctcagccgaggccctgctgccagccctgcccctgaggaatttcccacagcgggccagctgtgggcctcccagcctcccggaccccaccttcctccctgatgccgagaggttcctgatctaggccccagacctggccaggccagcctccctgtgcgtgtgcgtctctgccttccgtccgccgcacacccgcctgcctggccgcaggtggttctccctgaagacccccacatgtgccatatccctgtgggcgggtgcctcccacgcccttgccccctcgtcagctcccagccagcaccctactcaccctgtccagccccatggccacccccacccctgcctcgccccctacaggcctctgggcccagctcctggccaggctgctgccaaggtcaagccctcaagggcattaccccgcctcctcttcatcactgttatttttgtctttagctttaaaggaaagagttgttggtgccattgcaggtgccccctccagg

SEQ ID NO: 9429 - DNA, 1227 bp, Homo sapiens
cctgctggggcagcccgtgttgccggagcctctaagccaaagagcccgttggccgtggttggtgggggtggacgtgggggtgtcccacctggaccagactggcgtgggtgagctccacaccctgcctggcaatggtatgagagtcggacctggacagggccagctgctgggggagcggcactggggactggaggctggaagcgggtggtgtgtgtcccctgtttacttttagctgagctggggttgggtgtacgggttctgttcctctgagcctgcggcccacctgatgtttacgtgtgtgtgtgagggggggcgggggtggcaggtgtccccccctggtccccgccccaagagcctgctgtctgtatggaggaggtgctagcccggtccaccgggctgctgcccacccctgcatgccccagttgcccaccccgcctgcccctggacatgaagtggtcacgcttcatccacggctccttcccacccctcggcagtggctgtgcaatgttttaagttcacaagttcctgctcctccccacactgagctcctttgttcctccccctccagcctttgcctgggaactggtccttgtttgccgggcttctcggagggttcactgtacattcgttctcaggtggtcttgtggctgtctttcggaaaatggttattttatatgatttgtcatggaatttgttctaataaatcattcttctatcacatggcagcacgctggagcctgtcaccttggccttgtttctctatccttggtgtttggggtgggtggggccctgcacataggacagaccaggggtggctgcaattcagagatgctgccaccaggaggcggcctgggctagaaagcagcatttccagatgtttactcctaaaaaacagaagagttaatttatgaaaactgttcagtgagacagcatccgagagcgctgtttttgtttgtttgtttgtttttgagacggagtctcactctgtcgcccaggctggagtgcagtggcgcgatctcggctcactgcaagctctgcctcctgggttcacgccattctcctgcctcagcctcccgagtagctgggactacagtcgcccgccaccacgcccggctaattttttgtatttttagtagagacggggtttcactgtgttagccaagatggtctcgatctcctgacctcatgatccgcccatctcggcctcccaaagtgctgggattacag

SEQ ID NO: 9430 - DNA, 1182 bp, Homo sapiens
caaatgtttattttctacgtttctttaaccttgtataaattattcagtaactgtcaggctgaaaacaatggagtattctcggatagttgctatttttgtaaagtttccgtgcgtggcactcgctgtatgaaaggagagagcaaagggtgtctgcgtcgtcaccaaatcgtagcgtttgttaccagaggttgtgcactgtttacagaatcttccttttattcctcactcgggtttctctgtggctccaggccaaagtgccggtgagacccatggctgtgttggtgtggcccatggctgttggtgggacccgtggctgatggtgtggcctgtggctgtcggtgggactcgtggctgtcaatgggacctgtggctgtcggtgggacctacggtggtcggtgggaccctggttattgatgtggccctggctgccggcacggcccgtggctgttgacgcacctgtggttgttagtggggcctgaggtcatcggcgtggcccaaggctggcaggtcaacctcgcgcttgctggccagtccaccctgcctgccgtctgtgcttcctcctgcccagaacgcccgctccagcgatctctccactgtgctttcagaagtgcccttcctgctgcgcagttctcccatcctgggacggcggcagtattgaagctcgtgacaagtgccttcacacagacccctcgcaactgtccacgcgtgccgtggcaccaggcgctgcccacctgccggccccggccgcccctcctcgtgaaagtgcatttttgtaaatgtgtacatattaaaggaagcactctgtatatttgattgaataatgccaccattccggcctcccttgttctttcggtgctgtcccttttgtattgagagtgaggttgggggagagccacgccggcagagaggcttggggcagtggggcgcgtgctgggtattggcccacgtggctgtggtggctgtagagggcgagacggttctgttgagtcggggcctgccagggcctcgaatgcgttggcatgccaaggtggtggatgcaggtttggccaaaaccttcctgggaatggggaggggggtgtctaggtgcctggcacccgaccctgactaaaacagctgaaaacagttttataaaatagtataaaattgcttacccacgaatacgtatcaaggtcttaaggaatt

SEQ ID NO: 9431 - DNA, 2727 bp, Homo sapiens
agcccagcttggtacatagtgagatgctgctggggttggcctgaggtgggggccacttcctccaccccagtgggtatgtctgaggtcagccatggggatatctgggttgagattcaggttttggtgaatatggggcaggcgtccagatgtgtttgtgtcacctgctgcaacgctgtagccaatgaagattccagcgggatggcctgaccagcggggccggcactttggagccgtgggtgcagccaggtaccccgtgcagggcctgggaggctctccaggccacagtcctcagagcgtgttgggtcccatgttgtgtgtgggttccatgccctccacacagcaggagagggcttccctgaccacacctgccccctcagtcctgcttctccccagtaagcctgcactgtggggtctccataggaggagctggggaagctggggccctcccaggggtcctgatcgaccctgggggctcttggcctggtttcgtaagatggagcactgcaaaaggccatgctcagaaagcaaacgcagggcagggtgggcctcgagccggggctggaggggtctccacccttgctggcctgagagatggcccacatttcttacttgtgaccgccctgctcttcctggccgccccccccaggtggctgaacagggtgattttgttgtggtgaggggccaggatgtggcctggtgtgcagcctcagctccctgggttcaggcctcagaggtagcctgtgtgcaggaggcagagccccagcccctcccagccagagcccctccacaccagggactcctccttcacctgggaccaggagcctggggcacaccccagggtgggggagagggtaggaaggtctcccattgaatcctggcttcaggctctgccccgagaagtgtctgcggtgagggtgtgagccccgggctgatggcctctgaccccggcaacaggtgggaccctgactgactcgttcagctgcccccaagctgggctgcagagcatctgtttttctgctctccagtttcttttctttttttttttttttttttttgagatggagtcttgctctgttgcccaggctggagtgcagtggcatgatctcagctcactgcagcctccgtctcccaggttcaagcagttctcctgcctcagcctcccgagtagctgggattacaggcgtgtgccaccacacctggctattttttttgtatttttagtagagatggggttttgccatgttggccaggctggtcttgaactcctgacctcaagtgatccacccgcctcggcctcccaaagtgctgggattacaggcgtgagtcaccgcgtcctgcctgctcttcctgtttctttcccaagggtcacactcagtagggagatgaaggtggaaacatccttgctgtggctttctggcctcagagcaggttttagaggaaggggccacaggctgcctagtgcatcctggctgtgggcagcccctttcctggagccctcctgcctaccccgtacctcccatctggctgcacagctccatccttagccacgcaaggggagaacatgggcagagtctccatccagcagctgggggttctggtggcactccctgtgcccctgctgctgctgggctgtgggtctgccctgcacccaggagccccacggtccatcccccacaccatgcccagcaccagggaggttgggcagacaagacctgggccatgccagccctctgtgcctcggttttcccactggttacacaggatggtcgcattttccctgcctacctcacagagctgttctgagggtgcatggaggagcactctgtcccaccaaggacaactagaaaccaaagccatctgacagccagtgcggtaagggcgggggatgtgtgtgtgaggtgtgcacaccccccgagaacctggccctggactggcctcacaggacaggaggcagccccttgtagagctagggctcagccccatcagtctcaaaggttaagccaccagtcaccaccgaggcacccctcaggcctggtggccactgtccactattacgtagacagaccccaccctcacccaggccagctgtgggccagtcccgccctgcaatctggtctgctgccttcctcttccatgttggtccccttggccactgtctctgggcatgcaagccagtgtcctggttcagtgcctcggccagagctggggcaggagaggggcctctgggtgagagctgggggtgtctctgcagggtactggcagccttgccacactgtcctcattcccagatggaaagacctgagtgcctctcgccttcctccgggaatgaattcctcatgaaaatgaccaggccacttcttccgagggccaggccgccccctccccgagacctgtcctgccgtccgcgggtgtgtggcctgtaggggactgagagctgggcttgctgggcacctctggaatctgaccctgtgggccaaagaagcaccactgtagtttctgcagacccccatgcggttcattgtgcattgtttggtttctaggatgtatgtgttgctagttttttttaatgaaaccctggattaatgtaaatagctttttggggaacggattctaatgtcacgtatgtgaccgtgtggactatttcaaggtgctgatgcaacactaataaacctggaggggccggcccccgcctgcagtgtgattctctcggccgtccaccccttggga

SEQ ID NO: 9432 - DNA, 1205 bp, Homo sapiens
gtggcagctttgggctctagggctggggacaccccgaccccaactcatgccttcctagtggctgcattgctcggccttcaggcctgcctgcctgtgatcttggcgccagcctggctgccccccctccaaccttcccatgcctcggtttccccatggtgtgggtgaggacctcgtctctcagccgtccttttgtgccctgtggcagctgtgctgtggctgatgaaagccaggaccctgccttgtcccatcccggaggtgcagctcccctgggccccacacaggcttgggaggagcccttcgtggggctgcgccgccctccccgaaccctctgtccccctgtgcccgcaggcccgtcccagggcctcactgacccacgcactccagtgctgtgagggtgggtggcctggactcctaggctgtggcggaggggccccaccatgcctggcagagatgctgctggtctcttttcctgtgatgaggagcatgggaggttgggtgctgtctgctggcagcacagccacgcgtgggatccagactgcttctgcgtgtgcagtccgtggtcactgtggccgggtgtgctcggagctgtcaggccccccacgtgcccgccccgaggacttcctctccctgcaggtgagactgtaggcctccccctctctactctgactgtccctataggagaagcggcatttatccctggcttctggaccggaaccctgggttccggcaggaccccggcagagccctgtggtcgcagtgggctgggcattgcaggttggcttcctgtcttggtgctcgctcggggaggtgggcgtctggattcttgagcccccagacaagaaagaggaaggtgtgcagtgtctcctgagcagcctttgtccgtctgtcgccggctgcctggcacgggctccatctgggtggccagtcctggcctgtgggagatgccggcagggacccagcctgggaaggggcttgctcctgtgcccccccaccccagggaccttgtgtgtagaggcaccaaatttagttaagaaaagtacaggacgcccaggcaaatttgagtttcagataaacagaaatttattagtgtaagtatgtcccaaatatggcatgggacatacttgtcccagaagattcttatctgacattcacagttatctgggcaacccgtattttagctggcaggctactccgaggccctgcca

SEQ ID NO: 9433 - DNA, 1291 bp, Homo sapiens
gaagtcctaccccaccaaagtgcgcctgatccgggggggctccctgcccccagtcaagcggcggcggatgaactggatcgacgccccggatgacgtgttctacatggccacagaggagaccaggtggggccttcccagggcaggcgggagggctccgcacagcgtcccggccctcaccaccacctctgcccacaggaagatccgcaagctgctctcatcctcggaaaccaagcgtgctgcccgccggccctacaagcccatcgccctgcgccagagccaggccctgccgccgcggccaccgccacctgcgcccgtcaacgacgagcccatcgtcatcgaggactaggggccgcccccacctgcggccgccccccgcccctcgcccgcccacacggccccttcccagccagcccgccgcccgcccctcagtttggtagtgccccacctcccgccctcacctgcagagaaacgcgctccttggcggacactgggggaggagaggaagaagcgcggctaacttattccgagaatgccgaggagttgtcgtttttagctttgtgtttactttttggctggagcggagatgaggggccaccccgtgcccctgtgctgcggggccttttgcccggaggccgggccctaaggttttgttgtgttctgttgaaggtgccattttaaattttatttttattactttttttgtagatgaacttgagctctgtaacttacacctggaatgttaggatcgtgcggccgcggccggccgagctgcctggcggggttggcccttgtcttttcaagtaattttcatattaaacaaaaacaaagaaaaaaaatcttataaaaaggaaaaaaaccaaccggtccttccctgtgtcttttgttcccagtccctctccctgactcaggccctgggccccccacccccatcgggcggccctaggctgtggctctgccgtggagctggaggcccctggaggccacctcagccaggacagccaccccagcctctgggctctgttgctctcccacctgcccacagaccttcccctgctggggcctggcgcggtgccctctgccctccccagggggcagcaagcggttgcagggcccaacccccttccccagcagagctgtgctgaaaccgtctgtgcgtctgtgtctgcggcagcggtgggccggggactgcctcccggcaggcagagctggccctgccgaagaccctgtggcttcccaccagggcagccagtgcagctgggccagcgaggccttggagtgctccagccagagg

SEQ ID NO: 9434 - DNA, 1124 bp, Homo sapiens
gccagggtggtccacgatgtcttccctgccctccccttccctccactgttcccccgacccaccccagcggcctccctccacaggagtgaacaccggtgcggtgggcagctacatctatgaccgggaccccgaaggcaaggtccagccctaggctacagcggctctcatgatgtgggctcacctgcgccccagaccctgcaggggcccccctgcttggctctgctgggagagtgctcagccgcccagtcctgcctgcaagcccagggcgagtattggaggaggggcagccacgggcagagcaccatgcccatccccgagtctctggtgtgtctgccccctctggcatcctctgggcgtcccatgatcccttctgtgtctgcgtgtccgaatccccgtgtgaccctgtcccagcattttcccgccgaccctgcgtgtccccgtggcgctgtccgctctccctctcctgctgcccacccacctgccagtgttatttatgctcccttcgtgggtgatggccacgccctcaccatgtccctggcagagggcttccctccgggatcccctgcctggtgcccacactgcctcgcaagcgctcgccaccctcacgtggctcacctgctgttgagccttgtgctgtcaataaacggtttgaggattgcaggattgtctctgcttgtgggatggatgcaaatcccagaccagggtccctttctccggtccatgcgtgctcccagccaacacccctgggcctggctgctagtgggggtgggctcttctcctgggggtcatagtgggaggtggggccctgggatgtttctgagcaggagggagggatgggggcggggagcgtggtctccggtttgggtggtggtgcccacccagatggggaggcagtaagaacgccaggctgtggggaggtaaggaaggtgggaggcattccggggccagggtcctggccagggtcaggtgagggtggggtccatggaggacagagccttggagaaaagttgaacctagaaccctgaaaataccaacagcaggcctgagaacccggagctgcctgggtgtgtggaccctggcaagcgcaggaggggtccgccctgagagcagagtgtggctgagga

SEQ ID NO: 9435 - DNA, 1149 bp, Homo sapiens
caagtggctattcattaaatttctccatgaaactaccagatacagaatagataaattgtcactgtcttaaatcaacccttgggaaaggaaaactgtgtaaagacagcagagaggaaacattgttcaagggaaaaacaatctccagaaactgttgttaaagaaacagaggccctctttccagccagtgccgagcgatggacatctcttgggacaactggcacaagtgccacaaaaccagggacaagagaaagccctaccacaagaagcggaagtatgagttggggcacccagctgccaacaccaagactggcccccgccgcatccacacagtccgtgtgtggggaggtaacaagaaatactgtgccctgaggctggacgtgaggaatttctcctggggctcagaatgttgtgctcataaaacaacgatcatcgatgttgtctacaatgcatctaataacgagctggttcgtcccaagaccctggtgaagaattgcattgtgctcattgacagcacactgtaccgacagtggtacgagtcccactatgcgccgcccctgggctgcaagaagggagccaagctgactcctgaggaagaagagattttgaacaaaaagcgatctaaaaaaattcagaagaaatatcatgaaaggaaaaagaatgccaaaatcagcagtctcctgggggagcagttccagcagggcaagcttcttgcatgcattgcttcaaggccaggacagtgtggctgagcagatgggtatgtgctagagggcaaagagttggagttctatcttaggaaaatcaaggcccggaagggcaaataaatccttgttttgtcttcacccatgtaataaaggtgtttattgttttgttccaaaaaaaaaagagaaacagaggcatcacacttactagaaaaacatattctatttcatatattatggtggtatgacgtgatgttttgacatatgcaggcattgtgaaattattaaatcaagtaaataaacatgcccatcacctcacatacttattttttatggtgtaaacgtgtaaaatctactctattatcagttttcaagtatatagtacattagtaccatggaagtcaccctgctgtgcaatagatcttcaaactaattccttctgtcaaaccaa

SEQ ID NO: 9436 - DNA, 1149 bp, Homo sapiens; identical to SEQ ID NO: 9435

SEQ ID NO: 9437 - DNA, 1149 bp, Homo sapiens; identical to SEQ ID NO: 9435

SEQ ID NO: 9438 - DNA, 1211 bp, Homo sapiens
tgccttctctcagcacatccctgaataggctaaataaataaattagcatatgcttatgtgcacctattgctaagaagaaaatgtatgggtgagaaaattttgagtttctttgtatagattattcaaaaggacacatttgagaacctgataaatgtatttccaaactagatttgtatattatgcctaattttttctgcagaatttttttttcttatcagaaagttttattaaggctagaaacatttttttttaaaatatgggatcagagtttatgaaatcagtttaaacttggttttatagcatgatcctatcttttgccataatttgaagaaatatacaggttggtgctaaatttaaataataaatattatcaatattagtaatgaaggagctattttttctttaggggaagagaaatggagtaaaattttgaattgcatgtgagctgtcatgagcattctgtgaaaaccacatttcattttttattgtttaggtttgaagactgcttcattctgcctctagtaccagcggtttctctgttctgtgatcaatgtgattcacaggaactccttaagtaacaaacgaaatgagccaggggcgtggaaaatatgacttctatattggtctgggattggctatgagctccagcattttcattggaggaagtttcattttgaaaaaaaagggcctccttcgacttgccaggaaaggctctatgagagcaggtaggttatgccttatgtgactttgaagtgacctcagtgtctacctacatgcacaggttctttgtacaagaccacatcttcattcctcgtgagtgtatttgaaactttgaattgttcaagagttctaaatgtttacaaagttgatgtttggttatttatattgagaaaagaagtgagaagatgtcataattagttaactactcagtcctgcagttatcatcaaaatggaaacagggaccaatgcccaagtaatatccaaccttttctttaaattttgatatgtctgcagggaaggaaataagagtccatggttaggctgggcgtggtggctcatgcctgtaatcccagcactttgggaggctgaggcgggtggatcacctgaggtcaggagttcgagaccagcctggcaaacatggtgaaaccccatctctactgaaaatacaaaaattagccgggcatggtggcctggcctatagtcccagctac

SEQ ID NO: 9439 - DNA, 1442 bp, Homo sapiens
tttgcgctggtcaaagcgctggagcccgaggagctggacagggtggcgctgagcaaccgcatgcccatgacaggcctcctgctcatgatcctgagcctcatctacgtgaagggccgcggcgccagagagagcgccgtctggaacgtgctgcgcatcctggggctgcggccctggaagaagcactccaccttcggggacgtgcggaagctcatcactgaggagttcgtccaaatgaattacctgaagtaccagcgcgtcccatacgtggagccgcccgaatacgagttcttttggggctcccgggccagccgcgaaatcaccaagatgcaaatcatggagttcctggccagggtctttaagaaagacccccaggcctggccctcccgatacagagaagctctggaggaggccagagctctgcgggaggctaatcccactgcccactaccctcgcagcagtgtctctgaggactagcaaagtctggaggcagatgaatggtttctgaccctcaccagggctgtggaagggtgggggtgggtcattatagtattcaggatttacagtgcagtattcacgtgtaacttttaagttttcagtacagtgcttttatacctttaatgcaatgttgtattcatttgggtactattgtgtagtatttaggatgtatgcatgtttgtttatatgtaagcttggttggtgctttcgcttttgtgctacctttcttggatttttgtaccagagatgtgctaaactgatgaaatacattgagaaagtttccatcttattcttttatatgggactgatgatgtgtgttggggtagactgctcctgcagagtttggaagaagtcaccagcaaagccggcctaaccaagaaaagtcaaggcccttcatgaccttgctgggcacagaaaacaccctcgtggagtacactaatttgaactggactggtctcagtgtgagcacttggcacactttactaaacacatatacaaccccaccgtgagtcaactttaaagtaaacattaaagattcttgtgatacaatcatttttggaaaagtgtactttatcattttaacaaagcagtatggttgggaatgagacaattctctattttacagtgtatacagatacaactatttcccctaatagggtgggaaaaatcgctactcatgattactcctaaatttgtgaagtttatagttctattgtctttaaatgtaactcatgtttatttcaaaaacattcacaaatatagaaaagtatacaaaacaaaacagtaagattgtctgtaatcacatcatatgggaataaaaaacaaaaataatttccttcccttaagtttctacattttatcaaaattaatagatgtcttgtgacatctattaatatacatataacatatttataatataaaagagtgagacattgtgctaagcccta

SEQ ID NO: 9440 - DNA, 1272 bp, Homo sapiens
gttctcgaaaatttaccaaatataggttggctgtaaaatcataactatctgaggtatctgtcaataaatcaaagattgcaatgatgatagcttctttaacatgaatgtaattctaacagtaaaaaatttctatatggaatatgttttgtagtcctaaattgatattttatatcatttttcagtgaacaagtagttgtttacaggtgtctgtgcatatgtctcaagtttttctaactaaaatattaatagttaagtctaaaaatatgaattatacgtggggcttgtcattctgacatttaatacttcagcgtggtgataatggtgatataatatactgtttgaaattgtaacacatgagttaaaatcaaaagattgataagtacatatttgtatattgctacatgacaaaaatctaggaagaatatgattcacatgaaaattctttggaaggacatgacagacttttaacagtcctgtatagtgaaaggagaatagaacgactacttctactttctgtatctgaaattttcaaaagctatttcaaaatgaacatttaaacaacaggaaattttagagacaaccactttgtgcctgtcttcatccttgacattcaacatcctaggaacaatgggctgttgtattcaacttcttattcccaacagccattatgaatggtttttgattgatctcacaaagagcatgtgctttagacattaatgcagcgactaccatgaaacagagtattggattacctaaggaaagaagcagaggatggaatttgaggtaggtgtcaaacagtgaaatttcgtttgagaaacagatgagtgaaagaaaatagtaactgaaacattcattctataaggagagtacattttaatactggcgatgctgtatttgtgggtactgactagatcaagatgttagaggaggtgtctcttgggataagttggaagttatccttcattaatttggtataaactgaaaacagattgcttctttccttttaaagtggttgagtctctgatgggtttaaagtaggcctttggggatttatagatcattcaaaattagcaggggaaattttaaatattctctgcatctttctaaaaggtgtggtttaaagttggtgagaaagtgaaatggttgctggttgaacttgattttctctattcactatgcctggctagcctaaaattatcctaatgggtatgttcaggtgcctgatttgtatctaaatgtttctgtattggatactgtttttcttaggcaatc

SEQ ID NO: 9441 - DNA, 1089 bp, Homo sapiens
ctcatccatgaagacttcatcaacccccaaagtgcctccaatgcttccgtggtagcacagcataatggggtacatttcttagttgaacagtgaggagtcactgggattcttacagagtgtcttagggtctcctcttgatactctttccacatttcagttaaggaattttcttacatctttttttcttctaataacctttgcctggagtgtaagtaaattcatgatagagactgtcatttttaaaaaaaaaaacaaaccattttgcctttcacatgttattacctccatctttctgttatcttgtcagtgttgccacctaaatgattgaaaatgaccgagcatgcagtagaatgtagtgaagtttcctatttcatccattttttgcataagtgcattggtatctgtatatccatctgcccaagcaccagttgttgaaaagactattatttccccatgaatggtcctggtacccttgtcaaagaacagttgaccataaatataagactttctggattctcagtcttactccattgccctatatgtctgtcgttataccagcaccgcactgtcttgatggctgtagcttggtagtaagtttagatttgggatgtgcaagtcctccattttttttttttttttccccaaaatcattttgtctgttttgggtcccttgcattgcatatgaatttttatatgatcattgtgtcaattcctgcaaaacagctgggatcttgatagggatttagttgaattggtagataaatttgagaaataactgctattttaatggtgttaggttttctgttccatgactgtgggatgtctttgcatttgcttaggtctttatttcagtgatgttttagagatttcagtgtgcaagtcttgacgtctttaatttttttctaagtattttactgatgccactttaattatatgattattttctaatttttatttttgtattcatcactggtgttagaaataaaattaatttttgtatattgattttgtatattgtagcttttctaaaattctttttttgtcacttagtattttttgcatatgagatcatgcatctgtgaacagaaa

SEQ ID NO: 9442 - DNA, 1130 bp, Homo sapiens
aggtgtaaaattgaatttttaagaatattcttgacagttttatgtatatggccttttcatagcttaatattggctataacagagaattgtgaaattgttaagaagtaggtgtaaaattgaatttttaagaatattcttgaatgtttttttcttggaaaaattaaaaagctatgcagcccaataacttgtgttttgtttgcatagcatattataagaagttcttgtgattaatgttttctacaggaatttgtcaatctttattctgactacattctcaataaatcagtagaaaaacagttcaaggcttttcggagaggttttcatatggtgaccaatgaatctcccttaaagtacttattcagaccagaagaaattgaattgcttatatgtggaagccgggtaagaaagcaggtgtctgcaaaaagtcatgtatcgatttattgtttgtaatgatacagtagtatagcagataactaagacatattttcttgaatttgcagaatctagatttccaagcactagaagaaactacagaatatgacggtggctataccagggactctgttctgattaggtgaggtacttagttcttcagaggaagatttgattcaccaaaggggtgtgtgattttgcttcagacctttatctctaggtactaattcccaaataagcaaactcacaaattgtcatctatatacttagatttgtatttgtaatataatcaccatttttcagagctaatcttgtgatttatttcatgaatgaagtgttgttatatataagtctcatgtaatctcctgcatttggcgtatggattatctagtattcctcactggttagagtatgcttactgctggttagaagataattaaaataaggctaccatgtctgcaatttttcctttcttttgaactctgcatttgtgaactgttacatggcttcccaggatcaagcactttttgagtgaaatggtagtcttttatttaattcttaagataatatgtccagatacatactagtatttccattttacaccctaaaaaactaagccctgaattctcacagaaagatgtagaggttcccagttctatctgcttttaagcaaatgcccttactactctactgtctac

SEQ ID NO: 9443 - DNA, 1188 bp, Homo sapiens
atgaaaataaatgttctcttttttcctctgattttctagatgtgacttacttaacagaagagaaggtatatgaaattcttgaattatgtagagaaagagaggattattcccctttaatccgtgttattggaagagttttttctagtgctgaggcattggtacagagcttccggaaagttaaacaacacaccaaggaagaactgaaatctcttcaagcaaaagatgaagacaaagatgaagatgaaaaggaaaaagctgcatgttctgctgctgctatggaagaagactcagaagcatcttcctcaaggataggtgatagctcacagggagacaacaatttgcaaaaattaggccctgatgatgtgtctgtggatattgatgccattagaagggtctacaccagattgctctctaatgaaaaaattgaaactgcctttctcaatgcacttgtatatttgtcacctaacgtggaatgtgacttgacgtatcacaatgtatactctcgagatcctaattatctgaatttgttcattatcgtaatggagaatagaaatctccacagtcctgaatatctggaaatggctttgccattattttgcaaagcgatgagcaagctaccccttgcagcccaaggaaaactgatcagactgtggtctaaatacaatgcagaccagattcggagaatgatggagacatttcagcaacttattacttataaagtcataagcaatgaatttaacagtcgaaatctagtgaatgatgatgatgccattgttgctgcttcgaagtgcttgaaaatggtttactatgcaaatgtagtgggaggggaagtggacacaaatcacaatgaagaagatgatgaagagcccatccctgagtccagcgagctgacacttcaggaacttttgggagaagaaagaagaaacaagaaaggtcctcgagtggaccccctggaaactgaacttggtgttaaaaccctggattgtcgaaaaccacttatcccttttgaagagtttattaatgaaccactgaatgaggttctagaaatggataaagattatacttttttcaaagtagaaacagagaacaaattctcttttatgacatgtccctttatattgaatgctgtcacaaagaatttgggattatattatgacaatagaattcgcatgtacagtgaacgaagaa

SEQ ID NO: 9444 - DNA, 1140 bp, Homo sapiens
gtccgtatttgaaagatctcaatctgtgttctgaatctttactcatttacatatacttaaatcttgaaacccagtatagcaaaactaagccaaaacaaacaaaaaaatccatcccttgataggaagtcagtatatctgggttttagtcagtccttcaacactagttccaaaatcttgggcaagtcagttaatcactcggaggctgcttaattttttttttttttaattcttagtatattatctgtcttgattaggtaaagccaaagttgttataagactcaaggtactattgaccaaaatgcttcagaaactataacattacataaaagtacaaggaattattacattttctcaaatgaagagatcatttaagaaaaacaaaatgctggaaaatagtccttaaaaacttttctataataattactcttctgatgaattttacattgacacctaatttgaagctttgaatattattttttgaacaatgaattgggtttatatattaaagtgttctaaccaaaggtttgtttaatttattagagttattaagcctacgctcagatcaaggtagcagctagactggtgtgacaacctgtttttaatcagtgactcaaagctgtgatcaccctgatgtcaccgaatggccacagcttgtaaaaggtaattttgaattattttacagcctttaaaaggctgtcattgtaaagtgaaatacatactgtaaaaatgaagacaatgtatagttggcaggaatactgctaagaatagtgggcctgagagttgacctacttcatttaatctccttaaaatattttagtgtctttttttctcattaaaaatatcagtagccactatcaaagacctatctgtatgtataaacaggaaagtatttctcaaaaaaacttcaaggttttaaacattttactataaacattatagaaaacattaaaaatttcttaatatgcattttaaagtatgccttttatgtggtgaacgttttaactaaacatttctctagaagtttttataacattaataaaactagtatacttttctctcctagagagttacagtggaggtaaaaggagtggcttgcaggatggagaagctgcaccagtgttattggaagtgagccaccat

SEQ ID NO: 9445 - DNA, 1211 bp, Homo sapiens
ctgatgccgtggaccccacacttccctgcagattcatgaggtctgggaggtcgttttgagtagacaggagactgcaaagctgacctcagtgtgatgagaaggacaatgacacattcccgagccctgtggtgtggggagccgctgcagcctgatgctcgcacttccccggccatgctcatctccctcccgcctctttcccgcttccaccaccacattctctcctttccctcctgtcttgccctctcgcccctgactccatctcacctcatgtgcatctcccagggcggtccatgggttctggaggcctcattgagccccaccggttacccgcgtcatagaccgcagtgtgtctgaaggcctcagaacctcacacctgctcattgatgactggcacgtttttgttattgtcattgttgtcacttttaggtggaaataaaagccctttctttctcattccccctcagacctggctcaactggataacgtgtggcttcagtgtccttttgtttttcaccgtggctttgatttacaatgcgtcttgtgccacgtgctatcctccgtccaacccttactggactatgcaagccttactgggtgacccagtgttttacttgacttgcctgatgacgcctgtcgctgcactgctgcccaggtgggtgtcggagcgggatagtgcctctgagccccgagtgagcccagacgacattggcattgcttctgctctatgtgggtctctggaagctcaaagacaccaccgacaggaatatctaactttttgttttaatgtactttttctagattgtttttcagatccctccaggggagggttttccccacacaacttcagctggcacgtcagttgaccaggaagtcccccaggagatgcagtgctcccaaagagacctttgctcagggacgcctcccgaaggactcgggaaccgagcactcatcagggaggacagtcaagacctctgtgcccctgtcccagccttcttggcacacacagcagccggtctgctccctggaggccagcggggagcccagcacagtggacatgagcatgccagtgagggagcacaccctgctggaggggctgagcgcaccggcccccatgtcctctgcgccaggggaggctgtcctgaggagtccaggagggtgtcctgaggagtccaaggtgagagctgccagcaccggcagggtgacccccctgt

SEQ ID NO: 9446 - DNA, 1215 bp, Homo sapiens
tatgttttctgctgttttgttcttagcaaaaaatatggttttgtgagcacgaagagtctaatgagcacagtaaagtaaactgcagccgtactcaatttctaatcacttcatgtttctgctcaacaggtgttggataaatacaaccctccagaccacttcctccctgagtcctacacctgtttcttcttgctgaagctgcccaggtattcctgcaagcaggtgctggaggagaagctcaagtacgccatccacttctgcaagtccatagacacagatgactacgctcgcatcgcacttacaggagagccagccgccgacgacagcagcgacgattcagataacgaggatgtcgactcctttgcttcggactctacacaagattatttaacaggacactaagatggggaaacgtcctcgtgagatgagagcctgagccaggcagcagagcgctcgctgctgtgtagactgtaggctgcctggtgtgtctgatgagaagcgtccgtcctcgagccaggcgggaggagggagtggagagactgactggccgtgatgggaatgacagtgagaaggtccgcctgtgcgcgtggaacactgtggacgctcgacttccaagggtcttctcacccgtaatgctgcattacatgtaggactgtgtttactaaagtgtgtaaatgtttatataaataccaaattgcagcatccccaaaatgaataaagcctttttacttgtgggtgcaatcgattttttttctttctcctttctttcaagtgtcgtgagtcgtcttgattgtatattggaaataactgtgtaacaaatcgtattataaatatttcaattaattttactctgaatttgtttattaaaagacttttgaacatgaaatgattagtattacttgaatgcatccagaggatatttaaaccaaaatgaaaaaccagaaggccatttggtgtcccccctcccaggtgtccccttgtagcatatgcattatgtcatctgaattgaggcctttctgtgaacagcatcataacttctatcatggaaagtgtactatatataatgtttgtgtcatgtatatgcctaaattttaattatctataaataaaacatctgacataaaagtgtaggctgagctttcttaaccagtacaaccaaaaaatcaattagttcttgatatagcagtagtaaagatttcagccaagttgagattattt

SEQ ID NO: 9447 - DNA, 1136 bp, Homo sapiens
gtgtctgtgaatgttgcaggtggccggcacgcgacggctttaactgtcgatggaaaagtgttttcgtggggcgaaggtgacgatggaaaacttggacacttcagcagaatgtaagggtactttttttagtctcatttgctaataagaaactgtttctgactgatactcttgagaattattttgcagaaaattagaatagaatagattatagaaatggttcttaaacaaaatttttttaacacggttgtttgtgttttggtctcaccggttctgctttaagttttgatagttgatctgtggatcctgtgttgactacatgtggatcagtatagatgtcttttttccttcatctctaagaagggacagattgactgtagagagctgatttcatcttgttgtaggaactgtgacaaaccaaggctgatcgaggccctgaaaaccaagcgtatccgggatatcgcctgtgggagctcgcacagcgcagccctcacatccagcggagaactgtacacctggggcctcggcgagtacggccggctgggacatggggataatacgacacagctaaagcccaaaatggtgattatacgcatttttgttgcttgcagaaagcttaccatctgaagatgtcaagagaaaataagcttcaagtctaggaaagttcataaagatgtgtgcatggttggctttatctgtgggaaaatccattgctttctccgtgcctgtgcgtgattctgtttttaaatttgtaattgagtaggtgaaagtccttctcggtcacagagtaatccaggttgcatgtgggagtagagacgcgcagaccctggctctgaccgatgaaggtgagtggctggcaggattctgtgcttctgggtgggtaggaatgatatgaaacgctggcctgaagtatatgtgtttcttaaacctaggtttggtattttcctggggtgatggtgactttggaaaactgggccggggcggaagtgaaggctgtaacattccccagaacattgagagactaaatggacagggggtgtgccagattgagtgtggagctcagttctccctggcgctcaccaagtctggagtggtgtggacatggtacgtaaacgtcctccctgtcacactgtgtgtgc

SEQ ID NO: 9448 - DNA, 1165 bp, Homo sapiens
ttgtaattctttattttctcctgaattctgatagttcgaagagaatttatttatttttgagtgttttgtctggctttactagttgtctttgatggggaatgccagttgaattccagatttgccattaatggaagtggaagcactttacaatttactttttgccttgtatttataaaagcatttttaataagaatggtttttgtgagtgctgttattgaacttttcccacagcttattttgttttctttggaaatatattaatctgctgttgttccctgggaggttttagtagaataaatcatagcattatgtggacttcatctcataaattggtgtaactatatcttgactagggaaaccatttgtggcatttattaactcctttcagtttgaaactttctatttttctttaagaagctccttactatgtaatattcttgatcatgatgtttctccccagttcagcaagggttaattctctttttgactatcacgaaataggtcagtctgcggtattttgtggccgttctggaaaacagctgaagcgttgccacagcagccagccaggcatgctgctggacagctggtcccgcatggtgaagagcctgaatgtgtcgtcctccgtgaaccaggcatcccgtctcattgacggcagcgagccctgctggcagtcatcggggtcgcaaggaaaggtagcatctaatagggcacagcagcgggcactttcacaccgatggttttgccttgtacattttcaaaatgaactttgagcagcctgcaaagttttgctgatagcacctgtcagtactcacgttatgttttaatttataagttatttcaaagttagagttatataccatccaattttattgtcagagattttaaacaatacgagtaatagattttatctaactgaccacttgatagaggatgtggtcaggctttttttcctcctctcctgcatagaatgtatgaattcagatttgcttctggttagaagtttttctagtatagtctagcaaatttgtgttgcacattggagtgctgttgtgattacaccaacgcgtggaggcacctcgtgggcacacaggtcagactttaggacagggcctttctccatctcgactgtagtgttttctgtcactcacttggtgggtaaaaggac

SEQ ID NO: 9449 - DNA, 1163 bp, Homo sapiens
gacttgcaaggcagatgtggcaatgcaggcgagtcttgtcttgaagagtagtatcacattgctgtttgaaatgcagctttggacaaaaaataatgacactgtgtttgttctttctagagggtcagatatttctatattagcctcatcagtattttaaatttcgttgtcttaatgtttacattccttaaacattgggaatgtggaagtattcctttggaagcaagatcttctgcagtttggaccactgcgcgcagctccataggcgcacattagtgaagcacgagggcatcattatctcttttgagccttccgtgcccttctgctccgttttggctgaggttgcgcttgttgcagatacattggacacacttggggagggaagccagctgcaggtcatcatgtatgatctgtgtttgtgatattaatttgtcatgatttaccccatcccattttctttttagtagaaatatcttgtttaattttgtaatcctcttctttcctgtatagaaacattgcttctcagactgtagccagattgaaagatgttgcccgtcggatttcatcatgtctggactttgagcaacacagtcgtgaaagatctgcttcattggatttgttactgcgttttcaacgtttgcttattagtaaactttatccaggagaaagtattggtcagacctcagatatttctagtaagttgcttaaaatgtgaaagtgtcttgtatgtgatcggggctcgttactttaggcttttcgacgtgtccatcctatatgcccagatgtgtagttgttatactactaaatgcaccaattttggggcttcattttgcatccacttttttgagttggacctttctataatagcctcgttaatatttttaattttgttgccttaatatttaaattctttagacatcagtaatagcatcctgtatgttcagtttagtcttacagaagatttatcagatttgttccatgtgctatggaatgctggagactggcatgatgtaggaagtaaacagtgacagcctattcatatgtcacatgggggagccagctgggtggaatgggaagaactgttggagaaagcctgggtttcagttacagctcggcttaatagtttagacattagaccaagtctaatggggccaaagacttctcac

SEQ ID NO: 9450 - DNA, 1099 bp, Homo sapiens
ctgaagagtgtgctatgcattgttaaatctcggatgggagaatatgatctaatagttaattaaaagcaccttgtttctttctgactgaaaatctgaatgaggaggagaaaaaaaaacagatcctttttgtatcctagtattatgatctttgtagactgtgggtcctaacgaattgtagctgacaaaatacagcagttttaataacacacccaaagcaaatgaattgtgcttaatattaaagcaaagcagattatcctcaagaagttaatgttaaaagctgtctgacctgaatggcctaggaaatatctttcttgcagcggaagtcataggcttgaagctgcatctgcatccctcttcccttgtagggaagaaggtgattgatgtggctgcaggctccacccactgcctggctctgactgaggacagcgaggtccacagctgggggagcaacgaccagtgccagcactttgacaccttgcgcgtgaccaagccagaacctgcagcattgccaggactggacaccaaacacatagtgggaattgcctgtgggcctgcccaggtactgaatatagagcttgatttggtattttggaggattttggtttccagttgttcattaccagtatgtagaaaataccactgagttttgtttgttgttcttgtgtcctgcagttgtgctaaactcatttattatgagcttcactgtagtttccttgggttttcttcatggacaattaaatgctatctgtatagaggggcagtttcatttcttcctttccagtctgctcgccttttatgtcttttcccggcctgattgccctggccaggacttgcagtgtgaagctgaataggagaggtgacagtgggcaccctgccttgatcctgactgtaggggaaggcagttcagtctttcaccatcaactgtgatgttagctgtgggtatttatgtagatgccttattatcagattaagggagtgtctttaattccccgttttagaagcttctaaaaaatcctgactggatgttaaaatttgttaaatgcttttaatcttctcaaatgaaatggtcatgcagttttccttctttagtgtgttagta

SEQ ID NO: 9451 - DNA, 1282 bp, Homo sapiens
tttatgaagggcaacaccatcaaggaaactgaagcctgggactttctgcggcgcttaggggtctaccccaccaagaagcatttaattttcggagatccaaagaaactcattactgaggactttgtgcgacagcgttacctggaataccggcggataccccacaccgaccccgtcgactacgaattccagtggggcccgcgaaccaacctggaaaccagcaagatgaaagttcttaagtttgtggccaaggtccataatcaagaccccaaggactggccagcgcagtactgtgaggctttggcagatgaggagaacagggccagacctcagcctagtggcccagctccatcctcttgaaaggtggattcagagggacccccgggacaagggtctgagacccaaaggcacagtttagaggattgggggaagggagaacgaacccagggagcatattgctgtaaacgcttcaatgtgtgtagctttaggatgtgtttgcaaagttttgtttttttaatgttgtgttattttgctccagattttcatctataaacaaaggagcatttgttttgattttactctttttggtataaaaaattttgctagcttagtaaaacgaattggaaaacttgactatgatctggaacagataatgcaagaaggaacacataagtaagttgctttggtgccaagaaaataaaaaagctattatcaggtctcctaactaccccagtttgtaaggaaaaataaaagtttttataaaattaaaaaaaataattgcctatatccttattatgttaacctattttatttttctatatttcgtacatatataagtattattcatggttccaagcaatgagtgtaatgtattttctcccaatagtaattgtttatattcataattattcagctctgctgctaaacacgtagttccacttcgtttttttcttcttgctactgtagttattacaataaatactgtatttttgaagcacttaagcattgtgtgttttttaaatcgtgggtcatgagagaatttcatgactggaaatcaacatcttaaagtttttgctacatattaaggtcaatgctgttttgtagaagttgtttcacttttgtgtgaaacaaaatcaggatcatgaggtgaaatatatttctcactgtggatctcaaaaaggcttataaaacaatagcgtaaccattaaccatgcctgtttgggaatcggactgtctgggttgagatcctggccccaccataactagtatatgaatttacataggt

SEQ ID NO: 9452 - DNA, 1399 bp, Homo sapiens
cactctatcaagtattataccttttttagagttgatactacagtttgttagtatgaggcatttgtttgaactgataaagatgagtgagcatgcccctgaaccatggtcggaaaacatgctacacactgcatgtttgtgattgacgggactgttggtattggctagaggttcaaagatattttgctttgtgatttttgtaatttttttatcgtcactgcttaacttcacatattgatttccgttaaaataccagccagtaaatgggggtgcatttgaggtctgttctttccaaagtacactgtttcaaactttactatggccctggcctagcatacgtacacattttattttattatgcatgaagtaatatgcacacattttttaaatgcacctggaatatataaccagtgttgtggatttaacagaaatgtacagcaaggagatttacaactgggggagggtgaagtgaagacaatgacttactgtacatgaaaacacatttttcttagggaaggatacaaaagcatgtgagactggttccatggcctcttcagatctctaacttcaccatattaccacagacatactaaccagcagaaatgccttaccctcatgttcttaattcttagctcattctccttgtgttactaagtttttatggcttttgtgcattatctagatactgtatcatgacaaagactgagtacgttgtgcatttggtggtttcagaaatgtgttatcacccagaagaaaatagtggtgtgatttggggatatttttttcttttcttttcttttctttttttttttttttgacaaggggcagtggtggttttctgttctttctggctatgcatttgaaaattttgatgttttaaggatgcttgtacataatgcgtgcataccacttttgttcttggtttgtaaattaacttttataaactttaccttttttatacataaacaagaccacgtttctaaaggctacctttgtattctctcctgtacctcttgagccttgaactttgacctctgcagcaataaagcagcgtttctatgacacatgcaaggtcattttttttaagaaaaaggatgcacagagttgttacatttttaagtgctgcatttaaaagatacagttactcagaattctctagtttgattaaattcttgcaaagtatccctactgtaatttgtgatacaatgctgtgccctaaagtgtatttttttactaatagacaatttattatggcacatcagcacgatttctgtttagataatacaccactacattctgttaatcattaggtgtgactgaatttcttttgccgttattaaaaatctcaaatttctaaatctccaaaataaaactttttaaaataaagtgctggcttggtctg

SEQ ID NO: 9453 - DNA, 1173 bp, Homo sapiens
taaacatatttatgttaatacaaattatgatgcccataaatcttctttaggatttttcagtgtcaaaatgaagtgtaatcaatagtgcattaattttctactaaatttaatatttatctttaactcactgtttatttagtacatgctgaaacataaaagcccctacctgcattataaattttgagctttcacttaaaccagctttttccactaatcttgtctatcctgataataaatggtaaaacataccattttcacatattaaatcgtagtttaatatttaatcacagtctaataaaatagactagaattagaaacaagactttgtccttaaatgtgaattttttatacaggtgtatagaaaggatccatatcccgaggaaatgatgaggcagaaccatgttttgaaacagccagccgttagtcacccagggcacaggccagacaaagagcctaatctgacctatgaaccccaactcccatacgtagagaaacaagccagcagagacctcgagcagcccacatacagatacgagtcctcaagctatacggaccagttttctcgaaactatgaacatcgtctgcgatacgaagatcgcgtccccatgtatgaagaacagtggtcatattatgatgacaaacagccctacccatctcggccaccttttgataatcagcactctcaagaccttgactccagacagcatcccgaagagtcctcagaacgagggtactttccacgttttgaagagccagcccctctgtcttacgacagcagaccacgttacgaacaggcacctagagcatccgccctgcggcacgaagagcagccagctcctgggtatgacacacatggtagactcagaccggaagcccagccccacccttcagcagggcccaagcctgcagagtccaagcagtattttgagcaatattcacgcagttacgagcaagtaccaccccaaggatttacctctagagcaggtcattttgagcctctccatggtgctgcagctgtccctccgctgataccttcatctcagcataagccagaagctctgccttcaaacaccaaaccactgcctccacccccaactcaaaccgaagaagaggaagatccagcaatgaagccacagtctgtactcaccagagttaagatgtttgaaaacaaaa

SEQ ID NO: 9454 - DNA, 1196 bp, Homo sapiens
gttttaggggctgtcctgtgtattgtggatgtttaggggcattcctagcctctgctcactagatgagatgccactagcacacaccccttaccctttcagtacacagatggggcagtcaaaactgcatattggcaaatgtccaatgttggatggcgagggataaaattacctttatttgagaactgctgatttagatatggaaatgtctataatgtttgcagataagttagatgatataatagaaaacaagcatgtggcttttgacaagttacttgatgtattttctgcatcagtttcctcatctgcaaaatggaagtactaagagtttcaattcttacagtgatgaatacatgaaataatacagtacctggcacatagtaagaatttgttggatattattattgatattatcatagcatctttacataatgtactgtctttcagattgttatcccactaaatattgataatgtgtttgtttttattccttttagtttatcgtcgcattgtagaatcagatgtaggagattctttctatattagaacccattttgaatatgaaaaggaatctccctatggacttagttttaacaaaggagaggtgttccgtgttgtggataccttgtacaatggaaaactgggctcttggcttgctattcgaattggtaaaaatcataaggaggtagaacgaggcatcatccctaataagaacaggtatgaatgcttggatacttctcatagagtgaatcaagtaaatgatgatagatcatttcaatcccactgggaaattttggtaatgtaaagaattctttttcattgtattcaacgtatctataactgacttaggtttacaaactcctctttattataaccattaagatttaaactgtatgtgaacttccatccagtattgtatatttcatttcattgtgggtctttttccattttgcattttaaatgcccttattttaattttctcctttcttgtgtagagctgagcagctagccagtgtacagtatacacttccaaaaacagcaggcggagaccgtgctgacttctggagattcagaggtcttcgcagctccaagagaaatcttcgaaaaagcagagaggatttgtccgctcagcctgttcaaacaaagtttccagcttatgaaagagtggttcttcgagaaggtagtttattttctacaga

SEQ ID NO: 9455 - DNA, 1661 bp, Homo sapiens
tagtctgtgctcttgtttgaagcagttttgccaaagagaattaaaaatcagtgtttgggggagagggatataaattccctttatgcattattacatgtcgacaccaatgctttaggtatcacagggtcatcctgagataattattcacaggccggtactactttgtagatagatatgtctgttcttacacattaaaaagttctgataattgcttccagatactattgaaatgcttatttattcgtttgtttataagtaatagaaagtgacagcctcaaagaaggagttaggggatgctactatgggtttttctgacagcaacagtacagtaaagattttatcatctcaagaaggtggaatactttgacagtttggaaaagtgtagagagaatattttggttttcatagcaaggagtggtttggatatttctgtttataacaaactaagttaacatttgtattttattatttactttcaagctgtaatttattttctgttgcagataaatggtactgtgacagaaaatatgtcattgacagatgcaaagacattgatagaaaggtctaaaggcaaattaaaaatggtagttcaaagagatgaacgggctacgctattgaatgtccctgatctttctgacagcatccactctgctaatgcctctgagagagacggtgagtgtgattctgtttgaacgttccctctaagtgacctattttcttaaaatactagggagattgaacatctttgaatgaaatgataattttctaccagccaaacaccttcaaaatctataagttttatatacattttttcctgtagacaactcaccactattgatatgattgctggcaggtgaaattaatgcataaatcttccattttatatataattttacttactagcttatcttcattattactggagtaccttatacttgactgtaattatttttgtgggaaaataagtagcacccttttattaacagacatttcagaaattcagtcactggcatcagatcattctggtcgatcacacgataggcctccccgccgcagccggtcacgatctcctgaccagcggtcagagccttctgatcattccaggcactcgccgcagcagccaagcaatggcaggtaagacaccctatttttttaaaaaatacaggggttttgtttgcttgataccagtatctgaaattgcttacaaataaaattaaaagatgtatttcttttgattattcaagattagatctgtttttctcaacttagacattttttaaatctaaaataaccgcaaactttcccttaaagggccagatagtaaacatatttcaatcatgcaggccatatagttcttttcactgctcaactgcaaaagcaaccatagacaatgtgtaaatgaatgggcatgactatgttcccataaaactttatttacaaaagcggttgatccgcagctgcagtttgtcatactattgcattagaagatgctagcaagcttcagaaatctactgcttgggaaagttaactacagaagtcctttaataaacacattaacctggactttgttttctcttttaaaaatacactagtgttggccgggcgcggtggctcacacctgtaatcccagcactttgggaggccgaggcaggcggatcact

SEQ ID NO: 9456 - DNA, 1176 bp, Homo sapiens
gagtgttcagtgccgtctttagaggagtatctttcctttcctttgtccagtgagaacacagcggagtattcagagcttgcctctgggaaatgcctcctccctgctctccagctagcgttgaggaggtggctggaggagggaagccctctgtgtcctggggctggccgccagttccctcgtgaccttgggccagtgatcacacatgctcggcctcggtttcctctctttgaatatatcaatcaacttgttagctttattaatgtcctttatcttctcttctctttgcattggccctctgtttaaaattggtctttctagtccataagcaggtgtaagagataagctgctgtttcgcagcaggctcctgggagcacaggttgtgttactgaggcagaatcgttagtcttcctaacatccctgcagggacagttctcctgacaggaattgataagggcacattatgtaaaatctggagggcaagcctttcccttttaggtcaacactcacccgcaagctaaaaaggctaatcaacagaagcattttctgtgttcattccagagaatttcccaggggcacaataaatctagcctgcctgtttacaggaacattgttatttaacaagctagtttccaagcttaagagttttcggtttcatcaaatctaacccagcttgctaaatgcctgacattcattattgtctgctccggttcctctgtgtattataagataattttgcatacttaatataaagatagtttttacacacaggactaaccttaaatttattagaaaactattctaaactcttggatccctttctcttttttttcttaaccatttacctatgattccatcctgtctttaacctgcccactagtacttctagctagctagtttatctgatttacacattcagtaatttatttgttcatccatctaatgttattttgagcctctgctctgggctatataaatgtgatattagaaagaggaaagggacaggcacagtggctcacgcctgtaatcccagcactttgggaggctgggcggtggggggcggggtggtggattgcctgaggtcaggagttcgagaccagtctggccaacatggtgagtctggccaacatggtgaaaccccatctgtactaaaaatacaaaaaaattagccagacgtgg

SEQ ID NO: 9457 - DNA, 2670 bp, Homo sapiens
ccagctcgccctgagcccgccacagccatgagcagccgctcccaccccctcgtgagtccctggcctttccttttgtaataagaaagaagagagagaacttgatgcaaagtccacgaaaaaacaatttttttcacctcaggtgtcaaagtaaatttgttaaaaaaacaaaaaaaacacaaaaatttcaaaaaacaccacccaccaaattgcacaatagatacacccacaaagttgagattcagcgttgttgaaccccctttctcagggatggacacgtttcacgaggtcagtgaggacaccccttcctgccgccttactctgtacatagatttgcactctggagttttctgttaggttcgggaacacgctggggacagagcaggccagccagtctggtggagctcagcgtctggctggctggccagcctgtgggtctgttgggagcagatgtgctcactgacgtttgtgcctccagggcagattcctaagcagctggcctgacctcttcctgcccagcccccaacccagtctctggcctctgcccaacgagcctggctgggcttgcaacgcagctgattctgagacaggcccctgcagagggatgccttaaagctgtccctggctggaggagcactccaccttggggatagtggagggggccttcagccctctgcaccctgcctgcctcacaccccgccttcaggagccctctcctacggcgctagggagcactggaagcagagatgccagccctggctgagcgtagcactgcaccgtccgacctccgaggcaggggccggggtcacacctgccaggactccgcttctccgtgtcccagcagaaggcatgcaggaccctgtcactactatacctgggcctctgatggggaattctggtcttctaaaaagatgttagaaattcctggtggcacatccagttccgagtttgcccgcacgggcacttttgttggaaacagtgggcaggtcatggggcctcctcatcagagggtctgtgtgagcggctgtgcatgtggcagcgcaccatgcttcacagagaccattctgtagcaagagaccggaacattgtgacttggaccttttcaggagtggcgcggatgttacaggaaatgctgtcggagagcgcgcattctatttcctccgcagggaatgccagatagaaagttgcgggcaacacttttctcagacccaccatgtccccaactcagacttagcaaacctccagcctctccgtttcccctggactcctcctcccttttcctcctgcttctccttgtcctgcctggaggctccaggccacacccagctggtggggctgctccagtgccccatcaccggccttctcctggcaggagaggaggagcagagagctgggtcctgggctgggattcgagccctgggcgggggtcagtcaagccgtggtccagcaaactcctctgcagatggctggagtgttgacccaggcttgtggcccaggtatcaccttcccttcctcctgagagttgaggcctgtaaatacaagggcccaggacagagtgtgtgcgtgcgtgtgggtgtgtgcgcgcgtgagcacacacgcgtgtgttggggggggtggggggattggggtggactcagggtatcttgccagagatacctgttttgatgagtacctattttgatgcaaaggaacggccctgggacctcagagggccacagatgggcttcctgggcctagcgtgccttggttgtggccatcctgcttctactcagccctgccatgctatggggtgcagcacaaacccaggacccaggcctagccactgcccacagctgatggtcactgttttggctggctccagagtggacaggtacgctctgtccacagcagctgctcaggcacagtatgccgtcaggtgcccgcttcttaccactgtgtgtcagctgggattggccgacagcgtggtggtgacttctaggtagaccgatggaccctaaattgggcagtggcattgtttctgctgtggtgggaactggcagggagagggtcacctccactctggttggatgcggagctggtccctctggctgccatgctgtgttggggctctctgacctccctgcttgcattgggtctgggagagagagtggaatatttggtagggaccttgacagaagagagccctgggtgcttgtggtgcaaagatcttcatgcccagttccaaagtgaggtccctcccaaagttgttttcgtgtgaggcagagaaagccacactctgaatacattttatgtctcaggaattcacattccaggttcaggaattttattccaaagtcctttggtgcactcaccgtccaccgttccccaaggcagggagagggagtggcccgtccctgggaggctggcaaagtgctctccagggaggggtcagacgtccttgtgatctgcccagggtgtcacggaaggagattttctagctccacatctgtctgcacataggaaggaaaagataggactctaaacctagtcatcttggaataaaaagaagagctggtttgttttagagcagggcggggggtgggggagggaagcgggtgttggctgtttccaaagagagcacttaatttaatttttcctttaaatgacccagggctgttccgtctgatagatgga

SEQ ID NO: 9458 - DNA, 1058 bp, Homo sapiens
catacaggaaaacagacggacacagccctttccttaaagagccctggggtcctgtcctgcaggatgctgcataggaatgggcagagatgtcctggatgggaacatggtcctggaggtgccctacctgcatcctgctgcacccccacccacgacactcgagtgcaagatcgcctcactcctaaccctgactttattcccaggccccacaccgaggcaggtgcaggattcgccatggtgcagcctccgggtacaaacatctgaggcactggcgatcccagtccttgcagcaccctgaacacagctcagaccagtgaggggtgattcagaggtggggatgggcagagagggctggccactctgcctcaggacttgacctcaagtgttctgtctccccacccggtgtgtccagaagaccagcctctttcttgccagaagcaggtgctaagatggactgcacagggtcccggcactccctcgggacccattcaggatctcagctgggcaggggtgccacccaacaggaagatgtgatctgagcaatagtgtggccttgtttctccgcttctggttgtggctgtgtgtacagggctacctattttgacttctgacaggtgtcactgattttctttcccccatttaaaaaaggtcatttagtcaaagacacagtgctagaggtttaaagggtgtaatgtgttggtcacatcacaaccagtaagaaacgcttggtaggttatccacatcttttgctgactgtttccatatacaattctggtcaccatattttccaaagctaaaatctgaggcgtgggctgatggtttttgaaatcaggattaccccaggaagaaccaggtcctattactaattttcctgattctgaggctctgaaggcttgtctgagacacattccggagacctttgtaccagaacttggatgcatagtccaccttactactgatacacgcctgagcaccctttagggcgaggcgccgcctcctgcctgctgtcctgtccctcagcatcagaagagttgaattcagcaggagacgggagcccggtg

SEQ ID NO: 9459 - DNA, 1150 bp, Homo sapiens
gagaccaagtgtgtttgctgtgcggctgacagcctgactcccgggtcctgttgctctctgtcctgtaaattaagagcagatggagtggataaactgagagcgcaggagaaggtaacacaagtcagaacttccaccaagggcattactgagacatggagaacgttgataattctctggatggcagtgatgtgtcagaaccagcaaaaccagaagccggacttgaagtggctcagtcgatcctgagtaagttctctatgaaatccctatttgggtttacgagtaaattagaatctgtgaatccagaagaggaagatgctgtgctgaaagcattccatagtttagacgtgaatcccacatctcagcaggatgattccagcaatggcttggatccacaggaagcagggtctcgggtttcacctgacctcggaaatgatgagaaaattgcaagcgtggagacagaatcagagggaagtcagagaaaagaagcagggacatctctccttgctcaagagctgcttccactgtctactttgaaagggacaaaagacgatgtcatttgtgttcgtgggaccctggtgcacaccaccagtgattctgactctgatgatggtggccaggagccagaggagggaagcagcaccaatggcccaaagtcccctagtggtgttttatctgagccatctcaggagtccaaagaaaacccaggaggtttcagggaaaatactgtcactggggaaatgaatggtgcagagctctgtgcagaagatcctcaaaggattccacctgagatgagcagcaaactggaagctggcaacggtggtcttcagacagagcgtcgccccagccaggaccaggtgggagaagaagggtcccaagacctacctgcagtaacaaaccagaattcgagtgttggtatcactgagagtgcctcttctaaaaaagaagtctctggagagaagtcattccaacttccagcttttttcagtgggcttcgtgtgctgaagaagggggctaccgctgagggaggagagaccatcacggaaattaaaccaaaggatggggacttagctttgctcaaattgacgcagcctgtgcagaagtccttagtgcaggcagggctgcagacagtgaagagtgagaagaaagcaac

SEQ ID NO: 9460 - DNA, 1302 bp, Homo sapiens
atgctgatcttgtattttaaattccaacactttgtgtcactacctcctctaatggttagtatgatatgctagcagactgtatgaggtctttttttaaaataccacttttagtgtcagtgaaccaaattctggaatgtcttaacagctctaaatcttacttgtcttgaaaatgattggggtttaataccactgctggtggttcacacatcatcccatccttaatatgcctgacaggcatctgagcaaaggtttttagtaattgaatttctctgcagtagtccttcaagcacttgaatgtaaacctttagcatttattcgtttaatgactactgatacgaatctcaagcagatttcttgctcttaaaagttatgtttcactgagttctggttttgtgtagctatattttatatagctagatattcctcacagtgaacatgaattgtaataattggttatttccttaagtctttagattataataatttcagattattgcacgtctgtgatttgagaggtgagttatttaagaggccagttttcaggacatgggaatttgaattgtaaacctgttatctctgtgaaacttttaacatgataaaatataacctttctttgtgcttattcctgtagttatcactgtcttatgtagcagtttgaaccagttaacttggttggagtatggtgctaaagaggccgtggacaggagtttgatgcttttgtaggttcattaactttacatacacacaaaatgtttttatagctgtcgattgcaccttccgtcaggtatccatctcagaaattcaggaagatggtatgtatagcttagcataaacctttcgcctcaaatggaaagattactcaatgggtatatgtgatactgtagacttttaatctaacatttaaaataatagattcaaaataagatatctaaaatactgtgtaatgtttagtttcaaagtattaagtaatattacatcagatatttttcacatttttctctgggtcagatcattgactaaacagtatcttcaaaaatcaaacttcaataaatcagacttcagaaaaattaagtacaaatgacatatagtaagaacaggtattatcttggtaacatttatacctaaatttaggttttttgaaggcatgtagataatactttatcttacatactcagagctatataagtcagcagagtttttagctgacaaagattattgagtagcatatactcctaatttctgttcttggcctttgcagtttccttagtacctacccctctcagttattgaattgattagtat

SEQ ID NO: 9461 - DNA, 4066 bp, Homo sapiens
atgatgatgccaggttttaagtttgtgctcttcttttgcctgtctccttgacaagttttgaagacatggagttcctagaggtgcttaccgagggactagagcgagtcctacttgtccggggtggtggcagtgaagtgatcaccatttattcataacctactctgaatgaccgtgcttgacctgttttcttaaaaggcctacgtcctccatggaagtgccagctcattactaccactcccactcaactagaagcctgtgttctgtacacatcatactgaactcttgatgagctgagcctcaagtacctgtgtaaaagagctcccatctgatctgcagtcattacagaaaaagcaaatattccctcaacatcagaacaatgctcaagtctttcaagccacgtctgagcagtcaaaggcaaattagaattaacaagctgagccaataaatgaattggtaaaagggatgctagaaattcaactgaagaaaaaaagcaagtcaagtacgtattcagcattaaagatgaatctcagaagtcatggttcaatgttgacactgtgaggataacaactagagacagcttcatcttactaaagaatttatggtcaagtatatttggacctattatcctcggcaagccaagatgcaaacattttttagctatatttctttagtatacccactgctgtaattttatattaggatactaacttgaaacatggctgcagcctctacttcttcaaaaacatccccccaaaataccagatttaaatatccaaatactgtgtcagtgtatacttcaactgttttgtttctcttaactcaaaacccattctgtcattgtaacacaggcagtgttaccatggaaattgtttttggtaaggtaaaaattatttctttcaggttcctttcaaatggccgaactaagagaactccaaaaggaagctattaacatttactgaaatagtctgtggttctctatacaacatggacaaaacatacaagctgttgtctaagaaatgcaggtcatggtgcacattaatcaacaggttcttctccccccgcccccacccccgcgcctttttttatgccctcttattaagcacaggtcaaaaaatcttaaggaacaaatactaggaaaactggctaaacatccttccctgaaagcactggaccatcttttaaagggcacatctagcaatggaattggaagttctagagccacactctttctttagtgccaacgttactgagcggctactctccttacctactttactaaaatggcatacagattggcattgacctgttgaagaaattttaccactaagaaatcttttgcctcatctacaaagccatagttaagacttgaggcattcaacttaatgccaagtataagcatttccccctttttctttcaattttattcttcattctgactacagaaacttggccctgaactacgagattagccaagccaacagtcttctaatttgttttcagaaacttcaggccgggtgccgtggctcacacctgtaatcccagcactttgggaggccaaggcaggtgaatcacttgaggtcaggagttcgagaccatcctggccaacatggtgaaaacctgtctatactaaaaatacaaaaattagctgggcatggtggtgcatgcctgtgatcccagcaacacggaaggctaaggcaggaggatcatttgaacccaggaggcggaggttgcagtgagccaggattgcacctctgcactccagcctgggtaacagagtgatatgtttcaaaaagaaagttcagtgtgccaaggaaatacttgtgtaagctcagctttttatttactaatatactgatcaaacatctggcttacaagcatagggaaactacttatgtggctggctgagcagtaatttcaagtatgtgaaatcttcatttcttttacagaatagttatttagagaaacttttcttgcctgtattcatggctgtttttgaatttcaatttattagtcataaatagtgccactcttctttgattactaaataggacatggagcaagctgacctaggtgtcacaaattattcatttgacctgtaaggacagagaaaacccttcaatatagcttaagaaattgagtaattttgggccgggtgcagtgactcacgcctgtaatcccagcactttgggaggccgaggcaggcggatcacgaggtcaggagatttgagaccatcctggctaacacggtgaaaccctgtctctacaaaaatacaaaaaaattagtcgggcatggtggcgggcgcctgtagtcccagctacttgggaggctgaggcgggagaatggcgtgaacccgggaggtggaacttgcagtgaaccgagattgcaccactgcactccagcctgggcgacagagggagactccatctcaaaaaaaaaaaaaaagaaagaaagaaagaaattgagtaattttgatttgttccctttgcttgcttcaacctccaggcccactgaggatggcaaagcggataggatcttaagtctttttttctgttacttcctacagatggtagaagcattatttacaactcccactgcaacactccattgcttagttgagtttaacagtagtgagtcatgtcctgcaggatccagtatcttttttttttttttccgagacgtagtttcgctcttgttgcccaggctggagtgaaatggcacaatcttggctcaccgcaacctctgcctcctgggttcaagcgattctcctgcctcagcctcccgagtagctggaattacaagcatgtgccaccacacccagctaattttgtattttcagtagagacggggtttctctactgaaactgatgttggtcaggctggtctcgaactcccaacctcaggtgatccgcccgccttggcctcccaaagtgctgggattacaggcgtgagccactgtgcccaaccaggatccagtatcttaaaggcccatactgtaaaggtcagcctgcctaggaattctgccacatttacacacacccctggccaaagtaatattttttttttccatgtagaacaaattatgggcagaaagtaaagttagttttagaagtgctgtttgtggttggagaattgtaaaaatcttttaaagggataagggaattagtggcttttaatataaccactgcttcagcccgaaacacaaaatcactgttacatggaaaactggttattaggccagatttatattcatgtctgtctagagtatttcatgtgtgtatgtgttgcttacgttgtctgtctccaaagtctctcatctcttttaatcactgcaaataaagcaatactgaaaacttgagagaatgcaccttaggggaaggggctatttcaagacagaaaacaaaggaaatacctgccttttgaataagatcccgcttttgagtcttacctatgactttaccagggtagattagaaatacacatcctcctgctgaccctctgccttcaatagctatctatcttaaaagctgaagtttgaactgcagcatctgcttgacaggtgccaggttccttcggcagggggacgatcactctatatatcttccgttgcctcagattcctgtggcccaaggatcccaccaatcctcgttccccctaaacatgctaacaaaaatcccttatcgtgggtattaaaataataacagttacactgtatgcatatttatgtgctccttttgtctggtttttcttttcatcatgtataagctgaattcagcattagtttctcacatcttcccccaggtatccccaacagaatttttatgtcccagcttgtattaaatagaagtgaaatattaaggaaaataaggaacttgtgcaactttttttatgcattgttctcaaccatttaatttattgaaaggagatgctgcaacagttcttgatttagcagcagttattctcttgtttacatagttatgtttttttgttgttgttttgctctgtactggaaacaaaaataaagttttctacattattttcagccttgggttatggtatagtttcttt

SEQ ID NO: 9462 - DNA, 1111 bp, Homo sapiens
gaaatcatcagagaaatgcaaatcaaaacttcatataatttataaaaggtcagacagctgtggaggcagagagcttttactgtcattatcagcagcaatagtgtgtaaaggagactacatctaacacagtattataccctgagtatatactcaatatctttttttcctcctaaacttaggtgactttaagagtagagtctcggctgggtgcaagtggctcacgcctgtaatcccagcactttgggaggctgaggtgggcggataacttgaggccaggagtttgagaccagcctggccaacgtggtgaacccctatctctattaaaaatacaaacaaattagctgggcatggtggtgcgtgcctgtactcccagctacttcaaggctgagacaggagaatcgcttgaaccagggaggcggaggttgcagtgagctgagattgcgccactgcactccagcctgggcggcatagcagctccatctcaaaaaaaaaagagtcttcatgggctggaattccaaaagaatagcgtctctaggggtcttgattattgttaaggaaaggaatgacccatgtttacttctcagagttttctttttgttcctgctggagagttttattttgttccatattctccaagcagtgctgattgagttctaagattaaatttgaatatgaaaatgggttatattaataccgaagcaacctgcacttatctggtgctgatgtttcttcgtcagaaaccagtgagaaactaacttggtctacttttttttttccagacgacggacataagaaagctcgaaatgcttatctcaataattccaattatgaagaaggagatgaatattttgataaaaatttggcactctttgaggtaatattttggagaaaactatggactgagactttaggaacagagatctcatgatagccatattttaccccatttggtttaaaaattttacaagctggataatttaatgttaaaagaaaatattgtaacttgttattatagtaaattttgtctgtgtaatctaattatagtgagtaactattaaatcaaattgttatgtagtaaggaagaggagtttgacttcttggacatatagat

SEQ ID NO: 9463 - DNA, 1224 bp, Homo sapiens
gggactacaggcgtgcgccaccatacccggctaatttttggttttggggttttttgtttggttggttggttttgtttgtttgtttgttgtagagacgaggtttcgccatattgcccaggctggtctcaaaccatcctcccgcctcgacctcccaaagtgccaggattacaggcgtgagccaccgcgctcggcctttttaaattttatatttctctatttatttgtacaactttttgagttgaccattgcatcttctattttcatgtttgccctttttcgcgctggccccaccccatttcatcactcctgtactgacatacattctgtgttcctggagcagaaatttgacccgatgggacaacagacctgctcagcccatcctgctcggttctccccagatgacaaatactctcgacaccgaatcaccatcaagaaacgcttcaaggtgctcatgacccagcaaccgcgccctgtcctctgagggtcccttaaactgatgtcttttctgccacctgttacccctcggagactccgtaaccaaactcttcggactgtgagccctgatgcctttttgccagccatactctttggcatccagtctctcgtggcgattgattatgcttgtgtgaggcaatcatggtggcatcacccataaagggaacacatttgacttttttttctcatattttaaattactacaagattattaaagataaaatgatttgaaaaactcttattttgtgagttgttggaggaaaggattggcagtatttttttaaagggagggagatgataaaggagagtaccccagagagttgcaacaataccacttggaagaaaaacttcagtcctgctgttgcaagagtggtcatgtgctgttcatgataggagggtattggggaagaaagattaagactttcacagctgtcagcattcactgaaaaatacctctgttgtcacttaacgtaatttcttgtcccttgaaataagattttgattaaaaatggaagagtacttgtaaaagtaataggcatattacagacagaggtcagtgaattgaaagtcagaagaccagtatttgctttttgtataactttgagaaagttacttaacctgtttagtctgatttttctcctgattaacttatctttgaactcaaattgatttagtggtgggcctttctttttttttcttttgagacagagtctagatctgttgtccagg

SEQ ID NO: 9464 - DNA, 1213 bp, Homo sapiens
aaaccctgtgtctactaaaaatacaaaaattagctgtgcatggtggcgcatgcctgtaatcccaacaacacgggaggctgaggcaggagaatcgcttgaacccgggaggcagaggttgctgtgagccgagattgcaccattgcattgcagcctgggcaacaagagcgaaactccgtctcaaaaaaaacaaaactaaactaaaacactgttaagggcagttaaaacccagcccatattcccaggctgttttttttgttttgttttgttttttctttagggttgaaaaaaaactaaatccccattcaccgcacacggcactcttcactaaccacgagaaaccccacccaacaccatccaccgggtccctcccttgccctcctaatcccgccagcgaggtgtcttctctctgccgcccgctagagggcgtgtacagaggaggtcaaagctcttggctcgctagctcagccccaacgcctgcatgaacttccggctacacgccattccgcttcccgaggaacgcttgggctgttgtacgggttccctacgggactctgaaggctgaggatatccggcccggagcgtttgtgcggcgcggagttaagcgccccggcagtaacttaagggaagtggaccagggttgccgctgcccagagcggtcctttagtttccactggagtggagggaagagtgctgccatggcagcccctgcgcagcccaagaagatcgtggcccctacggtgtcccaaatcaatgcggagttcgtgacccaggtgagctcgggcgagtctggtgtgtgtgagtgggtatggacgtcgtggccccgaggcctggtggtggggttttttttcaggatttaggagtccggaggaggcattcgtttgttaattgattcacacacgtctttttactgagtatcagctccgtgccggccactatgctaggtgctgggcataccgtggtgaaagaagctgccctgccctggggagttcatggcccaaggaagacagacgcatgaaaataaaactactgtatgagttttgctgtgttggagtttgtctcaggagcaatggattcagagaggagggaacaccccagtctatctgagactggcaagtaggcttcgcagcagagtgatgctggactgcctcttcaagtaggagtaggctttttcctggtccttagagtgtcctgagtttttgagcagcgatgagaa

SEQ ID NO: 9465 - DNA, 1146 bp, Homo sapiens
gcgtcagcaggggcggcggcgggtgggaaatggcggagtgtccagcctccatctttggcaccgagaaagtcaactgttcatttgatttcaaaattggagcatgtcttcatggagacaggtgctcttggttgcaccataaaccgacgtttagccagaccattgccctcttgaacatttactgtaaccctcaaaacgcttcccagtcggccgacggtttgcgctgtgccctgagcgatgttgaggtgcaggaacactctgatgaattttttgaggaggtttttatagaactgggggagaagtatggggaagttgaggagatgaatgtctgtgacaacctgggagaccacctggtggggaacgtgtacttcaagcttccccgtgaggaagatgcggaaaaggctgtgattgacttgaacaaccgttggtttaacggacagccgatccacgccgagctgtcacctgtgacggacttcaggggagcctgctgccgtcagtatgagatgggagaatgcacacgaggcggcttctgcaacttcatgcatttgaagcccatttccagagagctgcggcgggagctgtgtgggcagcgtcgcaagaagcatagatcaagatcccgatcccgggagcgtcattctcggtctggagaccgtggtcatggcgatggcggtggcggtggcggtggcggtggcccaggcggcggcggcggacgggagcgtgacaggaggcggttgagagatcgtgaaagatctgggcgattctgagccatgccatttttaccttacgtctgctagaaagtgttgtagttgattgaccaaaccagttcataaggggatttttttaaacaacaacaacaacaacaacaacaacaaaaacacaaagatcggtttctgaacaaaatttgtagtgataacagttaaaaaaaaaaagattctccataaataggtcgggcgcggtgcctcacgcctgtaatcccagcactttgggaggccgaggcgggcggatcacaaggtcaggagatggagactattctggctaacacggtgaaaccccgtctctactaaaaatacaaaaaattagctgggcgtggtggcacacgcctgtagtcccagctactcaagaggctgaggcaggagaatcgcttgaacc

SEQ ID NO: 9466 - DNA, 1294 bp, Homo sapiens
aagcgatttatcatttttattttaaatatattcatggttgaagtgtttcaacgttattggacaattaggaagaatgtccttaactcttacaagttattttataactgatttttaaaatgctgtttttcagtattaactatgttgaccttagaaaacttttacaaaaaatagactttatgttttagaacagttttaggttcacagcaaaaatggagcagaaaatgcagagatttcccatataccctctacctccacacattcacagcctcccctaccgtcaatgtcttataatagagtggtacatttgttacaactgatgaacctacattgacacattattatcacccaaagtccatagtttacgtgagggttcactcttggtgttgtacataatatgggttttgacaaatgtgtaatgacatttgtcaaccgttatagtattatacagaataatttcactgccttaaaaaatcctctgtgttttacttattcatccctccctctcctttaacccttagcaactgatcttttcactgtgtacatagttttgcttttaccagaatgtaatgtagttgaaatcatacagtatatagcttttcatgcagtatatagcttttcagattggcttctttcatgtattaatatgcatttaggtttctctgtatcttgtcatgtatatgtagctcattttttttttagtgtagaataaaattttattgtctggttctaccacatttcatttgtccatgcacctattgaagaacatctcagttgcttccatgttttggcgattatgaataaagcgactataaacatccatgaacaggtttttgtgtgaagataagtttttttcaggtgtataaataccaaggagcacaattactggatcatatggtaagattatgtttagctttgtaaaaaaaactgccacactgttttccaaagtagttgtactattttgtattcccaccaacaatgaatgagagtttctgttgttccacctcctgaccagcattgagcattgtaggaattttggacttttgccattctggtaggtctgaagtgttctctcattgttgttttagtttgcaactacctaaagatatgtgatgttgaacatcttttcatgtttgtttgccatctgtgtatctcctttggtgagatgtctcttcagatcttttgactatttttaattggggtttttgtcttattattgagttttaagagttctttgcatattttggataacagttctttatcaaatatgtatttgcaaatatgttctaccattcta

SEQ ID NO: 9467 - DNA, 1134 bp, Homo sapiens
agtatttcacagtgatatataatggcatttaaaaaaaccttttaaacctaaattcactgatttttaagaattgagggagcattgcaatgcataattaataccgtagggcttggtatacttaattgaaatactattcctattggccttgtttttctcaattgaaatgaaagttgattctcagtttgtggtcaattttctacacttctgataattttgtggtggacctgagttccagaataataagtgagaatagcttagaaagagagagaaaggcttttattgaactggaaattctactgatggttttgccatagaaatagaattaatttacatgatctttaaaattaatattcatacacccaggaaggatatctagggttatttctgtattaatcattggactaggtaggaatgtctaagaaaagagtatgattatttcatgtgttttctttagtgatcttttacatttttttctgtattattattattatttttttactttgttgctacattgtagcttagctttaaagactcttctgaaaggttattatgttagtgtatggccccttcactttctaaaagaagtgtttagcttttattagatatttgtgcatctttgcattgtgtagctgcgaaagggatatgagcttgaattcttcgcagaggagtatttgaagaaagcctcagataatgttattctaagaagaatccacatgctataattatatttcttattaatttggggggaattttcatgtaattagaatattggctttatttaaaaaatctatattcaggcatcaaactttagtttactaagtaataacccttaccagaatgattgcttgtgcaataaggagaaattatatatttctctaggggaaaaaaaggttcaatagaagtatagtttaataatattttattatttaacttttgacaaagtcgactgaatttgccattgtttttattacacattttgtacagttttgccgtattggttgaattttccttagaaacaaaacaatcaatatatgctttactagattaaatctgaaaagtgaccttaatatatgaagtcatgctctggtataaagatcatatagaagataggtaaagagtaaatgcttctttatt

SEQ ID NO: 9468 - DNA, 1269 bp, Homo sapiens
acacagatacacaaaaggcttttaaatccttaagagaagaagttaaaacatttcagggcaagccaattatggcaaggataaaagccatcaatacattttttgctaagaattgttactaattaatggattctagtatctatagtcagcccattcagactcaagcacagtatgcctccccagtctttatgcagcctgtatataatcttcaccagcagttctcggtctatagtattattcctcagtcttggtctccaaatcctacaccttactttgaaacaccactggcccgctttcccaatggtagttttgtgaatggcattaattcaccaggatcttataaaagacatgctactgctatgaatatgggtcgaccattccaaaaaaaaacctgaagcctcattttaggtcatccagtggttcagaacactcaacagaggactctgtatcattgggggatggacaattgaacagatctagttcaaaaaatttttcaactgaaagcataatcctacagtaactggggattaggagcaaacttaacttcaaaaggagacttccactttgcagatggaacaaaatggggactatggtaggggcaggagaactcttttcagaggtcgaagatgacgacaagatgtcaatctcaagacctcatccttcaacagctgaatcaaagcctccaacaccaaagtttgacttactagcctcaaattttccacctttacctggaagttcatcaagaatcccagataaactcattttggagaataggatgtctgatgttgttaaaggtgtctacaaagaaaaggataatgaagtgttgagagttagttgcccagtgcctgcagatgagcagacagaatgcacttctgcccagcaactcagtatgagtaccagttctccatgtgcagctgagcctactgcattaagcacaactcagccaaaaaaaaaaaaaaaaaaaggatctaatagaggattcctctgttcagaaggatggtctcaaccagacaactataccagtttctcctccaagtactacaaagccatggagggcaagtactgcctcaccatgtaatcgtaacataaatgtagctacaccgtgactctacaggaaccctgaaagttaagttatgctgaagtgtgccagaagccccctaaagagccatcttcagttcttgtgtagccactatgggaacttcgctccaatgtagtgtctcccacgacaaacaaagacaatgaagctccttagaagtcccttgagaaaccaaa

SEQ ID NO: 9469 - DNA, 1134 bp, Homo sapiens
tgacgtaatggcaaagagcaatatgtgccacccagatcaccaaagtaaaaaacaacaaaactattcaaaaacttctctctcttcccgttaaacttgagctgtagctatattgaactgttttggaggggagagggtaaccaggaaggaaacaggagaaagtacatccttaaatcattatggattttggagttgtgagtgataggatcccaaaattcatctctgatgtgatttataaatgctggaggatttctatctatctatctatctatctatctatctatctatctatctatctatccatccatccacacacacatataaagtgtattttttctatttttgtttttggttttaatttgcagagatttgctgccaggaatcaattttgagggttcagtttcagcttggaggaaaaaaaaaaacaacattatacatccttcagtataggagatgagggagtgagaggaaatattttttgaagaagcatttctgtaaaattagaaattactttttaaaatctatttaaagtttggcgtggagaatgccatctctgattatatggccttgtattgcaaagcggattagtggctggggtgcctgttgtgggtgtgagtgtgtacaagagcgattgaagcaaaatctgttgtcatgttagtaaatgatttgaaaactgaatgtaaaacttgagtagattttttttttttagtttgaaattgagtctgtctttttgaccttactaatatttccttcaacaagttgtaaaactgtgattgtacttggacatgtgactactaatcagtttgatactcaaggaaagaatggggtttcttaaaaacattgaaaatttcggccgggtgcggtggctctcgcctgtaatcccagcactttgggaggccgaggtgggcggatcacgaggtcaggagatcgagaccatcctggctaacacgatgaaaccccgtctctactaaaaatacaaaaaattagctgggagtggtggcgggcgcctgtaggcccagctacccgggaggctgaggcaggagaatggcgtgacaccggggggcggagcttgcagtgagccgagatggcgccaccgcactccagcctgggcgacaaagcgaaactctgtctcaaaaa

SEQ ID NO: 9470 - DNA, 1243 bp, Homo sapiens
atctgtcctccatcagctaggtagtcacatcagcccaagctcataacaccttactgaaaggtaagattcagagtttccatatctgaaatacttcaggtttctggaaagaaagggaacacatccatccgagaaggtagtatgtgtgttatgtgaactctttggtataagtttggctattttcagtcacaatggtagcaaccaaaacaaaaattttgtgcagtcctgtcatttaatcatcttatcagtgccccaaggtgacttttttcaagagctctgttgataccatgtgtgtgtgttattttctggtgtttttacagatttgggccaggcttagtcatctattggtatggatttatccaggagctggactgcaaccgggaaaggggcatcctgctcaaagcctgtttccccacgaacattgtcaccttatgccacagcatagcttgaccctgaagatcctggaagagaagctgggaggaaaaggtgaatccggaagcaattttactttcctgcactgtaagatcctggcaacatctgccctgaacttcagctgaactcttgctgcccgtagtcacaccactacctctttagacaaacatatcaagagtttctgttttccttcatcccttgctgatgtgaacagccaagaactacagacacaacccactcattatcagcatttctgtctctgtcaaacaattagtttatagatagtcataatctttctttcttccggatggtttatccttgtatgctgaacaaaagaaaaaatgtgaagactgaaaggtgtgatttttcaattctcctcccagttaccgaatcaccctcttatttttttttccctaagcctccgttcactgtctctccctctccctttctcttcatgtgcactcacagagacccagcattgcattaccatcgtggaataatctagcgcaaacctaggaaagctgaagccacaaagtccaaagccacctttgtactcacctgcagagctccagaagaccttgatggcagcctgcctatgctgtgtgtttgctatattcaatctttacggcttcctgacttctgtgacagtaagccaagtgcaaaaatacacttgatgagaatttcctcttttaataatgttatttgaacaccacatattttagatttatcttatttgaaagtattagttccattgtgcctggaaaccacactcctttagattgggggccgagaggcgacaacccaacattgagga

SEQ ID NO: 9471 - DNA, 1219 bp, Homo sapiens
aaagtgtggattcacttactcattgaatcaatacatttaaactttaaatcaaactgttttctttggggagtgtgtacaaaaataactgcttccaggccgggcgcggtggctcatgcctgtaatcccagcactttgggaggccgaggtgggcgggtcacgaggtcaggagatcaagaccatcctggctaacatggtgaaaccctgtctctactaaaaatacaaaaaatttagctgggcgtggtggcgggcgcctgtagtcccagctacttgggaggctgaggcaggagaatggcatgaacccgggaggcggagcttgcagttagccgagattgtgccactgcactccagcctgggcgacagagtgagactctgtctcaaaaaacaaacaaacaaacaaacaaacaaaactgcttccaaatgaagatacaatgcccccacttcaagtgacctacagcctaatggggactaccaacaagtaagctggcatgttgctacactgtacttacactacagaaacaactgtcatgtaatggtcaacaaacatctggcaactgccaaataagtgctggtaaaccaacaattaagctattccattatgtgaaatgtggcacatagttctgtaaacatgagttagcccgtagtaatagaagtgcagtatcactgctagagttgtaatagtagctatatttatgtgattggaccaatgttaacattcattttcaaagagaagatctcagggaagagttttgatggcttgggagaagtaaaggaaccttgggcagagaccatatctgggcctaaggcagttgtagtccgagctgaccctgtgtgactagaagtccacacgagtatgcaagggaattgaagctgaaagaagaagtcctgaaggcaaatattactaccctcccaagccgaacctacaccaaacctaaacctcttgtattttcaaacgcgaatactgtcatgagcatataaatgacagagttaggtcacttgcatgataaggtggcagctgggcagtggcagtgcaagcagaaatcccactgggctgaaaatttacaggaaaaccatgagctttagtttggttcttcctccaaattgtctaactggtcacttaacctctctagttctgtcctgacttgttaactctcaaagaacatgactctttgtgtttagcatgttttctgatggttaatgagtcagcaaatgaaggaaatgt

SEQ ID NO: 9472 - DNA, 1905 bp, Homo sapiens
agtgtgccttttttttaatggcttgaagtttcagaggtgataaaaattaaaatcacactactatttgaagctcattttctatgcaggtttttaaacgtcatttatgtatcattctttttatatatcacacttaagcttgtgttagcttttttcttttgccccagatcaaactgaacaatgtatataacactatctgtctgtaaaatactttttttaagaaagcatttatatttatatgacagcttgaactgacaacattgtgtatatagatcatcttgaagtattatttcacattgaaaagaagaaaatatattgataactatagatgttatgaagaagagggtatttctagttttgtactaaaaatcaattggatgaactaaatccaaaacatgacactgtaggcagcagttttaagtcttatttttactgtttatatatttgaatgctgctacaacagatgatcttcatccctgaagttttcagctaaacttggtttcctagaatagactgttaactttcaaaatttttattggtgaaatggaaatactgtttttccttgtgaatgaattttcatatttgtaagtgctaagtttataattcaggtttgatcaaggtgtgaataactgaagaaaataacttgctggctatataggaaaatgctgtggaaatgaactgtgtatatacttctgggaggaacaaatttaatcatttcttctgttaagcactaatcagtatagtgcaactcctggttctgtactgtattttatatgcaacatatatgctttaatattttaatgtttgtgcattaatattttcaatttgtttaaccactttgctgctaagattttgccgtcccattcccattttttcctttacaattttaaacaagtttcttcattaaaaactatggtgatgaaatggtttttattttaccttggatctttatagttaacatacccagtttcttaatcagtctacaagactaactgatgatataatgttctctgaatccctatatggaaattttcttttgagtaaatgagaattcctttgtgaaagcaaatgggtagtttaaatcactgattcttaaacatgtgtataggcaccttcaggaacattttctcattctctgtacagattcggcactgccaattggcttttcctctaaaacttttctttgtttttatctgatataagcagatggctcaagacaactgcttgagtaatagtattgaaaatggaatcatctagacggcatgacaagcaagactggtctgatgaacttgttcagaattgataattcttaaatatttctcttggcttcaaaagggacatcatttgatttctgaagaagtatgtcgtgtggagcttcagcaccacctactggatgatttccaggccagagacatgagatggcaatagggatctgacagggttcatcactactaccattaaagggctatttatgtggtgaccacctctaccagggaaaccaggaataagaactgtctcaaaggaattgtaaaatggttatttacctaatgtgtcttgttggcttgctgaaagattttaagcacttttttcttacatatcctgttttaaaatatttgttgatatttgggactggcaatcaaacttaatggatgtactgaggcatttatagaaccagttgctttaactctcaaaagccattaccaaaatggtatttttttcctccttccgccagtcagggagaatttttaaaaataataatcaaaacatgaaaaaacataatcacacctgtattttatcatgacagcttcagagagtgtgtgtgtacgtttttctctcttttatttgagacggagtttcactcttgttgcccaggctggagtgcaatggtgcgatctcagctcactgcaa

SEQ ID NO: 9473 - DNA, 1565 bp, Homo sapiens
ccctttcttttcccatcatttacccaacctattgtctttgcccctcatccaactctctacctctctctgcttcctaaaaatgtccactatctttcatctacaacacagtggatattttgctatactgtccatttcttctcagaaagattattcctctcttgttttcactctggattctccattttggacccaaactgagaagcccagagctgctgctaggagactggagccagggtacccaagggagcccatctccgggcgcccacccttggtacaggccacctcgcttcgcagcccagggaggaaaggagagggggtatgtaaacagctgtgggagtcgggagtctcaggagttgcagcaagcccaaacccaggccccccagcccagcccagaccatgggctcactggttcttccacccaaccagcccgcacctgtggaattagatggagcacagttccatcatcacccaggcacaggggaagatgccctggtgctcaccaagcaaggcctggtctccaagccctccttaagaagcctcgtggatataacatcttcaaggcccttgtctgctattttcgcatccagcatggccagtcaagctcttccactgagctcatccatataaggaggaagccaacaccactgctaagtcggatctgctccagtgtctccagtaccagttttatcggatcccagggacgtgtctgccccaaggtgacagaggaagatcaaaggaggatctgtgtggtcactgacctggatgaagcccttgtgcatctttaagcccagcaacaatgctagcttcacagtgcctacagagattgaggagaccactcaagcaggtttctgtcctcaaaagagctcacgtggaaagagacgaatgagagaactctttgaatgtgttcccttcactgccaacctggccaagtatgccaaccctgtgacggatctgctggccggtgtggggtgttccgggctcacctattccatgagtcctgtggttccaccagggctgctaagtcaggaacctcagccgcctggggaggaacctgaggaaaaccctcatcctggacaacttgtctgcttcttacatcttccacccagagaatgcagtgcctgtgcagtcctggtttgatgacatggcagatactgagttgctgaacctgttcccagtctttgagaagcagagcagaggacatctataccagccttgggtaggggcaggcctcttagccttccctgcttccaagcagtggtcatcccagtaagggtctttcctatgctgtgcctttaggatcacctgacggacagagtgaaagctggagggcctcaccacatgggcctggaaatagtgagaagtgattgtaaggagctttaggacagcttagatgccaagtaggcaaatgccagaccaacaatacccagaactacctgctcccgagttgttgggttcccgagatgtgtgtgtgagtgtgtgttctgccatgaactgtggccccagcatatagcgtttcagtgggggagaagctgaaagactcttggtctttcaagtcgtctcctctc

SEQ ID NO: 9474 - DNA, 1278 bp, Homo sapiens
ggaggaggaggttggggaggtggtgggggagggggaggagggtgggggggaggaggaggaggtggtagaggaggtttccaaggcaggggagattatggtggaagagggggttatggtggaagagggggctatggtggaagaggctatggagatccatatggaggaggtggtggtggtggtggtggtggtggtggaggaggtggatatagaagatactaaaaactataaaaattagatagcagtgcttgcttctttatagatacattagaaatagtgttccaaataacatacttgaatatcatctttgaagtaaacaccatgttagactccctggtgataccactcttgaattggttaatatgtaagaacattgttttttattaccagttgatctctcaaatgaagtgatgactttttccatattctgtgtacccttgagcatgttgtgtctttttaaaaaacaaaaaaaagaacaaaaattattttttaaaatgtaaatatttattaccatcagacttggaaaatggaaagtattttattgtcatgattgaatttagattgttacctgtattttgttcaggtttgagacatataaaagaccccacctgtaatagaaaggaatatagacccttgcctcacctgtattgctgtggatgtgttttgtgggtttttcattcgattttacaaaatagggaaaggcacttccagttgtatttagtaggcagttgttgtgaatcatttttttctcttataggaggagattcctctctagccatgtttctgttaaagtttcattaattgaagcccaagtttactttttactgtacatacttattttctaattggatttgaaatcagcatgattttgtttgacaaagcaaagtttaagattgaggtcagaaatactttaatggagcaaagacacataccaactttacatgacggtgtgagaaatagtcctataaactggtctcttcatcatttatgctctcactttagatatccaaatattaaaaggcaggctgacctgtatcacacagaattaaggcagtaattttctgcttcagtagatcaagggtagggctaaggcatcctgtggtaattctgattcacagctagatttgggaaacacaaagttagggaatggctatatgtgatttgctagttggagcagtcaaagtcttagctatcaagagttgtgaatttgaatcatggcactaggtcaggggtgctatggattgaaatgaccttagttctcaaggagtgatttgtcctcat

SEQ ID NO: 9475 - DNA, 1572 bp, Homo sapiens
aataggaaaacctaccatctcagtgagcaccagctgcctcccaaaggaggggcagccgtgcttatatttttatggttacaatggcacaaaattattatcaacctaactaaaacattccttttctcttttttcctgaattatcatggagttttctaattctctcttttggaatgtagattttttttaaatgctttacgatgtaaaatatttattttttacttattctggaagatctggctgaaggattattcatggaacaggaagaagcgtaaagactatccatgtcatctttgttgagagtcttcgtgactgtaagattgtaaatacagattatttattaactctgttctgcctggaaatttaggcttcatacggaaagtgtttgagagcaagtagttgacatttatcagcaaatctcttgcaagaacagcacaaggaaaatcagtctaataagctgctctgccccttgtgctcagagtggatgttatgggattctttttttctctgttttatcttttcaagtggaattagttggttatccatttgcaaatgttttaaattgcaaagaaagccatgaggtcttcaatactgttttaccccatcccttgtgcatatttccagggagaaggaaagcatatacacttttttctttcatttttccaaaagagaaaaaaatgacaaaaggtgaaacttacatacaaatattacctcatttgttgtgtgactgagtaaagaatttttggatcaagcggaaagagtttaagtgtctaacaaacttaaagctactgtagtacctaaaaagtcagtgttgtacatagcataaaaactctgcagagaagtattcccaataaggaaatagcattgaaatgttaaatacaatttctgaaagttatgttttttttctatcatctggtataccattgctttatttttataaattattttctcattgccattggaatagatatctcagattgtgtagatatgctatttaaataatttatcaggaaatactgcctgtagagttagtatttctatttttatataatgtttgcacactgaattgaagaattgttggttttttcttttttttgttttgtttttttttttttttttttttgcttttgacctcccatttttactatttgccaatacctttttctaggaatgtgcttttttttgtacacatttttatccattttacattctaaagcagtgtaagttgtatattactgtttcttatgtacaaggaacaacaataaatcatatggaaatttatatttatacttactgtatccatgcttatttgttctctactggctttatgtcatgaagtatatgcgtaaataccattcataaatcaatatagcatatacaaaaataaattacagtaagtcatagcaacattcacagtttgtatgtgattgagaaagactgagttgctcaggcctaggcttagaatttgctgcgtttgtggaataaaagaacaaaatgatacattagcctgccatatcaaaaacatataaaagagaaattatccctaagtcaagggcccccataagaataaaattt

SEQ ID NO: 9476 - DNA, 1244 bp, Homo sapiens
gcaattttcccttggaaaaaaacgtaaaaaatgtgtgcaactgtctgtgggtgttgcagaagctgctataatgtgaaagagtgttttatgcttataccattttccggtacaagtgtccaatggtgctatattctttcctgatttttggctaccctaaatccattatgcagatagggctggtgttctgccagtttgcacatcttcccactaaggtatgctctgttgtatctttcaggcttattcaaacctccttagagctaacatggatgggctgaagaagagagacaaaaagaacaaaactaagaagaccaaagcagcagcagcagcagcagcagcagcacctgccgcagcagcaacagcaccaacaacagcagcaacaacagcagcaacagcagcacagtaaagggcatacatttcctgctttcaccaattaaccactgaattgctattttttccttttggccagatagctaggtttctggttcccccacagtaggtgttttcacataagattagggtccttttggaaagaatagttgcagtgtttataggatagttgtggtaagaatctagtttattttgcatttggctaattggtctgtgctgcatggttatatactcctggattatagattaaaagtctctgtagacatctctgtgaagagcaagctatcattaaacatgtctgtttatcagcactgtctctttattcctttcccaacccattttaatagttctggcaataactactaaatctagaatgatgtgattaatgaataggctttagctctataatatcttctaggttattagaattgaaacctgacagttttataaaaagtcatgttatctcatgagctgcttcccacctggctgtataattttatcatcatggttccccagtttcgatgagttctcacagtcaaatgagagtttgtttaaccaccttaggagaaacatactacaaagtcatcaagaataaaggttccaaagtaattatgatttttggtttctttatgccctttggtttggatattttcatgtgcttagtcattacagccaagggaagaaaaggctatttaccttatgttccagctccctaaaacctttagtgttaatagatttacaattaaaaagcagcaggtatatgaaagcatttattatatcccaaaagataaatttataatatattacacatgaaaaactaacaaagctcaactttgtaggacagcttcttagaaaaa

SEQ ID NO: 9477 - DNA, 1123 bp, Homo sapiens
ggtggtgacaggcagcctgctgccgtatgcttcagtggcacacaccaaaaaaccgggattatttacagcagccactattcaccccttttggcagactctccacctgagttcagtgagagagaaaatgatttagatcttggtgctggggcaaggccatcagcttcagagaccttgccaggcccaggctgggtgccctgtggcctgagaactgagcccagactttgacaaacccacctcaacatcaagcctggggcaggtggaaggtggtctgactgcactgtctccatcttatgcaaagccaggaactcactcactgtcttaagtgagccagggcaaaatttacacccctcacgtttccctctcccttcttccccaccaacaaaacccaggaggtagctggcagagtagctgtcaggaaggagaaaggttctttctggctggttgtttttaattggcttagtgatctaaactggccccttcctcctctgcctggtgagttggcctaaacattcctcaagtctagcctcaggagacctgcccctcccccccgacctccaccccctcagactccatcccccacccccaggagcctggctgtctctagcgaggggtggagaatcagatttagagggagggagagtctgacctggatcctgacctgtaaccagctgaagacggtggaggctttgtggcttgctgagggtgggggttgggagagggactggaaaccttcctcctcgggaaagaaatgcctgggaggaagggaagcctgatattcagggtcaaaacagcccttctaattcacaaccccaaagcaggggtttctagaagttggtcaacagatctggtgagggaagtccccaggccagacgctggactcctgcaatgagggtggaggactcagcctggcctctgcctggcctgtttcaaagtctgggccactggcagccttctcttgctcaatccgaggtggaaaaagatcacctcccagtgacctccctcagcccccaggggagtaggtctgtgtccaaagctatgtggcaggcttgtttgaaggacccagaggggcccagctgacctgtctcactgctcctggcagcccagccccatcggcaggtggccc

SEQ ID NO: 9478 - DNA, 1519 bp, Homo sapiens
ccaggggctttccacttgaggatagcagcttcactaggctggccggccagctccacatctgactgggttcttacttctcagccagtacctgccccatgggctcaaggattcctggccagctcctgccacctccagcagacctcagggagggttgagtttctctaaggacccctcaaacatgtcgcaaaatgaaccaaacttctggctaggcctcaaaactgacttggtcccacttggaggccccaggattggtcctgaggtacagagccactgccaccactggcggcctgggaccagctgggtgtcagccacggatgagccgaatagccagtcagcatgttgctgctggcagcctgtgcctttgtcagctcttctttcaaaagaccccaccgacagaccgcattccacccccaacatcggcactgagggacatcgggggcaagtttgcagtggggccggaaaatatggtggccaccctaccatgagagtcagccgtaggggaccccagaccccttggtttccttggaaacaacatacctcttcccccttatccccagtcctttttcatacctagtgggatacagaagaagccaggacagtggctttgccagctaagtgacttttagagtaacagataacgattagagtggggaaccgtcaaagctgggtacacatttcctatcttcctccagcttccagctaggccagaagggcatgctctggaacccagcaggatcacagctgcctgtgcacgtcttcccttctctccctgctgcggcacttatggagaggatctaaagcagccggtgtggcagctccgatagcaggcacagggaatctgttaaccagacgctagaaactaaattataacttttgcatatgtgagaaaagacaacattggtgctaacagtgaagtaaggcccaaaggaaagacggcttccctggacaaagaagacctcagggctacccaaggaaataggaggagtctagagtagactcacaaatctgaacaagcccaagtcttccagttctgaggagaggaggtcttcagtactattgaaggagacattgatcttctggatgtacagttgtgcaggttgttcactgcacaagggcacctgcagctaatggaggctggaattcagcttgtgttctgctcactaagctgtgtgcgtgccctggtgtggggctacttctcccaagaagaaggggtgcctttcctaatttgcaaaggtgccatatgggctcacagcaccctggaggagaagggcctcaaactgtgcatgtaagcctttgttttgttctgctcagatattctggatattacctcttcttggtcagaattctattctcagggtgtgtaccatgatttgtctgctaagaagacgggttcctgctttgcagagaaggagccggggaccagcttgaagactggctctgggacacactgaccattgtgaaattcagccttccctgtgggtctccataccattttatgatgtgtatgggacatacgttg

SEQ ID NO: 9479 - DNA, 1170 bp, Homo sapiens
gcatagaattacttgttgcctttttgtctactttgccaaatttataacacttttgttcccttcttttctttctgccttaagccctattcatttttctttttttttttttttttaaagaaagaggcagggtcttgctatgttgcccaggctggtatcaaactcctggctcaagaaatcctcccacttcggcctcacaaagtggtgggattacaggtgtgagccaccgcacatagccatgccctattcttatagtactgtctacgatatccttgccaagttgtcttctatcaggcaatactgtagccataaacttgaaaaacagctaacaaagaagcttaggcatataataataataataattatgtgtcagtccactatattcaacccaagaccatgaataatcacctttcggaagacatttacaataatctagtgctataatagtcaatgttggtatgagatttacatttgtttccttcttcacagtgaagccatgtccctggagggagatgaatgggaactgagtaaagaaaatgtacaacctttaaggcaagggcggatcatgtccacgcttcagggagcactggcacaagaatctgcctgtaacaatactcttcagcagcagaaacggtgtgtagaatggctgagtctcaacctgtcgtcattcatcctaaatgttgtagataacgtgggtgtggatccatgagagatggcataatgagtacttttcaaaaattggtagtatgagaatctgttctctacctgctttcgtatcacatgacagctatctgaagatgtcctcaggtataattaagaacaagggctataggatttcatttcactgtggtgcagcgaaactctttttatcaatagaaatacattttatacagggggcagtgataagcatagtaaagcaagtattatattgcaatgcttcccaaaagtattatgttaggaacttatttttgagagtatgacaaaaaaagaagtggtctccaaagacatgtaaacctcagaacaattgaatttataccagaaagttctcaataattttaacaaactctggataaataaaagctgaaaaatactcttatgttattcaaatggacctgtggatctcctttaactaatacatgttttgataaatatgctttttaaaaaaaaaggtaa

SEQ ID NO: 9480 - DNA, 1113 bp, Homo sapiens
accagccccacaacagagaaaacccctaataaatgggttaattttgtattctctagttccagtatatctctgctgatttccattgagagaaaatttaaaactgaagaataaaacttaggttagtttctgataaaactagataatgttataatgatgactgaaggaagatgcagaatgtcttttttggaaatttgtgaataaaagatgtggggtgactggaggagggaaaagaaggcagaatataagtaacaaagaatggataaaacgattctatttttgatttattaatttttttaaagattatttttaaaatttctttttttttttctgttgtagtggaaatactgtccttgagttgaggaagaataggtatactttatctggcatctaagttaataatgaaacattttacatgaggttttaatatttttgctcctagctccaagccagaacagaggactccaaaatccatttcctcaacagatgcaaaataatagtagaattactgtttttgatgaaaatgctgatgaggcttctacagcagagttgtctaagcctacagtccagccatggatagcaccccccatgcccagggccaaagagaatgagctgcaagcaggcccttggaacacaggcaggtccttggaacacagggtaaggactcttagatccagtgctttgctgacacaacaaagacttcacatttagggtagagaagtatttttaccatctcttttaattcctcttgaatatttagccatggtctatatatgctgtctgagaacataaaactatggtaattttagttttcttcttcatctccagcctcgtggcaatacagcttcactgatagctgtacccgctgtgcttcccagtttcactccatatgtggaagagactgcacgacagccagttatgtgagtgtggtttttggatattttgaagtgggaattattaagggtgggcagaggcacctattctacttcccaaaggcagtttcttctttatgaagatgaaagtaaccaggccaggcgcagtagctcacacctgtaatcccagcacaggctgaggcaggaggatcccttgagcctaggtgttcaagaccagcctggg

SEQ ID NO: 9481 - DNA, 1110 bp, Homo sapiens
ccgaggcgggtggatcacgagggtcaggagatcgagaccatcctggctaacatggggaaaccccaactctactaaaaatacaaaaaaattagccgggcatggtggcgggtgtctgtagtcccagctactctggaggctgaggcaggagaatggcgtgaacccgggaggcggagcttgcagcagtgagccgagatggcgccactgcactccagcctgggcaacagagcgagactccgtctcaaagaagttgccataaattgtgaaatttctagagtagattagtacgaagtgaacacagtttcataaacacctgagacaggtgagtgtagttaaattaacagtgctgactgtgtaatcttgattttttttttcttctactctgttataatatccattttaagcattagggtttttttggtgatatattttcacctttccctcccactggcagaaaaccctactcagtcaccatggtgttcacagtatcgcagacagctactgaagtccctaccagagttaagtgcctctgcagagttgtgtatagaagacagaccaatgcctaagttggaaattgagaaggaaattgaattaggtaagtaccattgaactcatgtcctctggttcatgacagtatacaaataagtgattatttgtacttaagcttgatgcttgagcactgtaaatattcctagattgtattttttaaaaaagcaatatagaggatgacacatcagtaacttcatgtcctaataataggaattatgtcttctcctcttgcaatctttaacaaattatttttaaaagtattctagatactactaactggcaaatacaccagtgcctctatcccttaaaccaggaggtaaaagctacagggctgtatatgttcacagtgatttttaaatggaatcaaactttctcaacaggtaatgaggattactgcattaaacgagaatacctaatatgtgaagattacaagttattctgggtggcgccaagaaactctgcagaattaacagtaataaaggtgggactgattctttataatttcagttactttgtaaataatacggattggagcaataactgtcctcatgttaccatcaaatc

SEQ ID NO: 9482 - DNA, 1104 bp, Homo sapiens
ataatcattggtcaggctggtcttgaacccctgatgtcaggtaatccacacgcctcagcctcccagagtgctgggattacaggcatgagccactgcactaggcctaccttcctcttaaatgggattcaatcactcctgtcttagctccaccctcagcctcacttccatgggtaattggtgctgccagttatatagtataggaaaatagccttgtagtgtaaatgtagctcagctttctcctctgccaaaatcagtttttattctaattggattgttacctcctgttctctttccagcttatcctctttccagaatttgttgttattgtgtcttttatagtagatttatgcctttaaaaatatctctttattatttctctatcagaagggctggaaggaatgtgtttcaacctgccagccataaccatagacttaactgaacttatttttaaaatacaatgtcttacaggtatcttctcaacctgtcccatgggacttttatatcaacctcaagttaaaggaacgtttaaatgaagattttgatcatttttgcagctgttatcaatatcaagatggctgtattgtttggcaccaatatataaactgcttcacccttcaggtctgtaatactaaaaacataatttaaagtcctgaagtagagagatttgtgctccatttagcaaaggaatttagtacaaaattcctgtcaatcttctagaaatagaccaattcaagtataagttagaagcattgataattttctcgttattttgaccaaagatctctttggtatttttttaactttttttggtccgttgtcaagcataaataaaagtagaattgtacaatgaactcccatgaactagtcatctatgataatcttagctcatggtcactcttgttttagctatactacccccactggatagtttttaaaacccagacacaatatgtcattttactcttcggtttgttcttaagaaggtttgctatggattttgatgataatatgaattctcaaaaatggttggaatgagggtattttaaatccatttattaagtacctattttgggccaggctcatgcttgatgcccttcatcatta

SEQ ID NO: 9483 - DNA, 1191 bp, Homo sapiens
tcttttataagtcattttctgtgatcttctctgtaaaatagggataacagtctctgctatgtgtttatcagaattgttatgaggagtaaatgaagtaatgtatataaaaagaacattagcacaaatgtaaagtcttttgtatggtggcattatatgcagaaattccttctaactcagctttagacataagacatttgctgattgaatatgtagcacaaacctgaactaatcatgtggaccccatttagatcacagctggagttcatgcaaactcagtaggtctacaaatttgaatgtgatagtccaaatatttcatcttttgttcttaaggataattcctagaattggctctattgatcacttctttggagagcttctccctttactgtaagggtgaggaacagtctactaaaatgtatgtcataaaataaacttagttaagcactgtaatacctttcaacttcctaccgaaataagctgccatggtagaggcagagaattattttagctgatggtgctttttgtgatttcaggtagacctgtttggtatagcagatttagcacatttactattgttcaaggaacacctacaggtcttctgggatgggtccttctggaaacttagccaaaatatttctgagtaagtattgatgaatgtcagggtctctgcctgtcccaataattttctgtttctcttgggtgctatctctgctttggcagccttagttttttaatccaaatgccatggttccagtagtttcagccagttttcattagagtatcagcagagcagctagtgcaggaaaaaggaactgcttactaaaaataagattcaaaactattcagacttcaggacatcattctgaatctagctgtatcttccagactacagctatagtatggaagcttccctgtttagatatgtgaaaagaagcatttcatgagaataattttctaactaattggtgttagccttaaattcctttttctttatttatttattttttgagacggagtctcgctctgttgcccaggctggagtgcagtggcatgatctcggctcactgcaacctctgcctcccaggttcaagtgattctcctgcttcagcctcctgagtagctgggattacaggcgtgcgccaccatgcctggctcatttttgtatttttagtagagatgcggtttcactac

SEQ ID NO: 9484 - DNA, 1591 bp, Homo sapiens
caagcttttgtaagtagagtggcaagtgtttttatctttttttttttcctgctcctcaaaatgttgtcttgttccggcaatcacttttgccttccctctttcctgagcctgtagtgacaaagcccggcgatttgggatgaaatctgttgtaacaccagagctttgattacacatcctctggttttgagttattctacagaatcagaaaggctggaaggtgggcttcacactcaggattgtgctttgagaaccagctaatagaccagccgagggaaggttgaattggctgtctttacttttcccgataagccctacttaaatgcagcctgtaattgtataaaggagatgagaaacatcaagagaaatgacatacatgtagctctggggtagcaagaactagacttcctcaatttggattccatttccttctgccatttgcttttaggcaattgagtgtgggtagtgatgagatatcaaatcccttagtgtttccattttgggaaatgaggcactatttttttttttaaaagacaacttacccacctgagtcctgaaacagtttgtctctccagttttctggcctatactctagttagctctgatccaagtttacaggacaacagccttgctttaagccatgtcctgttgtgggcacgataatagcaactgagctgtcacagcctaccagcaggctggtaacacctccagggtctcttggctagagcagatttcttagcagctgactaggacttcagtcattgggaagcctatgaggcctttacatttttggtgtgagatggggaagaaacataaaatgccactttacaacttcaataatagcctgtaatttatatttactgtgtgaatttttagtcctatattttaataatttgtaaattgatctcttattccaagaatcctttgaacttgtagaacatctgggagtccacttccctgtcctcttcctgatccctgctttctggactgtttaaatcctctttgggatggatcagagagtctagagaggccactcataggtccagctgctggcctcctgactctccaaagccttcactggaattgggacatttgctccagccctagctgtgaacatgaccagagacattatttataattcagccatttaagatatacctgtactcaaaaagtcctgtatatttttaaaaagttttatttttcaggtgaacaaaaatacatcctaagaactctgcctaagcctgtgtaagttgatcatttctcttactgtgcttcgtggggacggagtagaggttggaagagtaagtggtctgaggtgtgatggatggatggtgatgaataggttgaggaggaaaaagcaattgccctgctgttctcagtgcctgatggcttgaatgaattgattagcgaagggcggcagaatccatcttagtcgggaagcaatcccggggtggaagaacagtgatctctagctcagccaccttttgccaaccttaaacaggctgagaaaaagttgtgctttaccagagcagatgcctagctgacaaagctaagggaccagtaagcatgaatattaagatttactgcaaacatt

SEQ ID NO: 9485 - DNA, 1174 bp, Homo sapiens
gttgatactccagtggtcttccttagtggaataggagcataatgttctgatgtgggaattgtgtttcctgttagtcaagagttttgtgtatgtgttgttttcttttggaatgtctttccatgcaggccttaaaggtaaagctggagatgaaagaggaaagagtccgattcctagaacagcaaaccttatgtaacaatcaagtaaatgatttaacaacagcccttaaggaaatggagcagctattagaaatgtaagaagaagcaagtggccagatggctccctcttgggcataaaatctcagaggaagctacttaggacatcatcttggccatgatcttctgggactcaccatctccagaatgaaaacaatttctacagtagacttaaggacagtttatgctgaaatggcaattcctcatttaagcaagttttcccaaccttcaggttggtcagccctcctgagcctcacaggtggataattgaggcctacaagagaggggagcctaggagcttggattgaccttctagtcaaccacctgacttcagcacaccattacaatcgggagactaaaccaacaaccagaggatctaaaatgtcacattcagattttcaggaagaaaatcttcattacagtggagcacaaatgttccatacaagacatcattgaggagccatgctgtccccttctaacctgaaacacattctttcccatcctggttgggcttctgtacctccttattaatttatgaacctgaagttgcttgaagtgttttgggcttaataaatggggtgaaagtataggtagcagtaacacctacatgaaacaatacaccttggatcttttaatctaaattacttttcttttttaagtctacttttaaaataaatacttctgtaaatattctgactgtaacattgaggaatgaaaatagccttttaacctagatatgtcagttgatcattattgaactaatttagttaacaagtccaagatattctgacttaatctagaatatttttctgctactctttaagagtcctgtggctagtccctctgtctcccaagagcattggctagtctcctgagggtgttgcccatttgtagcagtggtttcaccaggtctgtggccacttgctgcccatgttttccctgcactcttttttttttttttt

SEQ ID NO: 9486 - DNA, 1127 bp, Homo sapiens
tgcaggcccacctggctggcaaggctgccctgatgaaccatggccatctgcaactccttgtgggccatccgtccagccatctcatcagcccctgagcaaggctctggagagccctttggggctgcgccctcacctgcccctgctgatgggtggacaggcggctctgaagccggagcctgggcgcccaggcgaggagtcacctgcccctaagcaggaactgcatcagccctctttccccacacctcagctgtcgccgctgccgatgcctggcaaccccgccgactacaatggcctgtgtgttgggcctgagctcactgcactaggcagcttctacctgtactgtggccaagaggggctgcagtgtgggggctactcgccctgccccatgcttcctgagggcaagctgtccccagtggctgcacctcacgaggaggggctcctcttagctccgagctcagtgccctcaggcacccctttccagcaccctccctggggctcctctcgctactgctctagcgaggacactggagtgaatggctacagcatctgcggagtgttgcccctgtctgttacccacgctggcactacctgtggcggctgcccatacaaaatgccttttgcagcaggtgaggcttcctgggcccaagatgtactggggagtctcggagacatggcatcccaggaggttgggctgttgatctgagcaggggtctcccttggggtctggctgctaactggaaggtagggggctttcagaagtgagaactcccgtagtctgtgccccaagccgaggagcattcccaagaacagggcccgtatagctctggacagccttgctctgcccaggctacctttggagattcttggcctggcagttaggtagcattgcagtggtacaggccacaggaaggcctctcttctctcctcattgggatacccgttcttagactctgaagagcaggttagatattggaattaggacttttaccaaattgttctcacggcccttctaccctccttgaggaaagctagaattccctagtttctagaaaccagtactctctgcatgctggccaagttcagcattcatgggaaaggtggtaggtaccaggctcagtaggtggtac

SEQ ID NO: 9487 - DNA, 1167 bp, Homo sapiens
tcctgattgctatagggagtaatatcaaggggctgtgacgcaatgttatggaagccgccattttgtacggaagccaaagtccaatcacttccatagcaagcaatcgaaagaagatggccgctcccacgattgtgggggaggtctccactggggaggggcagaggaaattcggtcgaaaaagagataaagctgaaggaaataaaattggcacggagtctgggaaagtagtttccctaaaggagtcttagaaatagggttggtctggaacctaaggggcggagccgacgcgtagagccgctttgcgcgtgcgcatcacctaggcggttagatttgaatacttcactgaggcgagccgggcgttgtgagcggactgctagaggcggctgtctgtttccgctctaaggaaactcagagcgtgtggaccccaaacaagtctgcgcaaaatttgtcgaggaggtttgccgcggcaggtaaagagaatgactctttcgttctgggcttcagggaaggcttcgggttttgtctgggcgccctgaagttcctgcggtgggaggtagggtacgctccctcagcctggcggcctccgttagcgccgggccgagtagacgcccctgccccgggccgggcacactgtgccctttttcccctcctcggcctgtacgttgtgccgcctcccgcttccctaacacttctccgcctgcacctcggcccctccggccacccggctcgggttgcttgtccgtcgctctcttggcgtcctcttccgccccgccctgccgtcctctgtcagggctcgcggactcttcttgcacccctgccgctcttccctagggacctctcggctgtttgtatttctcacttaagctttttttggctctaaatgaagtgacagcaatgagtgattttaaaattctcagctcttcgtggtttaaggtgtctgctcggagtgctggccgcacgtaacagatttttcgttttctgcaagtataataaccttaacaaatgaagtcaatattagtactgcgcaaattagtttttaaaaatcctcttctgttcattattcctcaggatttaagcccttattcttcacgtttatttaaatactcaagtttgagggaggaaaaagtattgccgattggaattttacagataggtttaataggcatt

SEQ ID NO: 9488 - DNA, 2023 bp, Homo sapiens
tgctgtttgtggatccagtgataattattcctgtttaccaaatgttatttcctgtactgataatttggagggtagtgccatgctcttatgtgataaagatgaggaaaaagccaattattgcccagtgcaaaatgatcttgcttatgcaaatgattttgccagtgaatattacttggaatctgagggacagcctctctctgctccttgtcctttgttagagaaggaagaagttattcaaaccagtaccaaaggacagttagactgtgttataacactgcacaaagatcaagatctgattaaggatccacgaaatctattggctaatcaaactttagtatatagtcaagatctgggggagatgactaaacttaattcaaagcgagtatcttttaagcttccaaaggatcaaatgaaagtctatgttgatgacatttatgttattcctcagcctcatttctcaaccgaccaacctccattacctaaaaaaggacagagtagtatcaataaagaagaagtaatactgtctaaagctggaaataagagtttaaatattatagaaaattcctctgcacccatatgtgaaaacaagcccaaaatactcaatagtgaggaatggtttgctgcagcctgtaaaaaagaactgaaggaaaatattcaaacaactaactataatacagctctagatttccacagtaactcagacgtaactaagcaagtcattcaaactcatgtcaatgctggagaagcaccagatcctgtaattacatctaatgttccatgttttcatagtatcaaaccaaatctgaataatttgaatggaaaaactggagagtttttagcctttcaaactgttcatctaccaccccttccagagcaattacttgaattaggaaataaggcacacaatgatatgcatatagtgcaagctacagaaatacataatattaacataatctccagcaatgctaaagatagtagagatgaggaaaataaaaagtctcataatggagctgaaaccacctctctaccgccaaagacagtttttaaagataaagtaaggagatgttctttgggaatctttttgcctagattgcccaacaagagaaattgtagtgtcactggtattgatgacctggaacagattccagcagacacaactgatataaatcacttagaaactcagccggtctctagcaaagattcaggcattggatctgttgcaggtaaactgaacctaagtccttctcaatatataaatgaggaaaatcttcctgtatatcctgatgagatcaattcttcagactctattaacatagaaactgaggaaaaggccttgattgagacataccaaaaagagatttcaccatatgaaaataaaatgggaaaaacttgcaatagccaaaaaagaacgtgggtacaagaagaagaagatattcataaggagaaaaaaatcagaaaaaatgagattaagtttagtgatacgacacaagatcgggaggtgagctctgtcttgaaccaaagaatgttcttgaattttgggttttgttttgttttcttaaattgtgggtattctcaaattttaatcttagtctcgggtaggcagaaaataattatttccacttagagggctggagaaatattcttatgtagaaccttcagaaattaattgactaacagctagacttcaaagcaatttaaagtgacaaatagtcacaaaaaaattaaatggaaaattgtacaaaaagtagccaaagttaaaattgtataatttcaaaaatttcaaaaggtatgtatactgtcacctctagtgatttgtcaatttggctttatataagaatctctagggaggttatatatagcttgaaaagtcatcttcagtgttgttatatttggggagtaaaaagctttttattttgccaactgcatgaagtaaagcttgactgaatttccttggctgacaaggatatgtagaagttgagagtccattttctttattatttaattttatttttattttatttta

SEQ ID NO: 9489 - DNA, 1129 bp, Homo sapiens
tgcaaaaacaaagaaatagaactgaagagctactggatcagttgaggtaaggaaatgcaggcatcatttgtttgtgttttattctgtaccttgtggttgtttaaaccgattggagcaattgatgtatttttaatgtgttgctgtttttaacctatacagtgctgtttcaaaaagagtcagtgtactcaacagtaagctggaaatagagtagaagaactatggaattataatttttccatattttatacttttcattgcgtagacttggtgtttctctgatatacaactcaagattgggttcttagttatttcaaaagcttaagtttgtacatccacaatatatgaattgaaatattttctcccagtccagtggaaaaacattagcagctgctgttggtactgtttgggtggtatcagaagttctcttttatgttaattttaaaaacgctttttaaaaatcttgtttatctctctacagcttgtctgagtgggatgtcgttgagtggagtgatgatcaagctgtattcacctttgtttatgacacgatacaactcaccatcacctttgaagagtcagttggtaaggagccaaagtgagataattcttttacagaaaaatgaatggctacactcactaaagattcaaatctttattttactatactgataactattggcatgatgagagcactgctgaaagtcttagaacagtcactttattgatagcagaattttattttattttgtaaagaataaaataaaaatggaattagtgaacgttgccctttgttgaattacattaaataaaaattttgctctgcaaataatggataaacatgctactcatgtctatttactatgagtttctttcttttcatctccatctttcgtgatagagaatagagaatttaccctaatggctggagattctttttttttttttttttctttttttacttaagagtgaggccctgcagctcacgcctgtactcccaacactttgggaggctgaggtgggcggatcatctgaggtcaggagttcgaaaccggcctggcccacatggtgagaccccatctctactaaaactacaaaaaatgagctgggcatgcacctgtaatcctagttactc

SEQ ID NO: 9490 - DNA, 1342 bp, Homo sapiens
ttagtagagatggggtttcacagtgttagccaggatggtctcgatctcctgacctcgtgatctgcccaactcagcctcccaaagtgctgggattacaggcgtgagccaccatgcccggcctaaatttttctttttttaatgtttgtttcaatatggacaatccactgagaggggccagggcaaaaatggattctgccaggttggaaatgcactaaggaaaacagtacagaaacattcccagggtccttctaggaagaatatatgtctaaaaaattttcagctctgttacaaagtcaggaacggaattgtttaattataataaattggtgctttggtctgtgtctttgggtcagattgtatctgaggaaaggaagaggggaaaccagaatctgcaaaatctacgactctccctgtcttcctgaagctgaagctatgttcgccattaatgcagatggagtgggagatgccaaagactgaatcattgggtttttcctctgttaaaaaccttaagtgctgcagcctaatgagagtgcactgctccctggggttctctacaggcctcttcctgttgtgactgccaggataaagcttccgggaaaacagctattatatcagcttttctgatggtataaacaggagacaggtcagtagtcacaaactgatctaaaatgtttattccttctgtagtgtattaatctctgtgtgttttctttggttttggaggaggggtatgaagtatctttgacatggtgccttaggaatgacttgggtttaacaagctgtctactggacaatcttatgtttccaagagaactaaagctggagagacctgacccttctctcacttctaaattaatggtaaaataaaatgcctcagctatgtagcaaagggaatgggtctgcacagattctttttttctgtcagtaaaactctcaagcaggtttttaagttgtctgtctgaatgatcttgtgtaaggttttggttatggagtcttgtgccaaacctactaggccattagcccttcaccatctacctgcttggtctttcattgctaagactaactcaagataatcctagagtcttaaagcatttcaggccagtgtggtgtcttgcgcctgtactcccagcactttgggaggccgaggcaggtggatcgcttgagcccaggagttttaagtccagcttggccaaggtggtgaaatcccatctctacaaaaaatgcagaacttaatctggacacactgttacacgtgcctgtagtcccagctactcgatagcctgaggtgggagaatcacttaagcctggaaggtggaagttgcagtgagtcgagattgcactg

SEQ ID NO: 9491 - DNA, 1225 bp, Homo sapiens
cccacccatgttggttgtggcaagtgtctctgactgataaggcaaaaacgagcagggacttctcacatttgccttaactgtcacagggcctcagctggttgtctgctctttccttcctggatcattttcccagcccttagttcccataggaaactttctctcaaataatgatttctgctgggcatggtggctcatgcctgtaatcccagcactttgggaggccgaggtgggcggatcacttgaggccaggggtttgagaccagtctgggcaacatggcaaaaccccgtctctactaaaaatacaaaaaaattaggtgggagaattgcttgaccccaggaggtggaggtttgagtgagccaagatcgaaccactgcactccagtctgggtgacagagcgggaccctgtctcaaaaaaaaaaaaaaaaaagaaaaaaagtctgcccttaagaggtatgaatgattgtgatttggtgctttggacaatgccatgtagagtgcttctttgggggtgagggatagacagaccctaggggctctgagctgaataatcctcttgttgtcccttacatttctctgccagttacacaacagccaatgcggagtctgacaatgagcgggactctgacaaagaaagtgaggacggggaagatgaagtgagctgtgagactgtgaagatggggagaaaggattctcttgacttggaggaagaggcagcttcaggtgcctccagtgccctggaggctggaggttcctcaggcttggaggatgtgctgcccctcctgcagcaggccgacgagctgcacaggggtgatgagcaaggcaagcgggagggcttccagctgctgctcaacaacaagctggtggtgaggctccagctgcctgtctccttctccttccctccctccctccatctctctgttcctgacccctggggaatgaaggcccgtgtggttactgcccctacaaggtgacatgggacgagaaatggtgagacagctggttttgcatctgtcccccaggtcacatatcctcttccaaggaggcccagcgtggatcctagggccagtgtactgcttgccccagagctgcctcccctcttgggagggggagtgtagttctctgctttctgtagagctactgcagaaagagctctacctctcacctctagggggaaatgtggaaagaactgtattttttttttctcctcatttcccttgaggcaga

SEQ ID NO: 9492 - DNA, 1247 bp, Homo sapiens
ctgggaattccccaaagtacccctttgcaagccgtgcgcgtgcctgtggctggcattctctagagctgccttccttcaccagggattgctccgggtagctgtgttggcagactgagccacgtcctcatttctgctaaggatttgcctggtctttttcctgagttatactctatctctacctatctcttcctatgtggccagcccctgtatgcgcctcccctttgctggtggctccaggccatggtctagacagcgctgtccattagaactttgtgcagcgatgtttacgtccattctgcactgaccagtgtggtagccattaatcatgtgtggccaccgggcatttggaatgtggaatctggaataacggtgcagctgaggaactgaactgttaattttatttatttcaattcagtgtcatgcagtgagtggccaccagattagacagggtcaggccttctcccctttcttcctgggccttcccactttcctcttctgcctgggttggactgcctttacccaagcttgtcctgtgacctctctctgttgacagtggcttccaaagaggctggcatggggcactcatctcttctgctcagtctgtgtcctcccactccctgatctgaccccgtgccaccttctggctctgccagcctctacctggttcctgtagtgccgcacagagcctccctttcccggcacagcctccctttcccggcatagccagctttcttcagggtcctgccaggaagggccgcccccccaacatttccagattgcctctgtccctccactctggggtgcctggaaggactgtccaggacccagagagcaggcagagccctggattcctatcctggaatcctcccccaggatgaagaagctctgcctgcctgaaccctccagcgatgggcctggagtcctgtccctgtcctttccttaatccccagcctctggatcttccagtcaccccggctttgcccaccctcaccccatttagaagctgggctcgctaggaaactgctcccttagcatctgcagaacttcctcaagaagtgaaatccccaggtccactttgaaggagaggaagggatcactgaggtctggggtaggtgtcctctggaagcagggagtgtccacaaggcccttctctgagtgctggtggagggcactcgacagagagagcgccgatggcagggtggcagagtaggctgctgtgtaggcaggtgggggctccaggatgttgg

SEQ ID NO: 9493 - DNA, 1196 bp, Homo sapiens
tttggaaggagcagaaaacccttgggccagaagtaccagactagatggacctgcctgcataggagtttggaggaagttggagttttgtttcctctgttcaaagctgcctgtccctaccccatggtgctaggaagaggagtggggtggtgtcagaccctggaggccccaaccctgtcctcccgagctcctcttccatgctgtgcgcccagggctgggaggaaggacttccctgtgtagtttgtgctgtaaagagttgctttttgtttatttaatgctgtggcatgggtgaagaggaggggaagaggcctgtttggcctctctatcctctcttcctcttcccccaagattgagctctctgcccttgatcagccccaccctggcctagaccagcagacagagccaggagaagctcagctgcattccgcagcccccacccccaaggttctccaacatcacagcccagcccgcccactgggtaataaaagtggtttgtggagtttctggctctgttctgtgggccaggagagggactaggttgctggggggtgatgggaccgtcctgttcagctggttcaggcttcagccaccctgttgagcaggttttcccatcgtctctctcgaaactggcctggcccctgactttggagagcagtgccatgtttgaccaccagaggggaggagtgagcgggccacgggagccacgagtgtggggaggctgcagtgctgctgtgtagcatttcttcctggtgtgagcctctccacaagcctgttgagtggttgagctctccacaattctgctcatttggaggttggggttaggggtgcacaggcaccttggctcctacctccatgttagggcccaggtgactagctgtctccctcccaacagaagccctggcttctgcgctggagtgcagcacccccaaccaggctctgagctccttcccaggagcctttagtagagacacgccactccaacccacacccctgcatttgttcaagctacctcccggtgccaaaaaaaaaaaaaaatcatactttgagctcattcgttcgtttattcagtgaattacattgagctcctctgtgccagacactgccaatcattagaaatttgatactgctgagaggggcagaggaagcactatttaaatgctttacgtatctcgagttgctggcgctgcacacagcccttg

SEQ ID NO: 9494 - DNA, 1435 bp, Homo sapiens
gaacctccacatgaccagcagcctagccccagactctctggtccggaaacagggcaaaggcaccaacccctctggaggacggtaaccatctgggccctccgacttccttcaaccaaaccagggctagagtcctgacctgccagtggtctttggatggcttgccccgtgcagcatcttgcatcctgagtcagaagtggaaatgtccagcaggggaaggacaggcaggtggatggtgtgagcacttttatcatctgtgtctcatcaggagcatctggggtgcctgtaggaggaaggccacagggcatggatcagccccactgcatctcaagtgaactgtatagccaagtcttaaacctctcacggggcaagcctgacacagaccccctttagatgctcaggcatactgtttccatcccgattccactcttcggctctgacacgtcccttgcaaagtctccgcaggtgctgtgaagagccttccatggtagagatttctcttaagagtgtgatttctcatagggctagtaagggagattgtatacctgttgtccacagtcttcaggcagctccccaggtctctgaaccccagagtgtcatcattggagagagcagtgactgcgagagatggtggaggccgctaagcatggtagaggctagaggaagtctatccacaggcagttgtgttcccagcaattcctcccatcctgcatggttcacaccaagagaaccttcagatcctaccagcaaccgtagcaccttccacccaggggactcccagaagccagtagagagaccaggagccacctcaatcagcaggacagcctcactgcccctcttgcagagtcccctttgcccatcctgaatgcacagtctccctgctcatgcccttcagtcccctgcttggctgtatgcactgtctatattgcactgagagaggaagggacagcaggagtgaggtgaagagggcggagagagggggcaggctcggcaccggccctcccagcccggccagcctgagcttgctgccctccagtagagacagaggggcagtgtttgcatgggaggtgtttctgcctgtccctgcctgatgtccctggtggagcaggtacctccgggcgggcaagcctctgatttgcacacctgaaaatcgcggaattgagtttcgatagattgatttttaaaacttttttggagtagggggtataggggaatcatttaatttaaatcattaagattcccctgctcaaacccagattcctgtgtacagatgctatttagagggaatcagaaaaatgccaagccttttctctttgaatgtgctatttttataactgaacttgtacatatgtataaagagagacacatcttccttttactaactggataaaaaaatcttaaataaaatggagtgagataattttatgtaaattgaggt

SEQ ID NO: 9495 - DNA, 1198 bp, Homo sapiens
ctcctgagtgtataatagcaatgagaaggggaagccatgcatgcagtactcttaacagcaatccacggcaaaatacaggggaatgaaaagaaggcagccacagcagttgtaggtcaggaggagagggaaccatggtcctgctgataagttgcctgtctgtattcaaaagggaggagaagaatgaggaaggatttggactggtgacagagagctggcagtggccaaggcatactgggggtcactgagcagcttaggttccatggaagaggagcagtaggagtcaaggttgtaaacacatggcgaggcctgctgggcaggagcttagcagatgtgtgacaaggggctgcagacagtttgaggaaaaaagtggctgttgtgaccgtgatatgtgaaggatgattgtagctataaagtacaggacatttgagtgtggtgagaaagagagagccacttacagacctttcttcccattcaatacgtgggcttagtatgagctcatagttgtagcaagtaaaggcatactagtatagaaagtgcttggagtgtagtaattgctcagtaattgttagtttacttgccttttctcttactgcagaaatctcagctttcatttattggttcttccaggaaatatgaagtatgatagaggaaatatgaagtataatagcctcgcccagtgtttcttagccctttgccaacttaccacatccttggaaaacaacagtcatgccagtagtccaggctgccgtggcagggtctcacccatggctggggcattgcatatactcatcagggtttctcctcagaacctgcactgtgtagagggcagaaagggtgagggagatagagggggtagagcagcacaagaaaaaccaacagtgcttggcaactggaaatggaaatcaagggaaaggagtggttcagagagtacccgtggttccactgtggatgaggagagagacatgtctgcccatcaagcacttagaattcttttttggaaagtaaaaccagtacatatgaaacaattgaagaatcaatgtgttatcacatgtaagtggatttggcttatgtaggaaaaagggaagttcactgttgcccagggagtcatcactcaagatgggggatttgagctgtgcccttgaagtgacacaggccttggagagcaggggtggccattgccagcgcaaggagaactgta

SEQ ID NO: 9496 - DNA, 1227 bp, Homo sapiens
tcccagctacttgggaggctgaggcaggagaattgcttgaacccaggaggcagaggttgcagtgagctgagatcgcgcctctacactccagcctgggcgacagaacaagactacgtctaaaaaaaaaaaaaaaaaaaaaaaagagtgttttggaataataacattagtccccagactattataagtcatgattcttagagaaaaccaggaagctaggaatggtttgatttaaaaatatgacagtgagagaggtctgtacatctatggtaacatttttctgttatatttgctacatgtttatacttgtgttgcctatcagtcatctattagtgggcagcaaaagtttatctgcaaattggaagatgacctccatgtttggttgtaacaacagagcaacattgtataatgctttacagaaatacagtcaggcctaggtaaccaccaaaactctttttagtcctagactttatgttctgtattcagagatctctctctattgatacatgccattttttcttttcagtttttcctttaacatatctctcccttttctgcaggaatgacatctttgtgttcctgttaagcacacgagctggaggactgggtatcaatctcactgctgcagacacagtaagtaatgagagcacaatcaactagatatgcaggttttctactatgaaacctactatgtaggtttttctaatatggcattgtttgttttaccctttgcttttgtgtcacaaacttgcaaactttttatttctttgcctcttgtgttaaaagactctagttgctctttgactggaactagagtattttagctttccttatggactttactattcattttctttgaacaagtttttttgtttttgttttttgagatggggcctcactctgttgcccaggctggagtgcagtggcatgatcatgggtcactgtagcttcaacctccccagcctcaggtgatcctcccacctcaccctcccaagtagctgggactataggcatgcgccaccatgcccagctaatttttgtattttttgtagagatggggttttgccatgttgcccaggctggtcttgaactctgaggcccaagtgatccacctgcctcagcctcccaaagtactgggattacaggtgtgagccactgcacctcgcctgaataagtgtcttacacattcattcgacaaatatttcactaatgcctactatgtgtctgata

SEQ ID NO: 9497 - DNA, 1198 bp, Homo sapiens
cctgggtgacagagtggaaccctgtcttgaaaaagggaaaaaaaagagagaggttataaatctctttgtttacttttctccaaaggcaggtaggatacgttctcaatgctttcagaactagcagaaacagatatctagagataggatgaacaaagaaaaaacaaaattttcaggtcacttaacagcagattgacatagatgtcacccatagatgtccatgtatacctggtgtcctctgagtaaggatgtggagcagggatgcttttaagtgccttaagagcacatgtctgattgggagtgatcagggaatctgcacttccccctttggggatgttttttcccagggcactcctggagtcgtgatattttcagggcgttgcattctccctttagagcacttttctgatctcatgatgacaagcatcttggttttagtgattgtggttgcatacagctttgcattgagtgattttgtcgcttcaattaaatacagttccccctcacccccttttcttctccccaggcaaggagagcctcatcactgacagtggaaagctgtatgcccttgatgtcctgctgactcggctcaagtctcaagggcatagggtccttatctactcccagatgaccaggatgatagacctactggaggtaggagagggaatcttggggacctaggataccttgacatttaatttgtaggaatcagatgtccatgactaatgttagtcctgcttaatgggagccccaaaactcccttttgtcttttttctttttcctttttttttttttttgagacagagtctcactctatcacccaggctggagtgcagtgatgcgatctcggctctgcaacctctgccttccaggttcaaggaattcttctgctccagtctcccgagtagctgggattacaggcgtgcaccaccacactcagctcttttttttttttttttttttttttaagtagagatggggtttcgccatgttagccaggctggtcttgaactcctggcctcaagtgatccacccacctcagcctctcaaagagttgggattacaggcatgagccaccacacgcagcccccaaaactcctttttttgattttacaatctataaagggagcagagttagctcctggcatggggagtatgtgaaggacttctgccccctgccctacaccagtgaaatagaaca

SEQ ID NO: 9498 - DNA, 1152 bp, Homo sapiens
tttgtcagtcagcaacctggtcagggaagaggagaaagctgttgataaatttgggagctttgccacaaaagcattaaagatgacttcaaatatgccaggccaatattctttagtttttaaatgaagtctgactagctgcagctccctttctggcatcaccatcatgcatatggttaagagaactttgccaagaacaatatctagcagtgaaggggaggtggcaaaatgatcagatatatatgcatataatagagttattgctgacctggtattctcatttatctgcaaactccagctctctttggatctttagtttgtttgcaggtttcattttataagaggttggctttttatctggaaaagctcactaagtcattcattagggacagcttagtgtgccagaacagatatttaaaaccactagtctaagaactatccacattagtctgatttcaaagttgaggttcccaaaaggcatagtgtgtatggacaacgtgaaagagccatctcatgtgaatctttaactgcaggttaccgcagtgccattggattcttactgcaatgaccgaagtgcagaatatgaaaggcgagttctgaaggaaggagggagtctggcagccaagcagtgtttgttgaatggggcccctgaactggctgcagactggctaaatagacgatcacagttcttcccagagccagctggaggtctgtggagcatcagacctcagaatggctggtctttcatcaggattccaggtgagttctcaatcctcttggaatgtgttcctcgctttggcaaggggagaaccagggttatcttcatgtggtcctttcagatatttggaatttactgttcttgaggtttctgcttccttttttggccttagtaattcataggtaagaatattagtaatttatgatgagtggagagagaaatgtttttagatttgtgcttaaatacactcctttgacatgcttacagctgagaaagaaatgccactcttaaaaaaaaaaaggtagaaataaacttagtaggaaaggctctaggttgaatgagtacggttgtcttgtgccattgccagtggaatgaatgagaatgtcgtcactcacagaaagcctcatttaaatagcataaacagtgtcctacatgaa

SEQ ID NO: 9499 - DNA, 1127 bp, Homo sapiens
taattttttgtattcttttttttttgtagaggtgaggtttcaccattttggccaggctgttcccgaactcctggcctcaattgatctgcctgtctcattctcccaaagtgctgggattaaaggtgtgagccactgtgcccggccaaggtgaatttttttttttttttttttttgagacagagtctcgctctgtcgcccaggctggagtacaatggggcaatctcggctcactgcaatctccatctcccaggttcaagcgattctcatgcgtcagcctcccaagtagctggtattacaggtgcctgacaccacgcccttttgtagttttagtagagactgtattttgccatctaggtcagcctggtctcaaactcctgacctcagatgttccacctgcctcggcctcccaaagtgttgaaattacaggcgtgagccactgcgcctggcaaatttttttaaatactgataggagctttgcggaggattttagttttcatagtagcaaaccatgtaatgcgaaataatgtatctgaaagtaggaaagtaggaaagaactgtttctaaaatgataaagatttacaaaagagttatgttaatgagagacaatccttgctgctatgaacgaccctcaaacctccatggagcactgaataagcgtgtctgctgtggtttgtttcagatggttagctcttttcctgtctctgaaagcctcctacaggctccatcagctacgctcctggggagcgccagaaggggagagccaccagagatacctgaggaacaaggatttccttcttggggttaattttccactctcctttccaaacctttgcagctgccctttgttaaaggtaagcaattatttgagcataaattacctacttagtatcttctttccttttccttgaataagtaaaaataatagtaaagtaaatgaaggcctgagagaaccaaaaagttcccagaggagtgggcggtgcagcatattgagttctaacttaatttacactttgtatatatatttttgagtgtatttatattttcaaaatgttttttttacaatactgtgaagtacacagatcttaagtgtacagctctgtgaatttatatatgtgtatacacttgtg

SEQ ID NO: 9500 - DNA, 2945 bp, Homo sapiens
aaggtggatgtagaacagaaaatgagcatccgatttcttcactaaaggagaccaaactgttccttgcggtctagtatttaagaactggaacttgaaagtcctccttctaccaactccacctccaccccctcattccccttctcccaaagtactactgctgttgcatgacaaccccaaatatgttctgtcaacacaaacctgcctttggtgtataaacagggcattacagaatggtacaccctatatatttctgttcagtatccattcactagttcttcatttataaatatcatcttccccattctgctgctgaatgccacacatccatccagtctgagaaagtgagagaggcaatcatgccaagaacaagccagcaaagctctttcaccagatgtagactgtagccctgctgccttccctccagcgagtctgccagcatgcttcttcatcctttttatatgttctttgcttcctacttccctgtcttccaacatactgttcacttactctggcagtctttctgcttttcattaagcctcaaaatctcctctgttctacttggcaccacaagctatgtcctatatatgtatttctgacttggcaggatagttcaggggtctggcagtttttatttaccttcattattaaatgggcctctgggatgttgcctcttcaggagctttttggtaatcaatacttctctcagaagtatgagaccatcctctgcactctgctctgtcatcaaaggctgctgggtggagataccctttttgaaaggtggccttggtgagaggtatggagccaagtcttctaggttgcttgcccacatcactctatctctggcctctgattctcaactttgtacctgtgtggctcctcttgttagtgcaatgttgactgttgaaaaagcagcagtatgcttacaggtttgcttagtttggggacaccgttaccaccagaatggctgctctgacaatatgcctagggactttctcatggcttttatttaataaggaggctgggcaccctataaagcctcatgcattcacacctttgcagcatggtttatgcctcagtgttatgtgcactggaatgttttccacttcacatttccaagtagaaatattagtgttacggaagtgcctaatatcccagtccaaatttttttttttttttttttttttttttgagacagagtcttgctctgtcacccaggctggagtgcagtggtgcgatcgctcactgcaacctcagcctcctggatttaagtgattctcctgcctcagcctcccaagtagctgggattacaggtgtgcaccaccatgcccggctaattttttgtatttttagtggagacagggtttcaccatgttggccaggctggtctcgaactcctgacctcgtgatccgcctgcctcagcctcccaaagtgctgggattacaggtgtgagccaccacgcctggccccagtccaaaatatttaaagattgtttccttagtgtcttgaagttttgcacaaaattcttttttttgagatggagtctcactctgtcacccaggctggagtgcagtggcgtgatcttggctcactgcaacctctgcctcctgggttcaagcaattctcccacctcagcctcccaagtagctgggattacagacgtgtgccaccatacctgggtaatttttgcatttttagtggagagggagtttcaccatgttggccaggttggtcttgaactcctgacctcaggtgatcctcctgcctcggcctcccaaagtgctgggattacaggcatgagccaccgtgctcagccgcaaaattctttatgaattttacacttggcaaatgttaatgacggaagccatagtctgctcctaatacatgtccaaagcattgactgttgtgtcattagctgcctggttacattagctccctggcttcttgtttagaccactgctaatcccttaaaaacaagaggtctggcactagtagcacaacctaaggtggcattacagatctttgagcgagccacagcaacttttctgccaagtcagcttagtttagacttcagtgaatcaggctattgctatcctaatgtatgtctctatgagtgtatttagccacacatctgcccttggttgactttctgactcattgcttgcttgcttgtttccttgctttggaaaactattgaagattgctaaaaaataccactgcaaagtgatggaaaagggtggagaacaggggagtagccaggctggatggctcaaatataaatgaatgaggaattctttatgaagtatcagtcagattttatgattaagtgatgtaatataggaattatgtaaaagggaagaatgtctgatactgatctattagagaggtactttagaggcttcttgattggcataaagttcctaaggttatagattttccccccttttggctgtatagcaaagtgttttaatccacggttgtgccttattgttccattaaaattgtatcttcgatccatcaataaatacttgtggttgaaacaaaataacttttgtccattttacaagaattttatgtaacttagtcccttcaagtttgaaatcacagtgtctcccttactcaagtttatgtctgtacggtcagctgcagtctactctgctgctgcctggatatatgaagtggaaacattcatcgaggggccagcacttttggcttcgacatggttttgtcagccgtggccacttcccattcattccagctaagacgcaatttctattcttgactccctgactccttaaatgtagaaaaagcctaaaaatccagtatatgtccattccttaaattgcccacctcctcattcatgtgcagcctcagcggtgacatactctggttttacatggctttttctttgcatttcttttttgagatggagtctcactcttgccca

SEQ ID NO: 9501 - DNA, 1580 bp, Homo sapiens
tctctgttgcccaggctggagtgatgcgtgatttctgctcactgcagtctctcccacccgggttcaagcgattctcctgcctcagcctcccaagtagctaggattacaggcgcgcaccaccacgctcagcctgatttctaggctgaaaaggctgggactcaggtactttccccagttgggactgaactttctcatcagagaatgggcctcagaagcaatgttcccaaacttgtggttgggtcatcgtggaaaagaaacctcaaataagaaaaataattacaataagaaatggattttcttttttcccacaacagttatacattataaagaacagactgtcgtagaaaactgtctttgcttccaaatcagcagaggaccattgtatgtattgtcaggtctttatataagagtgaaacctttatttatgcttcttgtgagtagagaataaattttaaaactaattagatgaaattaagaacagagtattggaacatctctgtgttttccggaatgtttactcaggtccatgaatgctgtgatgctgggaacttagggaagattcaccaaaatttgagagtgataaaaatggcctaaaatgggaaatggtgagcactcttattattagtgagattggtcaatcagcccatttgaaatgggtaaaaaatactttcagtaaaataattacatattatatataaaatatttctttttttgagggcagctactgagtgataaaagcatagtagaaatcactttggttaaaagtaactcaaatttttctcttaagtaatctaccaacttcctgatgtttttctttaatattttggaactgttcaagacagaatggagcctacatatatggtgttccactagtatgttgaaaatgtcatatcatggagaatggagacaccttccaggtgtctgttaaacccatcttctctgtgtacttctggcatcttttttggtaggatcatttggcagggggtagagtacctgtacttttggcaccattgaaaccagctctggcccacttgtttgaatagctatcagactcagcgtctctatatgctttatatacagttgagagaaccagtgtttaatgctcttgaaattgtatcttccatgcttcagaccagatgcatttaacaaaatggatatattccagctgtagttgcccagtgtttacttaacacatctacatttttttcttgtctattttggtccccttgataggaaaagctataattttaggcaggactatacgtcgatttgtagccatgcttccttcctttcccttgctcatccatgttagctggcagtttttcttttgaaaagttaaaaccgggatatgtgcaatagaaatatatatatatatatgtatattttaatacttgtggacaaatgttacaagttgtttaagaacaacaaaatcaccaatgtcttccattttgagatgtgtatagttttgtaagcattagtgcttggtagcatattgtagtgccatgttaggggttagtgcatgagtctagtgattttaaacttcaggatgaattattgataataacaaatagtgtaaaaag

SEQ ID NO: 9502 - DNA, 1096 bp, Homo sapiens
aaccagctgtctttgtgtcttatgaaacctcaagtcaaaatgagaccgcatttaattattctgctttgctctttttttggggtgggggggagatagagtttcactctgtcacccaggctggagtgcagtggcacaatctttgctcactgtaacctctgcctcttgggttcaagtgattctcgtgccccagcctcccgagtagctgggactacaggcacgtgccaccacgcccagctaatttttatatttttagtagagacggggttttgctgtgttggccaggctggtctcaaactcctgacctcaagtaatccacctggcctgctcttttcatgtcttaacatggcatgtcttttagtttcattattttcctactccttgtatgtcaagaaattacattttgcatgtcttatggagatgctgttaattgcttcagtgagtgcttttctaatctgcagaccatttacatttcctgtttgcagcatgctgtgtgcaaacactcagtaatttggagtattcaattatttgttagggctcttcctatttccaaatgtgctgaattgtctattgatgggattttcagatcttttcatgagaactggaaatgtagctgggtggcacctacctaggttgctacgtagtgagtagactttctcttgggtatagtaagcctcagacagctttcacttttatctactttacttgtggaaataaaacagtcattttgttctgaaagaataagatagctttctgtagagaaggaattcctacctctaaaagctgccttgagaactcagaactggcagttttctgaggtgatttttaaatttcagtattagggagagtccagcatttgctgacacagattctacataactaatgtatgatagcaaatgcaaaactattataatgtggtgtatcttgcgcatacacaggttagaacaagtagactctggcagcagatctccagagacccaagtttaggttctcatagtgtatttgaagtagttatactcctggcttaagtagtttagtgcctgggagaatccattactgaaaagcatttaacttaaaaaaaaaaaaaaaaaaaaaaaaa

SEQ ID NO: 9503 - DNA, 1145 bp, Homo sapiens
tcatggtgctgttggttcaagcagattgctttagtttattaatgaacattgcttggctattaattatatcctatttggaaggatcccttggtgaacagttttaaaaagcagagggctgtgctaaatttcagggtattgatagcttgagtttacattgtattagccctgctcgttatcatttttttccccagggagctatgcaggtaatgctcattagcatgaatcagaaaagaaaccattctgcctaagagcatcttaaccatccccctaaaccacctatgctctcctgttatagttgtcagtaaatcacgaagaaaattaacagctccttaagactctacatccctcaattctctttcttttcccagagtttgtacatcattctctactcagatggaccaggatttgcatataagccttttaaaactgactagtggtcctaattttaacatttttgtgtatgactcctatcccttttctgaagcagcattgtgatagatgtggagcttctacctgcatttctaagcaattattaacccaacttttgagttgaaacttgcatggatccttgttatgtcccgtaattcctctgaatcaaggaatttattttgcatgcttattaaactcaaactgggtctgattgaaagtgcaagcaatagtgacaggaccttaactctggttttagagtacgaacattctaatgcatgactcaaaatgtccagtgttgtggttactagttattttatatatgcatttgttaataatgaagcaatagagactaagaccaatagcttgaatatattcagattattttcatgttttaataaaggatttttcttacttccattgaaaatgggaagtagaagataaacaggggcaaccacaagacattcaaactgtcaggactagggcgtagcagtgcccaccctctaaccacttgcctggttccattagtccccaagcatgtttgaaaacaaaagacacaaactaagcatgctgaataaaactagctgctatggctgtaataatcagaaaggtgcagagtttcagaaagagtaggaaagtagggaatgccagtatggagtatgtaaaataactagatatggatatggggtttgtttatgatatgctttatgtagacaaag

SEQ ID NO: 9504 - DNA, 1099 bp, Homo sapiens
gattttttttttctgacaggtccatcaataaagtatcaagagattatcggcaatattacaaatcactggagtctgtttggggttttccagaagctgagccaattatttacttaattgtctaacgattaacgacaccccttgtgctttctgggcctgagtttcgtaatcgacgccctgagaggtatacagtaatttcaaaacaaaacaaaacaaaaaacaataaaccatccctcggaatagagcttatcatgtgagcacccagacaagccagcttcaaaatgaggtgaaaactacagttcctcttccgtttatcagagttctaactgggactaccgtgaaccacatctactgcccgaggggcagggagagctgcctcagtcccgggcttccctctcggtcccttcgcaccgcatctccccgaggccgctattcccgccgcgcccgcccagggacccgcaccgccagcgccgtaccctcaggttggcccggagacccagactcttggctaagttctgcaggtcactgtacttgagggagtccagctcctctagagaggggatgatcatcgcgattcgaaatcccggcgatactcggaagatggatcaccaaacttcgtcagcgcggttcaaatccctggcgccactcttaactttgactaggcagaaatttatagacagtttaaatgaagaatgccgcgcttccattggttgaaaatgcctcaaaggcggggtttctaaccctgaccaatagaaaggctgatttcccgtcccaacagaggcgcgcttttttcacacttcacgaatacgcaggcgccaaagggcctgtaacgcctgttcaggtaacgagtgcgcggactcggactccagtgcttggattgcccatgatgtccaatgaggacgcaggagctgtgcttggggcggggcctggcgtgtattcgaaaggaaggcgccggctgcgggaagatggcggctcagccgctgcggcatcgctcacgttgtgcaacgccgccccggggggacttttgtggtggcactgagagggcgattgaccaagcttcttttacgacctccatggagtgggatacgcaggtggtgaaggg

SEQ ID NO: 9505 - DNA, 1105 bp, Homo sapiens
attttttaacatcttgtaaatattcctgtattctcaacttttttccttttgtaaattttttttttttgctgtcatccccactttagtcacgagatctttttctgctaactgttcatagtctgtgtagtgtccatgggttcttcatgtgctatgatctctgaaaagacgttatcaccttaaagctcaaattctttgggatggtttttacttaagtccattaacaattcaggtttctaacgagacccatcctaaaattctgtttctagatttttaatgtcaagttcccaagttccccctgctggttctaatattaacagaactgcagtcttctgctagccaatagcatttacctgatggcagctagttatgcaagcttcaggagaatttgaacaataacaagaatagggtaagctgggatagaaaggccacctcttcactctctatagaatatagtaacctttatgaaacggggccatatagtttggttatgacatcaatattttacctaggtgaaattgtttaggcttatgtaccttcgttcaaatatcctcatgtaattgccatctgtcactcactatattcacaaaaataaaactctacaactcattctaacattgcttacttaaaagctacatagccctatcgaaatgcgaggattaatgctttaatgcttttagagacagggtctcactgtgttgcccaggctggtctcaaactccaccaaatgtacttcttattcattttatggaaaagactaggctttgcttagtatcatgtccatgtttccttcacctcagtggagcttctgagttttatactgctcaagatcgtcataaataaaattttttctcattgtcatagattcattctttgtaaacataagtcttccaagatttaggtgagcagctaggcttaacaagagtttatacatacccttggtatgccctttcctgaccactgcttccattcaaaaaagaaacggcagtatgcttcctttatattcccagagtacctctcaggttttattaaatgctgttttgtatatacgaggctttaggacatggcacacttccgggtactggaaacattcagattttcctatcaa

SEQ ID NO: 9506 - DNA, 1205 bp, Homo sapiens
tgggctatttgctgaagcttcttggtggcccttgctagcccaggaagaaacttacattttgatttttttgtaccatggctttggttcacaaattgctgcgtggtacttattttctcagaaaattctctaagccaacttctgccttgtatccatttttgggtattcgctttgcagagtattccagtagtcttcagaaaccagtggcttctcctggcaaagcctcctcacagaggaagactgaaggggatttgcaaggagatcaccagaaagaagttgctttggatataacttcttctgaggagaagcctgatgttagtttcgataaagcaattagagatgaagcaatataccattttaggcttttgaaggatgaaattgtggatcattggagaggaccggaaggccaccctctgcatgaggtcttgctggaacaagccaaggttgtctggcaattccgggggaaagaagatttggataagtggacagtgacttctgataagacgattggaggcagaagtgaagtgtttttgaaaatgggcaagaataaccaaagtgcactgctatatggaactctgagctctgaggcgcctcaggacggggagtctacccgaagtgggtactgtgcaatgatatccaggattccaagggtaggtgaggcccaggagccatcgttttctagtaaacaggggtgaacttcattgtagcataaactatagaagatagcttttgtttctgtaaatgaaaacacctggcatgttatatttggcacctcacctgtgtctggggataagtaactattggcacaagtgtgaagtggaagcacaagggggaagtggtttctgaggaggaggagttaacttgtttctgcgcattgctttgggccaggaacgagcattgttatgtttcaggaatcctgagaggttagacatttgaaagatttttggagagattttcatctcctctaaaaaagaccacaacctctgtaatgaccaggggttttgtagagtggatgtagggttagcctgtggctttctttttttttttttgaaacggagtcttgctctgtcgcccaggctagagtgcagtggcgtgatctcggctcactgcaacttccgccctccaggttcaagcgattctcctgcctcagcctcctgagtagctgggactactggtgcacaccaccacgcccagctaatttttgtatt

SEQ ID NO: 9507 - DNA, 2576 bp, Homo sapiens
agatttgtgtttgccttttgtttttttaaccgcgcagttcattggccactctgcacgcattcagtattaccatggagctgggaatcttgctggagcccctggggcaatagcagcagcaccaggcggtctcctctacagactgccttggcccacccattgaacattcggcacgtgaccttgtggggggagcggggattgggcacctgcgatcctctttcctctcttcatctttctcttctgcccttctttttggaagaaggggtttcaaaaccagtttagtttccaaaaagtgtacatttgtggggggggggggtctaatttgagagcgagagtgtgtatgtgtgtgtgtgtaagtgtgtggatttttttatcatttttttaaaatgcagtactctttgtatcagtctgtcatgggtctatagctgtttcagatttttttcagctgtacttgagcatctgaaactgcaagaaagaaactcattaaatgtgattcttcttactaaacaggcctgactgctgtagctgtgtaacttccccattcccacctactcttcccatcctttcccaactttggagaaaactccccagtttagccccctgacctgcaggctgtgtcctggcaggtgtgggagggaagcccatggccaggtaccagggagggcagtgaatgtcttgctcttcccatgggtacagcccacagcttcttggctgaacgtagaacttctttttctcacccagtataccagcctcttcctggtgattctgttttgctgctttggcaagaactacattttgtttttaagagaaatttctgaatatgaatgtggagagcaaacacaaaaagatttaggttacgccgggtgcagtagctcacgcctgtaatcccagcactttgggaggcctaggcgggtggatcacctgaggtcaggagttcaagaccaatctgactaacacggtgaaaccccatctctactaaaactacaaaacttagccgggcatggtggtgcgtgcctgtaatcccagctactcggggggctgagacaggagaatcccttgaacctgggaggcggaggttgtggtgagccaagatcgtgccactgcactccagtctgggtgacagagtgagactccgcctcaaaaagatttaggttgcaaatgtttcaagcatgtgcagttttgtgtgtgtgtatacatatatatggtcagcatatatattgtgcagctagggcgaagccagcagaggtgtgtgtatgtctttatgaaatgtttgaaaagagataaactgactgcttgataatcactctcaggtgtaaagctccaagtgtaaataaaagtggcatttaacaaatctttcagaacaaagtacagctgactatatataccaagagctaagctaaaggaacagctgagagctccgatctccacgagagactaatctaaaagctctgctttgtacttcctcaccctgctttcgtacaaggaagggggacgatgggaaatcatggacttgtaagttgtatttaaacataaaaatgaacttggtaacttctgggtttagtagagcctcagtgtcgctttaacttagtttactttttttttatttttaaagcagcaatggatggttttaaaggagtattatgattgtaaaattgctaaatatgactgtaacacagctttgtggtagctgtgacacagttcacttgggcaaaggagtggtgatggactcgttaaaatcatatatacttgaatagtccattgaccgaaactctttatagactattgtgtaaatgtggaatcacagactgttaacattgcctggacttcagcagagtcctggagctgctgggacctctcctatcatgatgaacttggacttttttttttgatttctggttttaaaaaacataaaattatagaatccagataattcgctggagtcattctgatccaccatgtagatctgtatttagtatcatttggatttggagaagtgttgattacattatggctgtgtaataaaatttttattaaaactgcatcacactgtagccactttgccaccacctccccacatgtagccgctgaaacccccacgagatgccaatgcacacagcagggagaaaagccaaccaaagaagaccgaagggtatctttccacccgagtagcctctgtagtgattgggaccaagactaaggacttgtctccaatctcagctgaggcagtgcctctgaaccaagatcttggtcaggcattaagacactggctttgtcctaccaactaggatttcttggtggttcacactatttcttgtgctggggaattccctcattgggcccctcctccctccacagtgtggtttcagtgttgaagggtgcagcacccaaggttgtttttatgcattttttcagttccttccaagaagcaaaaaggccagtgtccatctgcctagttcataatgtttataggtctgtttgtctgtcttgcttctggcaggtgtagggaaagtctactgcctgccactcccttcaaaaagaatgtttttgcttttgtgaagtcctgacttgccactcaaact

SEQ ID NO: 9508 - DNA, 1123 bp, Homo sapiens
acggagtcttgctctgttgcccaggctggagtgcagtggcgcgctcggctcactgcaacctccgcccctgggttcaagcgactcccctgcttcagcctcccaagtagctgggactacaagcacccaccaccatgtccagctaatttttgtattttcggtagagatggggtttcaccatgttggccaggctggtcttgaattcctaatttcgtgtgatccgcctgcctcagcctcccaagtgctgagattacaggcgtggcccactacacatggccaatttcatgctttttaatggctgcttctcagttcccagttttccccaacatctgctctgtagtctttaaccctgatccttgtgctagaaggacagatgtttgtctaggacctgatctctgccctcatgatttggtttcatgtgatcgttatccacacaccttatgtatgtatatacattcctaccctccccctcagcacgtcatttcccctgtcacagttgcctgtgtccctggagtgttacacagtgcctcctgaagacaacctggccctccttcagctctacttccggaccctggttactggtgcgctccgcccacgttggtgccccgtgctctatgctgtggctgtggctcatgtcaatagcttcatcttctctcaggacccacagagctcagtaagttacatctccatcttcagaggaaggaagggagctagcaattgagctgcctctgggccagctggggaagaggtaagtgtcaagcaaggccagtggtgggtaccagccctcggctcagtgccacctctccctgttctgcttctaggatgaggtcaaagctgcccgcaggagtatgctgcagaaaacatggctgctggcagatgaggtagggtcagggccattaggagggtgggatattagaggatcttgggggacagagaccacaacaggatctcattacccacttcataagttttctttcctttctgcagggtctccggcagcacctcctgcactataagcttcccaattccacgctcccagagggctttgagctctattctcagttgccccctctgcgtcagcactacctccagagactgacttcaacagtgctccaaaatggggtat

SEQ ID NO: 9509 - DNA, 1202 bp, Homo sapiens
agcagcagggtccctcggtgtgggcaagggactctgctggctcaggcctgccaggacctccccagcatccgcaactgctacctgactcattgctcgccagcccgagccagtctgctggcctcccaggctctgcaccgaggggagctacagcgagtcccaaccctgctactgcccatgcctacggagccgctgctgcccaccgactggcccttcctgccactgattcgcctctaccaccgggcttcagacaccccctcgggactctctcccacagacaccatgggcacagccatgcgggtcctgcagtgggtgctagttttggagagctggcgcccccaggctctctgggctgtgccccctgctgcccgcctggcacggctcatgtgtgtgttcctggtggacagtgagctgttccgggagtccccagtacagcatctggtggcagccctcctcgcccagctctgtcagcctcaagtcttgccaaacctcaacctggactgccgactccctggcctgacgtctttccctgacctctatgccaacttcctggatcattttgaggctgtctcttttggggaccacctctttggggccctggtcctcctgcccctgcagcgtcggttcagtgtcaccttgcgccttgccctctttggggaacacgtgggagccttgcgagctctgagcctgcctctgacccaggtactttctcagcccagcaggacctgcaagggtaccctgcactgggcctcgggggcagtcctgagccttgaggagctttggaagacctcagcttcctcatcttacctcttgggggctttgaggggattaagagaatcaatgaaaagggcttaacatgggctgggtgtggtggctcacgcctgtaattccatcactctgggaagctgaggtgggtggatcacttaaggtcaggagtttgagaccagcctgggcaacatagtgaaaccccatttctactaaaaatacaaaacttagctgggcgtggttgcgggtgcctgtagtcccagctactcaggaggctgaggcaggagaatcgcttgaacccgggaagcggaggctacagtgagccgagatcgcgccactgcaccccagcccagtgacagagcaagaccctgtctcaaaaaagaaaaaaggaaagggtttaacctggtgtctggcatatagtgggtattcattactattaa

SEQ ID NO: 9510 - DNA, 1938 bp, Homo sapiens
tggtcaggctggtctcgaactcctgacctcaggtgatctgcctgccttggcctcccaaggtgatcccacctcagccttccgagtagctgggactacaggcgtgtctaccaagcctggctaatttttgtattattatagagacagggttttgccatattgcccaggctggtctcgaactcctgggctcaaataataccccccttcggcctcccaaagtgttgagattacagatgcgagccgctgtgccccaccagggaataaaattttttaaaaccctagtgccatatgatgaaggggcccctgcttttgagggaagggctcctgccttttctcacgcttctctccaccccaggtatgatctcatgtaccagtgctggagtgctgaccccaagcagcgcccgagctttacttgtctgcgaatggaactggagaacatcttgggccagctgtctgtgctatctgccagccaggaccccttatacatcaacatcgagagagctgaggagcccactgcgggaggcagcctggagctacctggcagggatcagccctacagtggggctggggatggcagtggcatgggggcagtgggtggcactcccagtgactgtcggtacatactcacccccggagggctggctgagcagccagggcaggcagagcaccagccagagagtcccctcaatgagacacagaggcttttgctgctgcagcaagggctactgccacacagtagctgttagcccacaggcagagggcatcggggccatttggccggctctggtggccactgagctggctgactaagccccgtctgaccccagcccagacagcaaggtgtggaggctcctgtggtagtcctcccaagctgtgctgggaagcccggactgaccaaatcacccaatcccagttcttcctgcaaccactctgtggccagcctggcatcagtttaggccttggcttgatggaagtgggccagtcctggttgtctgaacccaggcagctggcaggagtggggtggttatgtttccatggttaccatgggtgtggatggcagtgtggggagggcaggtccagctctgtgggccctaccctcctgctgagctgcccctgctgcttaagtgcatgcattgagctgcctccagcctggtggcccagctattaccacacttggggtttaaatatccaggtgtgcccctccaagtcacaaagagatgtccttgtaatattcccttttaggtgagggttggtaaggggttggtatctcaggtctgaatcttcaccatctttctgattccgcaccctgcctacgccaggagaagttgaggggagcatgcttccctgcagctgaccgggtcacacaaaggcatgctggagtacccagcctatcaggtgcccctcttccaaaggcagcgtgccgagccagcaagaggaaggggtgctgtgaggcttgcccaggagcaagtgaggccggagaggagttcaggaacccttctccatacccacaatctgagcacgctaccaaatctcaaaatatcctaagactaacaaaggcagctgtgtctgagcccaacccttctaaacggtgacctttagtgccaacttcccctctaactggacagcctcttctgtcccaagtctccagagagaaatcaggcctgatgagggggaattcctggaacctggaccccagccttggtgggggagcctctggaatgcatggggcgggtcctagctgttagggacatttccaagctgttagttgctgtttaaaatagaaataaaattgaagactaaagacctaaggttttgtctctttttttttttctttttttttgagacagtctcactgtgttgcccaggctggagtgcatggtgtgatcttggttcactgcaacctctgcctcctgggttcaagcgattcttgtgcctcagtca

SEQ ID NO: 9511 - DNA, 1852 bp, Homo sapiens
tgaattctttatattgaaagtgagtttttcaattttaaagttggaaaatcatctggcaacatcatgactatactaaaaaccaatgaattgtatactctaaaattgctgcaatattatgttttatgttatgtgaatttaatctcaaaacatacaggaaaatatcagctggcagtttaatggccctttccggtttgtgttgcaattcttagttgtgatggatgtgtgttcgctttacagggttgttaatcaccgtgtggatttttagagtttttgagtgtttttgaggaatggctcaggaaatctgatgtgttacttggattcctaacatctttttttttttttctcttcaagtcttgttaatggatcattttgtacttttaaaatccctttctcctctctctctccagtcttattgccagcagttttgaagatgactcccgtgtagcctcaccgttagaccagaacggaagcttcaatgttgttattaaagaggaacctctagatgattatgactacgaacttggtgagtgcccagaaggggtcactgtgaaacaggaagagacagatgaagagacggatgtatactcaaacagtgatgatgatcctatactagagaaacagctaaagaggcacaataaagttgacaacccagaagctgaccatctatcttctaaatggcttccaagcagcccatcaggtgttgctaaagctaaaatgttcaaattagacactggaaagatgccagtagtctatctggagccctgtgctgtcaccagaagcacagttaagatttctgaactccccgataacatgctttccacatctcgaaaggataaatcttctatgttggcagaattggaatatttgcctacatacattgaaaattccaatgagactgccttctgcttaggcaaggaatcagaaaatggtcttagaaaacattcaccagatctcagagtggtacaaaaatatcccttactgaaagagcctcagtggaaatatcctgatatatctgacagcattagcacagaaagaatactcgacgattcaaaggattcagttggagactcactttcaggaaaagaggacttgggcagaaagagaacaactatgcttaagattgcaacagccgcaaaggtagtgaatgctaatcagaatgcctctccaaatgtccctggaaaaagaggaaggccacgaaaattgaaactctgtaaggcaggacgaccacctaagaacacaggaaagtctttaatttctacaaagaatacacctgtaagccctgggagtacctttccagatgtgaagcctgatctggaagatgtggatggtgttctctttgtttcctttgaatcaaaggtaagattgtaattttcaggattctttaaggctaattagtcatacttgaattgtatactggcttgtaagtaactcgatttacaatctagttttgtgatatctatttgtgagggtgtatggggggtggagttgggagggaagtgtctccaaaatgtttggtttagttaataggaataacttaagatacttcatttgaatagacttaaaaaagtatgtcttgcttagatttcagtttacgatttttgcatagctgtgtttaaaaaaagtcttcgggtcttactggaattttcatcattatggattttggaaaggactaaaaatacatgaaatatttactaactctttggtgacgctccatttcttttacctcctggttttcttttatttttcttttcttttttttttttttttgagacagagtcttgctctgttgcccaggctggagttcagtggcacgatctcagctcactgcaatctccgtctcccgagttcaagc

SEQ ID NO: 9512 - DNA, 1880 bp, Homo sapiens
aggcccgaggcaggcagatcacctgatgtcgggagttcaagaccagcctgaccaacatggagaaaccttgtctctactaaaaatacaaaaattagctgggtttggtggtatgtgcctgtaatcccagctactcgggaaggctgaggcaggagaattgcttgaacctgggagacagaggttgcagtgagccgagatcgcgccattgcactctagcctgggcaacaagaaagaaactccatcttaaaaaagaaaaaaaagaaattggcacaaataatacaggtaggtagtacctgtaagaaattgacccagtagtgcacagtaaatgtcggtaagcacagtcactaagaggataaaatatgagaactgaagatttttgacctgcaaatttctgtttgcagcggctcgaccctctcctggtggtgtgttcacacagtttgtgatgagtaaagttggagccttgcagcagaagatacctggagttagcacaccccaaaccctggcagggacacagaagttcagtatcagaccttctccagtaatggtcgtcacacctgtggtttcttctgagccagttcaggtgtgcagccctgtgactgctgctgtcactactaccacccctcaagtgtttttagaaaatactactgctgtgacacctatgactgctatttctgacgtggaaactaaagaaactacttattcttctggtgccaccactacaggggttgttgaggtctctgaaactaataccagcacctctgtaacatctacccagtctacagccactgtgaaccttaccaaaaccactgggataactacccctgtggcttcagttgcttttcctaagtctttggtagcatctccttcaaccataactcttcctgttgcttccactgcttccacctccttagtcgtggtgactgcagctgcatcttcctccatggtgaccacaccaacttcatctctgggctctgttcctattatactctcaggaattaatgggagtccaccagtgagccagagaccaggtaaggcctagatgttactagctgctttattttactgtacacctatttatataactttgtggttgtgttaggattatagatatatcaggataacagtataggtatttctgttgtaacatgatacatgtattcctgaaaacctctgcatgctgcaaaactgaacactaaaattaatagagctcatggttaatacgggattgcgataaatcactgaaaatatatgcagttttataagcagaacattaataacaataactgataaccttgagagataacttgaacaatcttgactgatagtttagtggagctggagattgcgactcaaaatactaaaaaacattacaatggaagtggtggctgaaggatactgaagtaatgcaggtaagactggagctctgagccactaacatgggcatgggaggaaacatgacctgtgtgctgagagctaggggtgcacatctttgaggagggagcctcaaatgcagatgttccttttgtggggtgtggggggtgctgctttttaattagagacagatgagcagacttcatctccttttgtgtagtaaaaaccactaatgaatcagcacctatttaattgctggacatgaactgattgaaatagaaacaaggaggcatatttgtttagggctctaatatttttataaactttttagttaaaatatttcttttattggcttaggttgagtgaatttgaaataggaatatcctacactttgtgtagtttttatatccagatgcaactagctaaagtaagtggttcttttaatctactcatagaggaactaatatggaaaagagcaagagactttgcaggatttgaggggaaataattaa

SEQ ID NO: 9513 - DNA, 1645 bp, Homo sapiens
gtcaataatttgaagaactgatatttctttcatctttttgataaaagtagagtgctgaatttagactacaaatccctaagatggttatatgatatgacagagagaaagagaggtgttaacactagatctaaatgaatttttctttttttaatttttgtttttcagaaaatgacgacttatttatgatgccacgaattgttaatgtgacatcattggccacagagggaggtttggtagatatgggtggcagcaaatatcctcatgaagttcctgatagcaagccatctgaccatctgaaagacaccgtcaggaatgaagataattccttagaggataagggtagaatctcttccagaggaaacagagatggcagagtgacgttgggtccaacgcaggtttttctggcaaacaaagattctggttatccacaaatagttgacgtttccaatatgcagaaagcacaagagttcttacctaaaaagatttctggtgatatgagagggattcagtataaatggaaagagagtgaatcaagaggggagagagtgaagtcaaaggattcttcatttcataaattaaagatgaaagatctcaaggactcaagcatagagatggaactgaggaaagtaacatcagctatagaggaagcagctcttgattccagtgaactgctgactaacatggaagatgaggatgatactgatgagacactgacttcactgctcaatgaaattgcctttcttaatcaacaactaaatgatgactctgttggcctggctgaactacccagctctatggatacagagttcccaggggatgctcggcgggcttttattagtaaggttcctcctggaagcagagcaactttccaggttgagcacttgggaactggtttgaaagagttgcctgatgttcaaggggagagtgactctatcagtcccctcctcttgcacttggaagacgatgacttttctgagaatgaaaaacaacttgcagaaccagcctctgagccagatgtccttaagattgttattgactctgaaataaaggattccctcctttccaacaagaaagctattgatggagggaagaatacttctggcctccctgcagagcccgaaagtgtgtcctcaccccccaccctacacatgaagactggcttggagaacagcaacagcacagacactttgtggaggcctatgccaaagttggcccctctaggtttaaaagtagctaatccttccagtgatgcagatggtcagagtctcaaggtgatgccttgtttggcacctatagctgccaaagttgggtcagttggacacaaaatgaacttaacagggaatgaccaggaaggccgggaaagcaaggtgatgcctacattggcacctgttgtggctaaattgggcaactcgggggcctcaccaagttctgcagggaaatgaacttacttgtccttaagcagaagccaggctgtgaggggaaatagatctcacctcctttctctgcaggcatctgtttgtttgtgtcttagaacttggatccttgacttcaatgatgcagtggataatgatgggagaaagggggtagggtgctgaccctggtataagaagtactctgaaattctgatcatgttaaaatgtgttac

SEQ ID NO: 9514 - DNA, 2183 bp, Homo sapiens
cttccacaaattacgttactcaagagacagctaaaataaaatgcattatctccccagaccagagacagtggccaaaataaaaaatcatggggctggaaatttcccaaatcaaaccagcctcctggtgcttgaaggtttcattcactattacctgcacaggatgtaaagaaaagtcacagtaggcactctttaccagggaaataaggcagtatttgaatcacaagatatattttttatctgcaaccatggatccaatgatctgtagagctttttcactcattaactgtcaggatatgaaggactgacagtctgtaaagatatttatatttttgtatagttgttttcatagatttctcaaaggctgaagttttcaacctagaagatgagatttgtattgagtatagaaatgatgtttcctatctagtttgtaaataatcatggtgcacttgaggggtctcttggaaactcctagggggtcaagaatcactattctgaaactgtatagactgggatttagctgctgcattttgcctttcttaaataattatattttggaatgtaacccctgttctgtcttcattgacaggatttgcttgtgttgttaaaacactaacacaagagcttccagtgcctgggccgtgcctaggtgatgctatttcttctatatctcctgtcttctttatcccaaatcccactcagcatatcttcagacctaggttgtaagaccaactttggattggatctagccagtgaattattatttccatggttggttccctttctgttaactctggtaatcaacagattgaaaacggtggaagaacttctgaaaattgcagtgggagcaaattcttgttggttttgtgctgcttgcctttctagatctgctcatcagcacttaaccttccctcctctaaaggttactaaagaagcctgaagtaggtaaagagtgctcctcagcttcttatccttccactctttacccagcagatttcattcaatgccttagccaaggagtccagcacctgtctcccctgctaataattgtccttagagatgctagtactttaatccaggtatagcagtttcccgttattttcttgcttgtcgttcccctacatttcctcctgatttcccaagactctctttgtggcttttgagggtcagccaaggagcaggcaagtgagtgaacaatcctcaggaaaagaaggaccattttagcttaacacttccttttttttttttttttttttaagaagaatataggtaaacaggtaatgattcttgattggagataccatttgactcttgatgagagttgtacgaagatggaaatgagggatgattccaggcgttttagggggaaggctgcagataccattctaacccccaagatactgtgttctcaagacctcttagaactaggtgttgtcagggataatttgaggagggcttagtcttcagaacaatcctgcagtcttgacagaaatctaaaatctccaaaaactcctaccctttaaccttaccctagggggaactgatctatgaatattacatgtgtgattatgaaaggtgaagttgagtgagaggagttgaggaacgtggaagacagtgagctctcaccctaacactataagaagcatgatctcaatagaccaataattcacctttttatacatctgtaaataaatggaatgtttttaagaatataattatgtcagatttagcattttcttttatatattaaatatatatatctttccttttctgctttcgaaaagtgactatttttttagaaatctaagaacagaagtttggtgattgaaaggtagaatatataaacctgaaataaagcagttaaaacaattaaagcagaacttggtgttgggaggtttgtgccaacttggagtggagaattctaattccctaagacatatttgagagaggtgccactgaagtggttttatcataggaatcctttccttttctctaagtttctgatatgccatttgggggaggttttcgatgttctaatccttgtagcatgttttacatggaggcttcaaaattgtgtgcaacctgatggcaagtatttgttttagaagtcattctaaaatcattctggtgtcagtatgagcaaggcagttcacctgttaaccttggggagtaaaggtacacaaaca

SEQ ID NO: 9515 - DNA, 1114 bp, Homo sapiens
gttattgaatttgaccaagcctcagtttcctcacctgtaaaatggtgtacttgattcacctaattgttctaagaataaaatgaaataatgtaagtgggagacatagaagagtgcctgatatatagtgggtgcttccccttggtcatgttgaagggtatataccagttatgtatggcctgtgacaggcactgggctaagtcctggccaccattccctttttcgtcccattcccttccatctccttgggtaggcagaggactgctcccgaatggaggtctgattgtgttccctcggcctcttcaggtctaccccgaggtgaaggatagtaaccaggcctgcctgccccccagttcctttattacctgctcctcagacaacaccatccgcctgtggaacacagagagctccggggtgcatggctccaccctccaccgaaacatcctcagcagtgtgagccctgaggctgtggggccccgcttcaccctcagtgcccccatccccacagctattgcaccttgttactgggaactggtccctaggccttggccttccagccttcatttggctgtgctctgtggtccaagggtttgttttgctcagctttcttgccccttgcagctgtactggtcaggcctgcctcatccaccttttctaacctgttccactaggacctcattaaaatcatctatgtggatgggaacacccaggccctgctggacacagagctgcctggaggagacaaagctgatgcatccctgttggatccccgcgtgggcatccgctcggtgtgtgtcagccccaatggacagcatctagcatcaggggaccgtatgggcacacttaggtaatgccaggccctgggtgggtactgactgcctctcatggtgcagagttgggtatttagaactttagggagggtttggctcaaaaagattgggcaacaagatacttatttacaaggcaaagataataacttcacaatgagtaaacctagcagaaatcatcttcaccaagtgatcaaggttaacatcctcatatcaacatcattaagcccatgataggatgtactaagaaggatgtgacaatgtttctgtggtattcttaccaaaaatgc

SEQ ID NO: 9516 - DNA, 1122 bp, Homo sapiens
tgtggtgggggatccatctccaccagaccatttcagcggggagagggaggtgccctccaggccacgcagcaagatgggttctgtgggcagagataccgtccccagcctctctgctctggttcctgtttccagcctcagagcacagagttcagcttgtggttcctgggtcctgtgagggtccgcaggaggcctctgtgggcactggcaccttccgcttccactgcccagcctgctgggagcaggagctgagtattcgcctgcaggtagtgtgcctcgctccctcgaggtggggcccccagaacttcctccctccctctgcacctcctcccagtctgacctctgctccacctggcagagtgggcaccctggcagcatgtgtgggcccatgctggcctccccttcccgtccctcccataactctatggctgccggcgggagtttggtgaggtctttgctaggagtggaagcgtaaagattcttaggtctgcattctttgtcccctgcaggatgcccccgaggagcaactaaaggcgccactgagtgccctgccctctggtcaagtggtgaggcttgtcttccccacgtcccaggtactggcctcccagggaaggaagcaaggcgcctggatggggctgggacccaggccacaaagggaggggcctgcttcccgcttctccgtgggtcacaccctgagcaggtgctggggccaggctctttggggagtgtcctctgagcatccctgcttcaggcctggcgcctgtggagacggtggcggggcgggggtggtgcgccggggatcagggtaagaggaccagagctgggtggaggtggccgaccttttgtgactggggccttcacggttttcaggagcccctgatgagagtggagctgaaaaaagaagcagggtgagaggcctggctggggactgggcaaggccctggaaaacaaccagggtgcggggctggaggaggcctggaggagtgagggggagaaacagccgcccctcatcctcatgctctctgaaggggctcaggcttgcgctcgagggggcacgaagtactgggaggagtactgggaggagtcttagcacctatggtcagaggggcgagtgaccggcccagt

SEQ ID NO: 9517 - DNA, 1122 bp, Homo sapiens; identical to SEQ ID NO: 9516

SEQ ID NO: 9518 - DNA, 1218 bp, Homo sapiens
cagggctacggggagggtgccaaggagggcgccgacgaggaggagtgggtcgtggccaaagacaagcccgtctacgacgagctcttctacactctgtcgcccatcaatggcaagatatcaggtgtcaacgccaagaaggagatggtgacctccaagctgcccaacagcgtcctgggcaagatctggaagctggccgactgcgactgcgacggcatgcttgatgaggaggagttcgcgctggccaagcacctcatcaagatcaagctcgacggctacgagctgcccagcagcctgcccccccacctcgtgcccccctcgcacaggaagtccctgcccaaggccgactgaggggtgggctgcagaacggggtgggaactgggggacctgggcctcaggcctgctccaccactgactcaccgaatgaccttgggcaaggcactgccctctctgtgccttggtttccccatctgtagaatggggagggtggacactggaaactagatgacttctttcacctccaaaattcccttagtttctatgaaaatattgggggtaggggggtggattaggagattgaagggttgagaagaaagagaaattgtccaaagagtcctcagaacctgcctggagaaatgcgcatgggggtgggcctggtaagtcccaggaaccacaggaagtgagctaaggctcacccagagcagctgggtctccaggctgcctgggctttttgtcctcatgaacaactctggagcagctgtctgtccctcagagggcacctggaggcagcaaagattatcttatttattttattttgttttctgctatatttagagtggcaaaaaaatagagcagagggtttctgctgtctccagactgtctaccaaagagaaggcgacagatgcctcctgggtttggaagggggatgcactgtggatctgccatccattctgcagtctccagcagagcaggcagtcaggccccagcgtgcctccatcccagtgccccgatgaccatctggtcagccctcccaacctcccttccagggggcttaccagcaaagccatattcggctaggaatttggaattcacaacctttattaacccctggcaaaacttcccgtttgcatgtcaaatcacattgaagcctgaaaattagcttttcttactggtttttccaataagtaatagcaaagcccacttatcatacttaaactacag

SEQ ID NO: 9519 - DNA, 1507 bp, Homo sapiens
taggaaccatttctctaaacatttaattaacataaagtactcgtggaagatgtttgcttggatagtctgtatagaagatatttggaatatagatcattttaacctaatatacttcaacctttttttttttccctaggaacgaatgatcacacactttgaaaggtccaaaatggagtaaggaatgggaagatttgcagttaaagatggctaccatcagggaagagatcagcatctgtgtcagtcttctgtacggctccatgggattaaaggaagcaatgacatcctgatctgttccttgatctttgggcattggagttggcgagaggtgtcagaacaaagagaacatcttactgaaaacaagttcataagatgagaaaaatctacgagcttcttatttacaacactgctgccccctttcctcccagactctgacatggatgttcatgcaacttaagtgtgttgttcctgaactttctgtaatgtttcattttttaaatctgacaaactaaaaagtttaacgtcttctaaaagattgtcatcaacaccataatatgtaatctccaggagcaactgcctgtaatttttatttatttagggagttacataggtgatgggggaaattgttaactacctttcattttcctgggaagtcaaggttacatcttgcagaggttgttttgagaaaaaagggcccttctgagttaaggagccatagttctatcaatgatcaaaagaaaaaaaaaaaaagagaaactgttacagtatgattcagatcatttaaaaaagcaaaatcaagtgcaattttgtttacaaatggtgtatattaaagatttttctatttcagatgtactttaaagagaaatattagcttaactcttttgacatctgctattgtgacacatcccattgctggcaatgtggtgcacactccgaaacttttaactactgttttgtaagcctccaagggtggcattgcagggtccttaggcaatgttttgtttgcctttatgcagagaggtgctccaagtgctgtgattgagcaccgtgctagaggaactgtaatgcttcagaagttgtagcttatacaaaggaaacaggtcctgctggcttaatttaaacagttattgcatgaagtagcgtggaggccctggactgctgctcgttctttaggatggactgttctggtatctggtattggtttagagactgttaataagggacatcacaaggtgatgggattcatttgaagcactctatttctgttttaatggttttatccaattttgccttcccaagatttttgttctacataaaaagttcatgccactttttaatataaaaaaatttaacaaaattaatgtatttttctcatttttttcaaactttttctaaagactctttctgtcaaactcatgaaaaatttctttctatggcttttattctagattgtcttattttctgttaaaaccaatgaccacatgaccacaatcttcactaactcatactg

SEQ ID NO: 9520 - DNA, 2320 bp, Homo sapiens
gacttctgtccttggggaaagccattttgttaaccacactagtgagatttacatgatgcttaatggagaacagagaagatcttgttgcaaaaggtgtattaaatatttgtgctgtttctgtatgagattgagaagcttttcccacctctcacccctatttcctataaggatatccagagaagccaaactgttctgtgggtttgggaatggtcatttcccgggaaaatgcatctggatcgatgactaaacctggcccttttctctgggctgtagtgaagccgcattttcacgctggctggcagtgtgctgagagcctcgaatgctctgcggcgtagtgcccttctgccctgcctgacgatgtatcgaaaagatgagagtgaaggagactttgtgcagcaggaaacgggtaggtgaggtgttgggcagttgtgggaacttctgagagtattacagagtggtagaatcggtaagaactctgatttggacttcgctttggtggaactgtgtgcctatacctgcctgtgtgtgtgcaagtgtgcaggttcctttgtatgtatgtgtacgtgtgggaacctgtgtttgtcatatttttcttcatttcacaaaggctttttttgaagcagtggcagtatgcctttgtttcaagaacacatgaaattcttttaacaccagattagtgtgttaccccaaatgaacggttctagccctctattaagaaataaagggaccataagcattttggctgcttatggctgtgtgttactacttacaagagtcttgaaaattatacagaactttgccttctttttttaatgtcttccacaatgttgtgactgattataaccctgtttcccctcagagaagagctatggctcagggatctgtgttgactctggcatttagtggctttgtgaaggaaagaaaccattaaatgacctgacaaaaactgactcatgtctttaaagtagttgaagccacttttagaatgttactctcggttgcttttgtctaattctaatggcttaaagccaagaaaaccatagtataaatctttttgtgtacctatgctagtgtttaaatggcagttcgttgtgataaagtatcagtcacttcaagttttctgtgaaagtttttaattaggttaaaaataattttggcatacgtctctactcagtttataaagcagttccacaccatgcaaacaaaactctaacagcaaaggttatcttgacctgatgttacttgaatctgagagaaagtcattacttactactgcactcctgcttttgtgggaaaaattttcttcttccccagaagagttaacagttgagtgttcagctcctgacttacctttaatttagaggcaatattattactgtttaagtgattatttgcttaacacaggttttattttgtctttttgctggtagattatacaagggacaactttagtgatgaggcatgtggatgatttggtgggagtaggtatatacttagtggaatggtttattttatggaagagaattcattggaggtgagattgaagtatattgtgaagtgggatttgaacagcacatatgctctggtttgctcaaataactgcagtttatgcttacatctaaattttgtttctgttacctaaacgggagcttctagaattacgaaggccatacctgccacatttataaaataatggttttatccctgcccccaaatcatcaggttcctcgggtttaagagaagtggtctaatagacaggaatagaagttgtggtggaggtgatttgggatagactaggtttccttatgcaagtggatatgagctcctcatagaaaccagacctactgtattagacagtaacctctaacctcacctccaagcccaagtatatggccctgctgggttacctggtgactacatttcccagattcactctaaattcaaggtagtgacccaaataaattgggaaaggagggggtcaaggaggaaaagctgttgaaaatctttctcctatttaagagaaatatatgccctagagctgctccagcacccttggtttctgatttttttaatattgaatatggattagaagaatgaaatcagatgacacctgactgcaaaaatgtttataagcaaatagccttcttacattttggtataaagctgtgaacttcgtaactttgtaaagcaagatataaagcaaatacaagaggaaaataaagtacttttactaattgacggtttactttcgttaccttgtctgcatattcacggccagccctttccacgttggcttagcgaggaagaaggaaactgggtg

SEQ ID NO: 9521 - DNA, 1794 bp, Homo sapiens
cagtttgaccctaatcatatgtatattttattgatttcagtttgcaatttttaatttatgttcttatgatggtttaaacctatagtcaggcttttaagtacaagtttgtttaagtgccagactttgaggatcagttttaatttctccatttgtaatagctgggtatttaaactggaagcaaatagttttctttcttaacaattatgtgcagtgtgtgtcactgttttcttgctttatagatagagctggctttaagtgctaaaggacacagtagatttttgacaaacagtggctgctctgctgactatcttttaggaattcaggaagcaaatcacatagtgacaagtccttacagacaccacttctagtaaatctctgtaaatgtggatagaaagctcagtgtgaggcagtgcgtagacctaacgtctacctttacatctgctgttgaacctgggcactacctgttacagatcctgtcaggctgttgaactggaggtgtacctttatcttcctttctagtgtctgaccctgcaagcctaatgttggtttgaacccttttggtttgttcagttgccagcctccatctctcccactgtatggccgtgcctagaccgatggcagccatcgaatattcctctgggctcacggggtgttttccacccccctgcagcaactaagatggtgggggagagggggttagaataaagcatctgaatacagttttcaggacctcaagcagacttcctagagacttgtttctgagacagttctttgccttcacttccctgctagctgggaaagaagagtggagcagagactctgcctggccactgagaacagccaaattcacaaaccctcagtggggctttgtttttggattttctccggactcatcagtaaacctgtagaagtgtcgctttccagccttttgtttctggatcctcaaaactcagaacgtggccgggcgtggtggctcacgcctgtaatcccagcactttgggaggctgaggcaggcagatcacctgaggctaggagttgcagaccagcctggccaacatggcaaaaccccgtctctactaaaaatacaaaaagccgggcgtggtgggcgcctgtaatcccagctgctcaggaggctgaggcaggagaatcgcttgaacccgggaggcagagattgcagtaagctgagatcgtgccactgcactccagcctggtgacagagtgagactccgtctcaaaaaaaaaaaaaaaaactcagcttcttcagagagataaaattgggggaggagcccagggccacataccaagctttgggacatggtgcctcatgctctctgggattgcagaccatccaggtctgtcttcgcccctgttagtgcacatatatccactcacatgtcttccctcaggctatcgggcagggggacttcaccagggggtttatggataggcttcaagagggtctgtgagcccccagaaattgtgtgtgagactgagtatgtgttcttttttccaggaaaggctccagtggttcttacttgatccaaaaaatgtcaagaattaatctaggaggccgggcctggtggctcacacctgtaatcccagctctttgggaggccgaggcgggtggatcactcaaggtcaggcatttgagaccagcctggccaacatagtgaaaccccgtctctattaaaaatacaaaaattagctgggtgtggtggtatgtgcctgtagtctcagctactcaggaggctgagacaggagaatcacttgaaccctggaggtagaagttgcagt

SEQ ID NO: 9522 - DNA, 1277 bp, Homo sapiens
gatggcgccattgcactccagcctgggcgacagagcgagactccgtctcaaaaaaaaaaagtggagaatttgagacttactgaaattacctaggaaggtaattctaaatagagatttttggaaacagcatgacacatagattgcctaaattttggatgacagaaatagttcctgggtcggtgtcagggaatatgcactagagtttgaaaaaaaaaggttcacccttcattattattaacttacaggtggtgaaagaaagcataaaaagagaaccagtttctaattaggatggagatggtgtgggttgaagttataaatgagtttataatgtaagcgtttgccctcctcagatcaggggatgggggaggttcagtaaaaagggttggagtgggaaatagcggagatggataagttaaggctgcagagtgggtatgaaaatttgagtacaggtgacagaaatgagtttgtaccaaggtaatgatgttggttagttgaattttccagctaagttggttttagctgtaatcttggcttattttccagaacaacaaacgacttgagatctttgaatgccatggccctcgggcagtcagctgtcttgctacagctcaggaaggtgcccgaaaactgctggtcgtggggtcttatgactgcacaattagtgtacgcgatgcccggaatggactgctcctcagaactctggagggccatagcaaaaccattctttgcatgaaggcaagtacagtgcaagagaatcggagttgtctggcacaaatagaagggttttgaggccaggcgaggtggctcacgtctgtagtcccagcactttgggagggtgaggcagggggatcgcttgagctcagaagttcgagaccagccagggcaacatggcaaaactcgatctctacaaaaaaatacaaaaattagcgggatgttgtggtgtgcacctgtactacttatgaggctgaggtgggagaatcacttgagcaccaaagatcgaggctgcagtgagccatgattgtgccactgtactctagcatgggcaacagagtgagaccttgactcaagcaaagcaaaacaaaacaaagaagggttttaaatggcatttcccgtgttgtctcatgcatcatttagaagcaccaccttggaaagagcaaggagattgcaaaccttttctttacaccaacatcaccaagtgatgcactttcatttgagaaacaatgagtgtattttgttatactgtgggtatactcgaatgcccttctaggctgcttcat

SEQ ID NO: 9523 - DNA, 1102 bp, Homo sapiens
ccagcctgggggacagagcgagactctgtcaaaaaaaaaaaaaaagaaacaacaccagaaccactagacctgtgatagcacctgacgtttttgaataccatggtgcattctcacaaactgcttatcaaatgctcatcttttgtgggaaattagctgcagtttggatttgctaggtccttggtccatatgtcagaaagctttgccctaaacgttaattaaaattctggctgtcttacagtgttgccataagtattttctggtatggctcaactaacatatactttcagatacctcattgcctgtgactgtttgctaggcacttggtgaacatacatttactgagcatcttttgtgtaccaggtgctgttttagacatgaggatacagcagtgaactgaatgttttagcatctttttgttgaggaaatatattatctaatcctcctatatctcataagtaataatctggtctgtgcttaaactttagagtcggaaatgtattggtgtctttgagggtcatacctccaaagttaactgcctcctggttactcagacctccgggaagaatgctgccctttacaccgggtccagtgaccataccatccgctgctataatgttaaggtaggtgggtccagagaaatccaaagtggttcatattgagtcgcctttgtatttactgtgtggagtggagacactgtggcagacgcttcattctacccaccatctcctttttgcttctaaacaatgtttagcacattgttgtagccctaggtagatatgagacttacacataaaccatattttctgtctctctccaccagtattttttcacttcctactattaataatataccttccttggtctttgccataaatgttatgcatatcatatgtcaaaactaatcctagatagaataaagagaaaaatgtaggccgggctcagtggctcacgcctctaatcccagcactttgggaggcagaggcgggtggattcacctgaggttgggagtttgagaccagcctgaccaacatggagaaaccctgtctctactaaaaatacaaaattagccaggcatggtggtgcatgcctgtaattgcagcta

SEQ ID NO: 9524 - DNA, 1149 bp, Homo sapiens
tcactgctagattgtccttaccagagtcaacagaaagtttccatgagcctagccaagaactgaagttttctgtggagcaaagaaataccagaaacagagaaaactctccctcttcccaatcagctggtctttctagcataaataaagaaggggaagagccaaccaaaggcaatagtgggtctgaagcctgtaccagttcttttctaagattgtcttttgcttcagaaacccctttggagaaggaaccccactctccagctgaccagcctgaacaacaggcagaatccactttgacatcagctgagactaggggaagcaagaaaaagaagaaactccggaagaagaaaagtctacgggctgcccatgttcctgagaatagtgacactgaacaggatgttttgactgttaaacctgtaaggaaagtaaaagctggaaagttaattaaaggggggaaagtaacaacctccacttgggaagacagcaggactggtcgggagcaggagagtgtcagagatgagccagatagtgactcgtctctggaagtcctagaaattcctaatcctcagttagaagtagtagccattgattcttcagaatcaggagaagagaaaccagacagcccatctaaaaaggatatttggaactctacagagcaaaacccactagaaacgtctcgttctgggtgtgatgaagttagctctaccagtgaaattggcactcgctataaagatggcatccctgtaaggtaagaatattgtattggtccagtcagaacaactttcaccaactttatttttttaaatagaatttgaaattatgaatcagaatttctttaaaaaccaaactttatgtgaatgcagtagagattgtggatatggaaaaattaaagctcagcagtagagattttctgctttctcttttgactgtgttataaatattcactctgcttttatttcccttcattaagaaatttcagatggaaaatctaatctcttatatcattgctactttgcccattgtttagaaaaatcctttgagtcagaaatttttacttttactacctgccctgttcacacagatgctgagaacacttttgctattattttgtagtgtggcagaaactcagactgtgatctcctccataaaagg

SEQ ID NO: 9525 - DNA, 1100 bp, Homo sapiens
ttctctaataaaaacaatttttaagtcaactaacagactaaatatggattggaaagagagtgcaagcagtctaggtctagagtccaatctaagcaaaagtcctgtgtgaagacagtggtagataaaggaagaatgggaaacgagtcctagaacaggtggtttgcatgggacagatttcacctggaaaggtggtggtagaaggcggtgattagatgagacagaatgatgtgatggtacactggagcttatgagatacctccatcttagcagttctcacttttggttcctagctttgatatcattgtgcttgactaaatgttttatgaatttccaatgacctactgaggagaacataaagtcttatcctaaataatgggtatagtttagtcttctgagctgtgtgatgagagggaaatctctcgtattaacctgaaccttatgatttcttttggcagaacgttctcaggttgaccagctgctgaatatttctttaagggaggaagaacttagtaagtcattgcagtgcatggataacaatcttctgcaagcccgtgcagcccttcagacagcttatgtggaagttcagaggctacttatgctcaagcagcaggtaacagcatgtggaggatttaataaaaatggatcatctccgaaatcttgttttgtgctgccaaacccatgtctggagtcaccccaaaagcaatggcaggggagtttccacaagggaagtgccccagactgtgcctaatgggggacagttaggattccaaagaaagaagcactaaatgccagggtgatgagtccaaagcatttattaggagagcttacttacagagtaggctgcagcagtccccacaagggtgttctccctaggtatatccacagccagggggcgggatgtggagtttatatgagggtttaaggaatttggctcagggccagggccaatttctttcagtgttttgggcaacaacctagatacttttatcagtgcctgggaatcttcaaggccccaggtagggttcaagcctgctggagaaaacctgcggctggctgggtcacagagcagtcaagacactctgatttttggtcaggacata

SEQ ID NO: 9526 - DNA, 1139 bp, Homo sapiens
cattccaggcagagctccagctgttccgatttagttaccgacttgggattggctgcgccacctactcttgtttccaccccttaactttcactggaagaaagctctagactaaagattaaatgtaagcgctgtcaccaggccttctgagtgcagctggcaccatgggtgtgctccagagcaacttctgcttgctctgagccccctgccctgcctcccctttcaccatgtttcctctgacaagattttaagtacagcaattcaagaagatttctcctcctaaacgacatttatctgaagtctattgcctcttgattgctggaaaagaatcttaaaatcatttcaaaagtaacttataaacaaacttattaaaagtgatgaaaggagcattgaaattaattagcactaatttttcactgtgccaaagtgtgcagtgtccttcagaggaaacaataacagatctggtgagtgtgccatgccagtggggagaattgaatgtccctcatctccctctttccctagggacattagtcatgagtgccgagtgtgcggggtcacagaagtgggtctttctgcatatgcaaagcacatttctggccagttgcacaaagataacgttgatgcccaggaaagagaagatgatggaaaaggagaggaagaggaagaagattattttgacaaggaactcattcagttaataaaacaaaggaaagaacaaagtcggtaagtaattgattttttaaaaaaagcctatctataacagaacacagcagagaatatattttatatctttgtactggtcagcccatggcatttaaacttaggtataaagtttagcttgaggttgttgtcttactaatcaaagggcaatggaatgttttcttgaactactgtaatatcttcttaaaaaagcaaacttagtattgttcctacataagctgtagctacatatctgaaatttttgccatgttggtaactatgttgagaatggctttattggtatccaaatctttttttttttttttaagatggagtctcactctgtcacccacccagactggagtgcagtggtgtgatcttggctcactgtaacctctgccttctgggttcaagcaattctcctgcctcagcctcctgagtag

SEQ ID NO: 9527 - DNA, 2076 bp, Homo sapiens
taccatgcctcatttttctatttttggtagattgctcaggctggtctgaaactcctaggctcaagcgatccacctaccttggcctcccaaagtgttgagattgcaagtgtgagcctctgcacctggccaaaactatgtaattcattttgcatttacagcagttatattttgtaggaaatgaaaaaccacatgcaataaaaaccaaaatgaaaaaaaaaatagttaggcttatatttatttactcatgccaaaataccccttatgtattctttcatgttttttagtacatggagaggttcacagccaccaagaagaagtttgcgtgaagttctccaggactatggaaaccttacaggatactgacttagaacctctgttggaatgtggctgagtcaaagcctcctgttgttgttaggggtatctacagtaaggagatgatacttcaggagattatatttcactcaatgatcttttctcatttcagggctcttctcaaataagctaaaagaaaaaggatcaggagacaggaaaagtcttccgttttgagtcatgagtagggcaatagacaaggttctcttcaaaaccatcattagtttggctttaagaaaccagtagctagctgctatttatatggtgagggggtgctgcctggtaacagaatagctccacaccacagcttgagattttgtttagtttcactgtgtgagctttcataaagtctgttgccattccatctctgtgttaacacttcatatttttatgaaattcagataatttgtgagaggctggcatggatctaaggatttattatttttattctagtccatcagttcagtcgcagtttttatactaggactttaggatgtacataaatgtgtgactgtttgtcttgattaaaagtgcactttggcctgggcatggtggctcatgcctataatcccagcactttgggaggccaaggcgggtggctcacttgaggctaggagttcaagactagcgtggccaacatgaggaaaccctgtctctactaaaaatacaaaaattagctgggtgtgttggtgcatgcttataatcccagctacttgggaggctgaggcaggagaatcgcttgaacccaggaggtggaggttgcagtgagccgagattatgccactgtactccagcgtgggtgacagagtgagactctgtctcaaattaaaaaaataaaaaataattttttttttttaaagtacgctttgttggctgggcacggcgactcacgcctgtaatcccagcacattgggaggccaaggcaggcagatcacgaggttaggagttcgagaccagcctggccaacatggtgaaaccctgtctctactgaaaatacaaaaattagctgggcgtggtggtgggtacctgtaatcccagctacttgggaggctgaggcaggagaattgcttgaacccaggaggcagaggttgcagtgagccgagatcatgccattgcactccgactctgggcaacagagcaagactctgtctcgggggaaacaaaaaaaaagtgtgctttgtcaagagaagcaccagcagacctctaagaactgctctctaaggctgcggtagcaaattatctactattgcaggtgccttattggtagagggctctgaagagccaaaactgtatatgcaacacttgtaagataaaagggactttaataatcaagattttcttgaagatttgttagaaataatgtcttatttctggtaacctttccctttttgtatttataactctactaaccaaattacctatcaataaaccattactataatattttaaaacaacctatgtttatcaagcttactctctgagtgacagaatatactaaataaagaattttttaatgaactttggctggaagcaaggttaatcctttaaaggaggaggacaggagaacttaaacctataaatagattaggaagacatgtttcatgcttatgttcagattgtatgagtagtgaaatgccttcatgtgacataaacattttgtgatactagaactatgcttattaagagaatctgaggttgggcgcggtg

SEQ ID NO: 9528 - DNA, 1152 bp, Homo sapiens
aaaatacaaaaattaggccgggcgcagtggctcacacctgtaatcccaacactttgggaggccgacccagatgggtggatcacctgaggtcaggagtttgagaccagccttgacaacatggtgaaaccccatctctggtagaaatataaaaaattaaccgggcatggtggtggacgcctgtaatcccagctacttgggaggctgaggcagaataatcgcttgaacccaggaggcagaggttgcagtaagccaagatcgtgcctctgcactccaacctgggtgatggagcaagactccatctccaaaaaaataaaaaatacaaaaattagccaggcatggtagcatgtgcctgtaatcccagctactcaggaggctgaggcaggagaatcacttgaacccaggaggcagaggttgcagtgagcccagatcgtgccaccgcactctagcctgggcaacagagcaagactctgtcttaaaaaaaaaaaaaaaaggtgtttctgaattagaagggtcttcttgaatctgaaaatgtctatgatgattattcctgtgggaatgtcactaagtatgcagaaaagagtaacacagccagcctgacttatcctttgaaaggcctgattataaggtttgtcctcagctgttgcatctgggaacttagatatcagaaggtatcttagtctgttctgctgtcataacagaattacacaaactaagtattttataatgaacagaagtttatttggttgacaggtgtggaggctaggcagtccaagaacatggtgccagcatctagtgagggtcttgccatggcagaaggcaccacatggcaagtgagcatgagaaagatatatgggtctaaacttagccttttatcatgagcccactcccaagatagcagcactaattcattaatgagggcaaagccctccttacctaattactttttaaaggtctcataacacttttacaatgtcaattaaatttccaacacttgaactttgggggacatatttaaaccttaacaggagggctccactcactgaaaagagtcgttcatggtagctaacctgtggtttgtgctgaaaacctgctttcttcctgggagtctagaattttggtacatggtaggtagaaggtacctacgtgaccagc

SEQ ID NO: 9529 - DNA, 1068 bp, Homo sapiens
agccccttgttttgtgagtgaagttttagtggaatgcagccatattaatttgtgtacgagctgcctatggctgcttttgtgcaactactgaacagcagagttgcatagttgggacacagactttatggcctgcaaagcctaaaatatttactgtctggttctggtctagggtaatgatctaggaatagagattggaatagggactataaggtacaatgactaaaaaatggagattatgtaggagggagaggaagaggcttagtggccatttgatactggttgtcaatatgcagaggatttctgtattgaaagctcagctctccagagaagatgaacagagaggcttgagagacagacgatactaagacggtatctgataggccggtttccttacatgcttcaagaataagatgccctatgggagttggttagctacagtttggtcccaagttgagtgacgtttcccatgctatggcagcctactgtccctcagctgacctccatctgttccctcttttgttgtccacatggttgcttcccctggctgtattatcctgcccaagtcccaggtctaggggcaacttggctttactcaccatatcccggggcccattcttctgcctctctccactggctgatccctgtcccaagccaaattctctgtggcatcctggcccccagcgcaaggtgatatctccccctgctcttcacaggacgtgctctccttggccgtggggccacgggaccctgacgagggagtctccccagagcatctggaacagctcctaggccagctgggccagacgctgcggtgccgccaggtgagctgtggcatctgccaccggggggcttttttctgtgtccttgtgtgagacctgataaccagagccacactggctcagggccagttctcgcagcagtaagcatggtgatacctatggtctctctttcccccccaccccaaccgcagttcctgtgcccacctgctgagcagcatctggcaaagtgctctgtggagttagcttccctcctcggtatggttgctttccatcaaatccctctcttgcc

SEQ ID NO: 9530 - DNA, 1156 bp, Homo sapiens
ttgtacaagaaggaaaaatagagcaaaaatccaagggggagaaactcattaaaatgagctctcattttttaagctgcctttgaaacaaaagagttgaggataggagatagaatggaattttaggggggttgcctaatttttttaagcctcaattcaaagattatatagcaaaagtgaaacttcttgtttgatattttcattcaaaactttcccaccctgaagagtcattgatcagatattagattatataagaagtctgttgccagggagccagtattcatgtatatttggcttgtgtgtttatttcgtgtattgagaatgaacacctttactttgcctcattcctagtaccctccctggagttcagatttttttttaaaattttgtatgtctcgtctgattcaatctctctgcttttattttatggtcctagttgtactatcaaatccaattacttttttttaggtccccctgattttttttttttagagcaagagttcttaacatattacatttttattatgaaaaataagaaagttaggtaaaggaaagaaaagtctaactagagctattttgcaggctttagtgtttagggagagaaagaaagtgtgggttaatagccttcaagatagaagatgccctttcatctctgttaagtgtcctcctttagaaacttgagtagaaggaaaactgaccagagtagactgcttccttaagtcttctgggttccaactgtttgtaatatcagcatccaagatgatacgagggaagcacaatgctttggactgtgatttgagatttagaaataaattagatatattattgaggcttagaatcctcaaactttgtattttatacatttagccaataaggaattaatatctggggaaataaatttaggcaaatatttcttttttaatgttttattacctgcttctcctgtgttttagttcaacatttgggcttcttggcctgattttcatacaatctcaatttacgaagctgtaaagaggaagatatttgttctaatctcactcttctaataggaatcaggcaaatgaaagtctaccagacttttaaaatgggctgtttttatactctctaggtgttttgtgttgtaaagaccttattaaggtcaggtaaattggtctgcttg

SEQ ID NO: 9531 - DNA, 1135 bp, Homo sapiens
ttaaaatattattagctctaatgatattaagctctaagttacaaactataagcagttgtaaattaggtactatgtcttttcagcagtatattgttctcaggatagttgtctacctagttcaagtgccattgacatcatgcttgccctataatctaacaatctcagttattataaataatatctgtgttttaacggtgtctttgtaatgcctagctatttcactgggcatctgtaatagaaagatacgtggttttaaaaatacgcatcaaacatttctaggtctttttccccttcttcccaacaaaatagcctaattagtgtatagtattagtagtgcttcctgatgctggaatgttatttgtgttgattagttaaccctaaatactgctactattttttgttgttgttgttttaggttaaatggaaaccacccttgggaactggatgcctgtgtagctgttctaccatatcagtgtattgcaatgagtgggggaggagagcagctggatatcctgagtgttggaatcctagtgaaagaaagatggaaagtggtgagtgtacatctcagagagtgtgtgtgtgtgtgtgtgtgtgtgtgtgtgtgtgtatacatatcggggggtaatttttggtatcctgataaaaatagcatttcattaggaaatattacatacattacttatatgcctaaagcagttatttacagttatttttctatgattaagctctgtttataccctaattcttactcttgcttcgtatagtactaaatttttgaacagatgaaaaaaatacagtgtttgaaagtacaatgagctggccgggcgcagtggctctcgcctataatcccagcactttgggaggccgaggcgggcggatcacgaggtcaggagatcaagaccatcttggctaacacgatgaaaccccatctctactaaaaaaaaaaaaagcaaaaaaaattagctgggcgtggtgcaggcgcctgtagtcccagctactcaggaggttgaggcaggagaatggcgtgaacccgggaaaaaaaaaggaagtacaatgagctgctctctctttttttttttttattaaggaaaattgtaagtatacataaaaaatagacttatataatgaacctcca

SEQ ID NO: 9532 - DNA, 1170 bp, Homo sapiens
cccattgtatatgaaaccagtcattgtctttacagccaaaagaaatattaatcatacaaattataggctaaaatgagtttgtttatctcttgaaactagtacatcctgatgtgcaagtcaagatgacaggtgcttacatccttcttccaagttctgggttatgaaaaactggaggtagaaaatctgttccaaatctcctgaggctgaaacaatttcagctggccctttggctgatgggtgtgaacagttctagggaatctgtactgtggttgtccagagttagctgtgacaggcttggtcagttctaggttcacttaatcagactaacctctgagaatgtagtgtgtgaagtcaggtttagcttgatatctgcctcttctagagcattcatgttttactggttgtatttaaaataaggcagaataaataattctagctctactcagagcttctaattattgtgagaaattagaatccataatttttataaatcaacattgtctataaccctgagaaccttaaaattatctcaaaatagataaatgaaatatttctttctttcttgaaacgataggtatatcctgatcagcaaacccacaatatggacagaaagattaagaatgcagttccttgaaggttttcgatcttttttgaagattcttacctgtatgcaggtatgatcatttttctgtacatcagtaaaagaaatttatttttaaaaattgaaccgcagtctttttaaagcagattttggttttaatacaagaaagaatttatctagcaaagtagaaacaagatttaaacattgactcactcatcctgttttgatagatccttttatataccttagtttactattgctacttttttttttttttcgaagacagagtctcgctctgttgccaggctggagtgcaatggtgcaatctcggctcactgcaacctccgcctcccaggttcaagcgattctcctgcctcagtctcccaagtagctgggattacaggcatgcaccaccacacccagctaatttttgtatttttagtagaggtggggtttcaccatgttggccaggatggtctcaatctcttgacctcccaaggtgctgggattacaggtgtgagctgccatgcccggcctactgttgctacttctgttaatgtttgctgaat

SEQ ID NO: 9533 - DNA, 1195 bp, Homo sapiens
tttatcagagttttaaaaagtgatggcactataccacttaaaatcaaattctgggctgggcatagtggctcacgcttataatcctggcactttgggaggtcaaaacaggcggattgcttgagctcaggagtttgcaaccagcctggagaaaatggcgaagcatctctacaaaaaatacaaaaattagctggggtgtggtgacacgtgcctgcagtctcagatacttaggaggctgaggtgggaggattgcttgagcctggaagggagtggttgcagtgagtcgaggttgcgtcactgcactccagcctgggtgacagagtgagaccctgtttcaaaaaaaaaaaaaaaaaaaaaatcaaattctatattacttttatggtgttactttcccacaggttggaaactacacagatgttatgtattaattttgtcttttttttttttttttttacttttcctttatttgttgtagtatccaaatatatatgttttttttctaacagggagaaaaatgaaagatactattgtgtccttttcaatgatgaacaccattcatatgaccacgtcatatacagcctacaaagagctcttgactgtgagctcgcagaggcccagttgcataccactgccattgacaaagaggtttgtggtctccttttgaattgcgtttctgttttctgtcagcttcctggcagccagatgttgactgagcccttgctcagtattgtgctaggtctgaccatcctctccatttattccttacatcctaggtaaattggttagaacttcagttttgtgtgtatatcataattttaaataactatttataactttcatcttttattttaaataattagaaagttactgaatttatttggcaaagcgtaggtaagaatgtcatctcaactttagtctggtcctataattatttattgaatgaatgaataagtgtatgaattatgaaaagttggtaatttctgaggtcttaacatgatttatttaaattatttttagagtaatattaattctatggctcagtttatttaacatccatccagagcaaaatgggttcttcaagtaatataagtatataaaaggaatattaacctcatccctgcccttgggtgcagtataatctagagtaagaaatagcatgacattcgtcatttaattttttcatttttaatgtactttt

SEQ ID NO: 9534 - DNA, 1208 bp, Homo sapiens
ttggcggtccaaggaagccaagtcgtcagtccccacagactcacctcttagagatttctcaactacaaggacttaggcaaggtttcccttttgactggaaggcttgtagaaacgtgacaacccgccttccctaacactcatgtcacagcggtagcggaccgtattctgggacaaatggaactcacgacattccaaagaaaggtcagccgcaagcgaacttagcactggctacaccctcctcaattctggttggcgagatgcgctcttcccggaagtgacgcacaagtgccggcggaaggggaagtccaggagcatgggtggtttttttccccctaccgaggtccgtgaggtgtgtgctaaccaaggggcggctcacaaccgtgacagactgccattcctgagtctcttctggccatgggcccccggagccgtgagcgtcgggcaggcgcggtacagaacaccaacgacagcagcgccctcagcaagcgttccctggccgcgcgcgggtacgtgcaggacccctttgccgcgttgctggttccgggcgcggcgcgccgcgcaccgctcattcaccgaggctactacgtccgcgcacgcgccgtgaggcactgcgtgcgcgcttttttggagcagattggcgcgccccaggccgcgcttcgcgcgcagatcttgtctctcggcgctggcttcgactcgctctattttcgcttaaaaaccgcgggccgcctggcccgggctgcagtctgggaggtggattttccggacgtggcgcggcgcaaagcagaaaggattggagagacgccagagctgtgcgcgttaaccgggcctttcgagaggggggagcccgcgtccgcgctgtgctttgagagcgcagactactgcatcctgggtctggacttgcggcagctccagcgagtggaggaggccctgggcgccgcggggctcgacgcagcctcacccactctgctcctggccgaggcggtgctgacctacctcgagccggagagtgccgcggccctcatcgcctgggcagcccagcgttttcctaatgcccttttcgtggtctatgagcagatgaggcctcaagacgcctttggccagttcatgctgcaacattttcggcagctaaactcccccctgcatggcctggagcgttttcctgacgtggaggcgcagcggcgccgcttccttcaagctggctggaccgc

SEQ ID NO: 9535 - DNA, 1987 bp, Homo sapiens
ttttgaaaaatccttcctttttcattttgaaacattcttgtttacgttggcagactgatgataagggtgtttttgcaacacacctttctcaagagtaccagctggcagctgaaacatttaatttgacccagtctcaggtgtgggatctgtcttatgaatccatcaactacatctttgcttctgacagcaccagatctgaactgaggaagaaatggaatcacctgaagcccagagtgttacatatttaagctataatgaggtgaactacttctgagtatgtgtttcaatcaagttcctgccatatcccacttagtaaaacagtccaccactcctttgaagcatagcaaccaagttccttgggctctatcaccagcaccttacacatggcaggtactcagtaaatacgtgtcttcaactgactcacaagctctcaggtgcttactgggtgggacttgactgttgttgctaattaaatccccattccaccagtgattattgtgactcagcagtccttccctattagtgatcataaaatttcagggaaatcgaagtttctcatcaggaaatgttttggaattactagtataaagttaggaaagtggggaaattaggttactgccgagacctttaagccttctaaacagctttatattttattgtgcatactttaatcagactcccttcactcgctttaagtttttaaaagtattccccagccggatgtgatggctcatgcctgtaatcccagcactttgggaagccaaagtgggcagattgcttgatcctaggagttcagtagcagcctaggcaacatggagaaaccctgtctctacaaaaacaaaaaaacaaaaaaccggaaattagtcaggcacggtggtacacacctgtagtcccagccaccagggaggctaaggtgggaggagacctgatcccagggatgtttgaggctgcagtgagctgtgatgctacagcactccagcctgggcaacagagtgaaaccctgtttcaagaaaaagaaaagtattctccaagatcccaagaccattgacaccaggccacattgtataccagggatttatgtgaatgcctagggatgaccgtagtgacagataaagctaggtgctgagatctggttttgccctctttatgattgtcccatcggtactagaaagtgaagtcattgctccaattttggaagaggagagaataactggctgaggggtgagaaagacagaaatagctgcagctctcttttttttttttttcaacaaaggctctcactctgttccccaggctggagtgcagtgacatgatcacagatcactgcagctttcagttttaaaacagcttttattacattttctttgtggaagctgtatttctaccttagtactcactttctgcttggtctgaaagatacctctagtagtggcaacattgtgttaagtagagttcattgggtctcttgtaaccctacccctacataatggaccactggtgcaggcttacataaacacacatactgtggccacttcagctgaagacaagggacaaactaagatagttctgaaaggtaaaaaaacaaacaaacaaacaaaaaacaaaaacaaaattattagataccaagttatgcttgaattgctttgctctttagaatgtgtgtttttccctggtatcagaagaagttaaggctgatgacacccctaatttaaattactaaggatttctgataggttttctgtctttctgtgatatcgtaaagtatttatttggtctttgaccctgtttcctggcatactgctcctaaaatccttagagtctccagagtgatggctttttgtatctaatgagttgactgctggctggcagcccctaggggctggtcactggaaagacaaatgcatgattagagttgggactttcagtcctcccccaaactcttgggagaagggctgaaggttaagttgatcaccagtgaccagtggta

SEQ ID NO: 9536 - DNA, 1907 bp, Homo sapiens
agagttccaccagcctgggtatagtatttgttataatctagtcgtaacagtagttgagccaaatctgagttgatctgatgattccgaacactggagagaatcttgaacaggagtgaagactggcggctaaagccctgcagagagaaggactcagctgtcattccacttcagctcaccaactctccatatggaggatgggggcggagggaggagtttcttggaaaagccttgttcaaaattctacagaaccacctggccttcccacattcctatttctattagttcctaaaatgacttgtaccaaatccatacatgcatgacttcctatgaaagtactctttcatcagtaggaatttagtagctggtttccagttaatgtattttgtcaagtactggggttggggagaacccgttttgattacaagcagataattatctcagtgagatgggggttagttcaaggaagtaaggaggggggaggatgtgaggaagttagaacaacccaatgcttatttgatgggctgaataaactattcaggactgaactatttttgagcactgtgaggtggcacagtattacctgcttcaaaatcaactgataccaacatttttatctttgtatcttatctctgtacgtgtgtgtattgaggaaatgctttactgactcagaggaaagatcatgaattctccattggcaaaaccacctctgtcctttcggcaaggctgcatacttccaggcagacgcaccttcacgagaatgctcagctgggcggctccacgctcatccagtgggcctaggttctgactgaccagcgaacaaaaactgtgacagagatctaggatttcattcaggcagtgaaacacctacccgggaaacagagttggcattaggaaaggaaggaaggtacatccatgaagttaaagtgttaggagaacagtctgattaatagctgatctaattaatagctgacctcccaaatctgacaggatagacactgccacgtgcaaggcctgccagcccctcagacgcacaaaatgcgtaaaacaaatgcatcctttcctggctaagcgagtattactctcttagccctgcaccaaacctccaatctagccacatttaactcttcatttcttagacccgcagagtgtcttcctgcctctgagctgtgagtgttgttccctttgcccgggatgctcttgtttttaataccagttcaagtcccactctctcagtgaagcactcccttccccactatagcctttagtgaaccctcgtttcttgcttctttattatctgtactgttgtccacttggcaattgttcaggcctctgtgttgttactgatttttgtatgtatatatatatatatgtcttgtttttccaactagattgtgagctccttaagggcagagccatgaattatacctctttgtatccccagtgccttgcatacagtaagcactcaataaatatttaatgatgatgacctgctctgttattctgcttttccctatggatacatctatgccacataaggacagcatctacccatcacagtagttcttggttgttttcagccagccctctggagtggcatctattaatatatatcttactcttcctggtacagcagaaatagccctaaacaccagaacatttttaaaaagtctgtaacagctgtgctgtagcacactgaggaataacaaccagctcatgtcagaggaggcataaccgttccattagaaactaccagagatcatttcagtcttcctgttctttatcctggaattggaactagcttgtgagctttaaaaaaaattagtacctgggtcccactattacagggattctaatttaagtgctctgtcacctagatttttttaaagagtcccgatgattccaatgtg

SEQ ID NO: 9537 - DNA, 1226 bp, Homo sapiens
gctctgtttcctgacagttaaaaaagacctcatgctctctctctgagctgagatcacagctcacctgtgggtactccccaactcttagagctaaagggagaacgaaaggaccaactgccatgaagggacagtgaccataagcttgatggaatgaccttccgtaagataaacatgggaagcacaagtgagaacacctggaaatgttacacgttctagtcaaagacccaatattattattattattattgtcacaatagctggaagcagttccttcccttcctctggcatcactgatccctgcatggcttctcattctctaaagcaggggtcaacaaggtttttttctgtaaagggtcaaagagtaaatatttcaggctttgtgggccatttgatccatcacaactactcgcctttgctgtgagggcatgaaagcaaccatagacaatgagtaaacaaatgggcatggctgtgtttcagtaaaactgtacaaaaacagacagcaggccatagtttgccagctcctgctccagagacagcagtagaaagggtgatctttagttgataatagcagggaataagttgtcagagcttcccagtgtgtgtagaatatgtagtgatgaaaaccagatgcagtgactataacctgatgccagaacactgcattctttttcagtttggagggcgttgttcagtgaatatttctttttacttacactgatatgaatattgattaccagtgatggctgggccatattaagataacttcaacccctatggtttgtgtaagatgggtaattgggcctgcaatcttcagtatttaaaaatctaacaacttgatctcaattttttcttaaggacctttttcttggagaataatactttttttttttttttttttttttttgagacggaatttcgctcttgttgcccgggctggaatgcaatggcacaatctcagctcactgcagcgtctgcttcccaggttcaagcaattctcctgtctcagcctcctgagtagctgggattacaggcacatgccaccacacctggctaatttttgtatttttagtagaatcgaggtttcatcatgttggtcaggctggtctcaaactcctgacttcaggtgatccgcccgcctcggcctcccaaagtgctgggattacaggtgtgagccaccatgcccggcctaagaaatacttttaagtatattttcattagctagaatt

SEQ ID NO: 9538 - DNA, 1423 bp, Homo sapiens
tgctcctggctatactagagttctttaattcttaaatttgatttagaaattttatatgaatttaaaaatttgatttagaaatttgattttagaaattttatatgaatccaaggattcgatataaaagatatatgatcatgtacaaattacaatttgtctctttctgttcttccttaggacatttttattccttccccaagtctggaagaacaatcaaatgatgggaagaaagatggagatatgcatagttcatctttgacagttgagtgttctaaaacttcagagattgaaccaaagaattcccctgaggatcttgggctatctttgacaggggattcttgcaagttgatgctttctacaagtgaatatagtcagtccccaaagatggagagcttgagttctcacagaattgatgaagatggagaaaacacacagattgaggatacggaacccatgtctccagttctcaattctaaatttgttcctgctgaaaatgatagtatcctgatgaatccagcacaggatggtgaagtacaactgagtcagaatgatgacaaaacaaagggagatgatacagacaccagggatgacattagtattttagccactggttgcaagggcagagaagaaacggtagcagaagatgtttgtattgatctcacttgtgattcggggagtcaggcagttccgtcaccagctactcgatctgaggcactttctagtgtgttagatcaggaggaagctatggaaattaaagaacaccatccagaggaggggtcttcagggtctgaggtggaagaaatccctgagacaccttgtgaaagtcaaggagaggaactcaaagaagaaaatatggagagtgttccgttgcacctttctctgactgaaactcagtcccaagggttgtgtcttcaaaaggaaatgccaaaaaaagaatgctcagaagctatggaagttgaaaccagtgtgattagtattgattcccctcaaaagttggcaatacttgaccaagaattggaacataaggaacaggaagcttgggaagaagctacttcagaggactccagtgttgtcattgtagatgtgaaagagccatctcccagagttgatgtttcttgtgaacctttggagggagtggagaagtgctcagattcccagtcatgggaggatattgctccagaaatagaaccatgtgctgagaatagattagacaccaaggaagaaaagagtgtagaatatgaaggagatctgaaatcagggactgcagaaacagaacctgtagagcaagattcttcacagccttccttacctttagtgagagcagatgatcctttaagacttgaccaggagttgcagcagccccaaactcaggagaaaacaagtaattcattaacagaagactcaaaaatggctaatgcaaagc

SEQ ID NO: 9539 - DNA, 1446 bp, Homo sapiens
tgatgcaggatgagtccttccctgcctgcaagattgagttctgaaagagccgccctcccttccccaaggatccactcccccagctcctttagagaatggctactgctgagtcctttggggttgagggagatgggagctagggggaggggagggagatgtcttgttgtggggacttgggctgggctaaatgggaggggttgtccctccccatcatccattcctgtgaggtgtctcaaaccaaagttaacagggagaggatgggggaggggacaaattagaataggatagcatctgatgcctgagaaccctctcctagcactgtcaaatgctggtattgaatggggactgaggatgggtctcagagagcaacctcctccctcgtagagggagattatatccccaactccagggacctctttatctcaatctatttatttggcatcctgggagggatttccaatagtaatttatgtgacctggggcaggataccgtcagtgaggtgcccagagctgcaccctttcctccatttcccatcccccatctcctcaaccaccagggtctgagttctagcagggtcctgggggtatcccactgctatactgttctactgcttccctcagtatctgaatgtctcaatttaaaacttgaagctctttagaccaatagactggtgagaggagaaaggagcttatcccccagaccctgctttataccattcacatcccagggctgtgtccagacagcacaaaacggcaaggagagcccaagccccaatgccagaattcttccaaactccctgactctttgaagtttttactcaccccatttcaattatcctgatcccttctcatcccctgcttggcttctctgcatgtggtcatctgctgtggcttggtgtttaatgggttaaaaataagccactgcctgacatcccaacatttgacaccccagcaatgtgtgactcccccaacattccactatgccatcctgcagctgaaatgggaacactggctgcctctccaaacccgctcttggacagaggatctgggaggtggaagccaggccagaggacttggggaaaatgagatggaggaaggaaaaagggagaagctgagccacagcttaactcctacagagtgaaatgaaaacgggctgaaaataccaccccaggagaggacctcgccccaagcaagccagtgagcagccctgccagactactgccagactgagaaacccagaagctggtagtcatgtgggcttgccttctctgccaaacgactgggaaaccaaaatgagcccaccttgtgttcttcctagctccaccctccccgtgctgctgtgttctgctcctccccacgcttccctgctatagttcccagctgctgtaacggagccacctccaactctaacaataaaccaagttcattgcagatagtgtagtgctg

SEQ ID NO: 9540 - DNA, 1212 bp, Homo sapiens
cactccaacactccttcgggggctagctccttctctcctccattctcgcttctgggcctcacctcagcccaggttctcttcgcccactcagtcctgacttcacgcttccacctccagctcaggcgccccctgagcccggctacccctacgcaggacgagctcagggccggctcccagcctcactgcgccccatttcccgccccgcccgacccccaggtttcggctcaccccgggacccggccctagcccctgcccccagcccaggaccgggcccagccacgctcgcccagacactcgccgcctcggccccgccccgcgctccggccactcggcggtaacgagttggtcccgcccgcccgacgaaggcgacgcgcagccaatcagcggctgccacacagcggcccaagccgggtttgggggttgggacctccggctgcaggtccgcctgggccagacgcgcgagcgcaagcagcgggttagtggtcgcgcgcccgacctccgcagtcccagccgagccgcgacccttccggccgtccccaccccacctcgccgccatgcgcctccgccgcctagcgctgttcccgggtgtggcgctgcttcttgccgcggcccgcctcgccgctgcctccgacgtgctagaactcacggacgacaacttcgagagtcgcatctccgacacgggctctgcgggcctcatgctcgtcgagttcttcgccccctggtgagtccattctgccgaggcgggggaagaaaggcggggctgggccgggggcgagagcgcggggaactgttgggcctacgcagcgccggggcccttcattcctgtgggcccctgctgcggcgggcacatttctcattcccgggagctggaggcgcctcgccgagagcgggggagtcggtgctgatcggcccaaggaaaacccgaaggctgcgctcacgcagggcctcatccttatctcggtgctcttgtggcacttcctatttgcagagggttttgccaccccttcccccagtccaatatgtagctatatcttttctgcgtgagtcagtattaatgctcctccagtctacagactaggcatcccaaagccttgtagtggaagcggacgtttcaccaaatgcagaagtcctggatccctagggtatttcctttcatcttacctcacgccgcacagccattggtttctagccaaggtcactgagtggctgcag

SEQ ID NO: 9541 - DNA, 1144 bp, Homo sapiens
ctccatgttggttgggctggtcttgaactcctaacctcaggtgatcagcctgccttggcctcccaaagtgctgggattacaggcgtgagccaccgtgctaggctaattgggtttatttaactaaaatctctttaaactctcatgggcagtatatgtggctgctaatatgcttttacaaactcagaagtcttcctgtttgggtggggcagatcagggttctttaaaaagttacacttttaagctgatctttctgttttcagggtggccgtgaattaagtgattttattagctatctacaaagagaagctacaaacccccctgtaattcaagaagaaaaacccaagaagaagaagaaggcacaggaggatctctaaagcagtagccaaacaccactttgtaaaaggactcttccatcagagatgggaaaaccattggggaggactaggacccatatgggaattattacctctcagggccgagaggacagaatggatataatctgaatcctgttaaattttctctaaactgtttcttagctgcactgtttatggaaataccaggaccagtttatgtttgtggttttgggaaaaattatttgtgttgggggaaatgttgtgggggtggggttgagttgggggtattttctaattttttttgtacatttggaacagtgacaataaatgagacccctttaaactgtcttattttccaccagattgagaaccagatgttctctacacactatcactgttcaatagagctttcttcagtgatggaaatgctctgtaatctacactgttcagtacaggtagctacggagcatctgaaatatggctagaaactacatttttgttttgattaatttaaatagccatacagttgctaccatactggtcacggcagctgtagactgactgggtccatagttcatcacctcaaaattctttcaaaatttattatctctttctctccttacatgtttatttcccaggcctaccctggtgattagaacagctgaagggcctttcttgttaggctgtccatgccctaaggatgggttcctgtttatccttgccacgcagctgagcttactgcatgtttatatctcccaaggactgttctctgctcagaaatgccctgtcaa

SEQ ID NO: 9542 - DNA, 1143 bp, Homo sapiens
ttaacagttcttccctccccggtccccagacaaaaataaaaaccattattaagcctttataccgttcttcaaatttatcaccaattcctgcagatctaggcgccacaactttactcttgttagcagaaggcctcctggcaacacctgctgccaagactccaggggaaaggagtattagtgggagtttttattttcaatcaagggtttatcaagatttatttacagggcacttctgggaatgacccttcctgggagtttatggtgttggttgagaatgaggactaatatatttaaatatttttgcagggagaaagaactggcaaaagtcactatcaagaaggaagatctggagctaatagtgagtggtagtgcctaactagtgtatgcggaggggaggctattctgcttaatttgggttgtttcctgaaacaagcggagtcagtatatttggtggcacattaatgcctgggaacctatgtaacatgatttttttctgcagatgactgagatggagatatctcgagcagcagcagaacgcagtttgcgggaacacatgggcaacgtggtagaggcgcttattgccctaaccaactgatgcgtgctttctcaaatatacctactggattaatttatggcaataaaatttttttttgtctttttcagttttatcatcttgggtcaagtagagtgtatactatatcctatgttgtggagaatttatatgttggagactaactgaatttaagtgacccattaaaatctagcacacctgtatgaaaaatcagtgtagaagaatacctcatgtgcagatgctaggtggcaggccagtctcattcatctgactagctctcaacagtattcaaggtacatctggagtctcagcagagttactgtactcaaatggcatgtgtctccaagacagcttatgaatatctaaaaggccagctacctgcctaggagccactatatatatagatagatgtaggttatgaacccagttcataggccaccttgagttagaattttggtacctacaacatgcttgattttgagtgattaaaaaaaaataatttggctgggtgctgtggctcacacctctaatcccagcactttgggaggtcgaggcaggtagatcacgaggtc

SEQ ID NO: 9543 - DNA, 1143 bp, Homo sapiens; identical to SEQ ID NO: 9542

SEQ ID NO: 9544 - DNA, 1299 bp, Homo sapiens
tctcaaagatgaacatgattttagtcctctaaagacctgggatgatggctgggcacggtggctcacgactgtaatcccagcactttgggaggctgaggtaggtggatcaggaggtcaggagttcaagaccagcctagccaagatggtgaaaccccatctctactaaaaatacaaagaaattaatcaggtgtggtggcagactcttgtaatcccagctactcaggaggctgaggcagagaattgcttgaacccaggaggcggaggttgcagtgagccaagatcacaccactgcactgcagcctaggcgacaagtgagactccgtctcaaaaaaaaaaaaaaaaaaaaagacctgggatgactcagcgttttttgctctttgaaaataatagagccaaagattgtttggtttttgtctgatttggatgggactaggtctaggggaacaaagcactccactctaaggactttgggcaattaacaggatctctgtgatgcaggaaggaccgagtgacagttcaagaacgtgaagccgaagcattgaaacagaaggagctggagcaggaagcaaaacgcatggctgaggaaaggcgcaagtacacactcaaggtactggggagtggttgcaaggaatgagtacaagaaatagtgtaatcaggtttgtctgaggagagtaaggaagtccaagctgaattgttctccctatccagattgtcgaagaggaaaccaaaaaagagctggaagagaacaagcgatccctggctgcattggatgcactcaatactgatgatgaaaatgatgaggaggaatatgaggcatggaaagttcgagagctaaaaagaatcaagagggacagagaagatcgagaagcgtgagtaaaaagatgagcctagagttaatgctgctaatggaacaggtttctagcaggatagctctgagactcattacctactgtgagttccattctagccaccttcagagttcttgttgctttgtgagtttcctataattggaatatgagtttcacttgctacagtgaaatcagggaagagaaaaacactttgtcgatgtgtgtccataatagagtgccagccagtgctccctttagtttcctagtagacacaaaaattagtaactgttagtagttatctcttcttgtgtacaacccaacccacaattgagtgacttgaaactataatttattacttttcacaactttggaggttggctgaacagttcctctactgatttcacctgggcttacttatgtagttgcatccagctggaaggttgactgggct

SEQ ID NO: 9545 - DNA, 1317 bp, Homo sapiens
ttacttccaaattttgtgttttgaaatgtatgtttaatctaagtttgcatttaatttttcctgtcaaaccttagtttagaaccccaaatcctcttcctctaaactttcttagtgataccagcaattaatccctgtcagtttcactggtacaagaacactgcatttatgaaacaactgttcaaataaatataatagtaaaaagtaatactttacttgaaatagtgagtttttaaagaaatgcaggattttaagtggttgtgttaacaggcacactaagttgatggtgtcataaaagacattttccattcccattttggactgaaatgagtagctggtgcattcagttctgtgcagttttgctatctgccagctccctgatggcctggagcactgggacctcaggacaaatgtttgcaggaggcttttataggtagggctgtcaagcagcatcaggagcaaaaacagagaaataggctgctgtagtttatatatccccctgggattctacttcagtgtaaaattttaattttaaattttagtaaactgaaaaggataagagcattctgcttccagaacactttatcaggacaaattcattagtaactctatgatactgggcactggccaggtttcagtcaggaccctttcttctcctatcctgcataccaaccctgcacttaggaccagctttctacacttaggaccagcctgctacagaaagggaacaagcacaggtttcctcaatcttctcacattttaaaacgcttggaaggacttgactcactccgttgcagtttcccccttctggaagaattttgtttttgagaaaatgaatggaaaatcttaagtataacaatggcatatttatgaattatgcaagtgtttgaacatcagtttattatgggaagatgtgttttaaatagatacagtattctaaatggtgatgaggttttcaagctagttcacagaaaccacttagctcagggtgcccctggaaagagaagttgtgtattctaggatcctttggggaccctgaaccacaaagtcctctgggcccaagaccctctatagattaaactcttgtatcacatggagtcctgtgaatgaaatagatggaaactcctgagcacactcctttttctactcactgatttactgtgtccttggctctacccactatccatgcctagctgtcacccagtggataagagataagagggaacattcagaccacaagctgatacagaattggaggctgagttggacttatttacttacaagttccttttccggatgagcctttaactgaaaagatga

SEQ ID NO: 9546 - DNA, 3302 bp, Homo sapiens
aacatggtaaaaccccgtctctactaaaaatacagaaattagccaggcatggtgacaggtgcctgtagtgccagctacttgggaggctgaggtaggagaatcgcttgatcctgggagacagaggttgcagtgagccaagatcgcaccactgcactccagcctaggcaacggagtgagagtcggtctcaaaaaaaaaaaaaagactacatttatataaaaatattaactcctcaatatttgtgcgttcctaaagttttactagttatgtctatctggctctatttctgtttgtctgtcatctatgtctattttctaaagatttgttaaaattaatcttgcaaaatagttccacatacttttcactctttagccaagcaactaagaaatagaacactatttgtactaggtgtaaaataacaagcaggaaactaccttaaggctatgaaaaactgagacattaattggatttctgcagtgatttaaaaaataatatgttgatacaaaattattttacttacagatgatgaagaacgagagcttcaaatggatcctgcagactatggaaagcaacatttcaatgatgtcctttaagtcctaaaggaatgcttcagaaaacctaaagtgctgtaaaatgaaatcattctactttgtcctttctgacttttgttgtaaagacgaattgtatcagttgtaaagatacattgagatagaattaaggaaaaactttaatgaaggaatgtacccatgtacatatgtgaactttttcatattgtattatcaaggtatagacttttttggttatgatacagttaagccaaaaacagctaatctttgcatctaaagcaaactaatgtatatttcacattttattgagccgacttatttccacaaatagataaacaggacaaaatagttgtacaggttatatgtggcatagcataaccacagtaagaacagaacagatattcagcagaaaactttttatactctaattctttttttttttttttttgagacagagttttagtcttgtttcccaggctggagtgcaatggcacaatcttggctcactgcaacctccgcctcctgggttcaggcaattttcctgcctcagcctcccaagtagctgggattacaggcacccaccaccatgcccagctaatttttgtatttttaatagagagctaataattgtatatttaataaagacgggtttcaccatgttggccaggctggtcttgaactcctgacctcaggtgatcctcctgcattggcctcccaaagtgctggaattccaggcatgagccactgcgcccagtctacacactaattcttgttagcccaacagctgttctgttctatctacccctcatttcacgctcaaggagtcatacctagaatagttacacacaagagggaaactggaagccaaacactgtacagtattgtgtagaaagtcacctccctactccttttattttacatgagtgctgatgtgttttggcagatgagctttcagctgaggcctgatggaaattgagataacctgcaaagacataacagtatttatgagttatatcttagttcttgaaattgtggaatgcatgattgacaatatatttttaatttttattttttcaagtaataccagtactgtttaactatagccagaactggctaaaatttttatattttcagagttgaagttggtgaagacattcatgatttaaacaccagatcctgaaaggggttaaatctactttgaaatgaatctgcaatcagtatttcaaagcttttctggtaattttagtgatcttatttgattagactttttcagaagtactaaataaggaattttaacaggtttttattaatgcacagataaatagaagtacagtgaggtctatagccattttattaaaatagcttaaaagtttgtaaaaaaatgaatctttgtaattacttaatatgttagttaagaacccgtcaagcttatatttgctagacttacaaattattttaaatgcatttatcttttttgacactattcagtggaatgtgtaagctagctaattcttgttttctgatttaaagcacttttaaatcttatcctgccccctaaaaacaaaaggttttgatcacaaggggaaatttaagattgttaaccctgtttttcagaagggctactgttaattgcacataaacatgaaatgtgttttcccctgtgtactaacacattctaggcaaaattcaaacttatagtggtaaagaaacaggttgttcacttgctgaggtgcaaaaattcttaagacttctgtttgaaattgctcaatgactaggaaaagatgtagtagtttactaaaattgtttttctaccatatcaaattaaacaattcatgcctttatagggtcaggcctacaatgaataggtatggtggtttcacagaattttaaaatagagttaaagggaagtgatgtacatttcgggggcattagggtagggagatgaatcaaaaaatacccctagtaatgctttatattttaatactgcaaaagctttacaaatggaaaccatgcaattacctgccttagttcttttgtcataaaaacaatcacttggttggttgtattgtagctattacttatacagcaacatttcttcaattagcagtctagacattttataaacagaaatcttggaccaattgataatatttctgactgtattaatattttagtgctataaaatactatgtgaatctcttaaaaatctgacattttacagtctgtattagacatactgtttttataatgttttacttctgccttaagatttaggttttttaaatgtatttttgccctgaattaagtgttaatttgatggaaactctgcttttaaaatcatcatttactgggttctaataaattaaaaattaaacttgtttcactgttttgctgattctaatacatacacaaacatcacacccatgatgtaaatacattttaacactaaaatctgagtaagtttagcactcattttaagttaagctaaactaaaaaaccaaatttttttttttgaaacggagtctcactctgttgcccaggctggagtgcagtggcgcatctcagctcactgcaacttctgtctcccggattcaagcaattctcctgcctcagcctcccaagtagctgggattacaggcacgtgccaccacacctggctaatttttgtatttttggtagagacagggtttcaccatgttggccaggctggtctcaaactcctgacctcaggtgatcca

SEQ ID NO: 9547 - DNA, 1994 bp, Homo sapiens
tcttcaacgaaattcttttcaaaatcttaaatttaactgcatctgtgtagtatctctatttggcaaataaaatatgtcataaaataaaaactggtatgttttctctgcaaggtaagaatgtatgttatgaggatcatatctttgaaattttatgcctttttaaaaattgtcttttttccacgcagaatgaagatgttcgaccacacatcagagacagatttcgcttgcatgatttgctgcccccagattaagtacaaagacttgtcaaatcactgaagggggagagaatgcaggacccttttggactaagacaaaaacattgccattactgttgaaattttgcatttttgtaccccgtcttgcttttcttatctttggtgcccaataataattaagggttacagaaagagactttatctatctcagatcgaatacatatagtaggtaggctaaaacagaagagtctttagaactagtgcaactccagtgaaattttttatgtacaggacatctgcagtttataaagaattctgtttctgccaccagcagtttgacctgtagtcacacaggattttatgataataacagagatgaaaatggacttttattttctctctgtttggtgctctaagtgggtttgtagccacttttctgttactttatgattctcatttcaacaggaatggccagtaaaagttgttttatttttcctgttaaggtttataacctttttacatttttgacctgtattagattagaatttcattatgcattccttttagttgaggcgcttcatagttttctggagatagtcaatttttagttttttattatacatttgaatggccgttttcctgctttgtctgcctgcacattgtatatttgtttaaaaatattctctacttttagtctatgtaagtttcatttagaaagacatgcatttatattttgtttctgtaatattctactgtaggtgaaatcttttcaaaaatcaagagactgggtagataagaatatatgaatgactaatatacaaaagatttaaaccattgtgatggcgtatattctcaaatggtaatatcttgcaatggcacacagatttaatggataaaggtatacctcagacttcactgtgctcacaaatctttgaggagaaagtttggtcacctgtttggcttgatttagttactgctgcctttggttttctccaggaatgaagtattcagcacagtgactcagtatttttagttattttgcatgggctggtagtacctctgttatgctctcagttacaatcaatttaaaactgtataacagtcttggtacctaacagtagctatgcataatcctgtggcacagtacactcccaagccaccaatgcagttaatatgctctcatagtggtttttctatgctatatgaaaatagtcttcaagccttggttctctaatgcagctaccacaagaggttgatatttttatagtggcgtgtaatctccttttcgggaggctttttatggaaggtagaatttgtaaaagttcgtatgctttgcctctcaactgcattaacatgccacaggctcagactgtttttgtgtaaaggatgtcaaagaacggcactttttctaaagagaagtttgatattttgtatgcttgttaagaaagtacagtattggaaattaaaggtggacaactgataattgaggagtatgtcaattaattttttatgtatattacctgtttacttgtacaacttactgtacaaattacatgcagcttcattttcaaatgaatccttaaaataaggaaatctttttaggaaaacatttaatttttgtatttttgattttaaaggcatgagttatgtcaattttcagtgtattaatgaagattttaacttttcatcaggttgagtgttttcttactatattatctgttgtgtatgtagttagcatattgtgtcactgaactgtttaaaaatctagcatgtagagca

SEQ ID NO: 9548 - DNA, 1566 bp, Homo sapiens
ctcggatgtcccttacagaactagtgtttctgggaccaaaggtttttgtgtgtttgtttatgagggttgctgtaccagataagatgcccatagcacactaaggttcatgaattaactctctttcatctttagcaaagcaaagccaaaaagaagaagaaaggtgtggttcctggagggggattaaaagccaccatgaaagatgatctggcagattatggtggttatgatggaggatatgtacaagactatgaagacttcatgtgacattttatcttttcttggtgtcatctttatgttgcccacaatcccttgaacatgtagcacaacttcctttcctttcagttctgccaaatgctacaatcagaagtgcagtatcttttgtgctggttatttaaccccttgacacttaggtgctaatgtgcaaatgagggaacttggatcttgctgccaaggggttaaaattgggaacctaagttgctactaaatcatagttcaaaacctaataatgttgtcgttgttgctatctgatttcatagcagcagtcactaaattggaaacaaaaggttgcaacgtgacaaaaaaaattgtgtagtatttaccagcaccattcagtaatacagccttaaccatacctccttgaactacttcataacttgtcaagaaaagcagtttgcagcaagggcatgtggtgtgcacctagtattaaaattgctttgtcttaaaattgaacatgaggatattaaaaatacattgtgaagaagactgcttatctcagagtgaagatactgcggctgaaaagcactagtttgatataaaattaaaatgaccaaaaccctccaactttgaagctaaagaaggtaaacctttccattattgcattacatgttgtggaatctctcgagtgcaaagactgtctagttatttatcaggctatttctactgatgaactgcttcaggtgggggagggaaacttatttttatttgcctgatttaagtgtctgagaaacaaatctttgttctcttaggctgcaatggaacaactttaccagggttttggcatttcctttcctttcctttataaaacatgctcagcaaactgcaccagttaactacagtttggtaaattgttatgttaacaattatgacatctgcaatgttttataaagcaactaatttaataaaatcactgttgtgaggacttaaattttgtgttacctcccaagagatactttttgagagtatagaacacagctcttgggagtacagttctctacgttctctactaaatcttaataaatgcttgacatagttacagctttaaaacatgagtgatttgccaggtccttatgttgtcaccatagagcaacaaaggtatagggctgccttcctcttatttatttggggacattattttgttatttagataccaaggcctaattaattaagtacctataagaactatttatttggagtaactgagcctgtaactcaggtttatggctgttaagtatagattggggaatctttattatgtcttctcctaagcagtttaaccaaatgtgtggt

SEQ ID NO: 9549 - DNA, 1204 bp, Homo sapiens
caatacagatcaggtatttctgatgaaaatttagtatgcaaattaagatgtgctctaagtaaaatatcagactttgaacatttatagaagaaaaaacataaaatgtctcagtttttatactgactgcatgttgataatactttggatagacagtattgggttacataaaatagtaggtttacctcatctcttggccagtgctgttggaaaatagcagtgcctctgggcctggcccagagcagatgttcagcaggtattgttgaagaacttggtatcaggttctttattgtggcatcaacttcatagtcatctggttgttataatgggggcttgcctcagttttcagtcttcttctgttatacctacaaaattggagtgataaagtctatagctctttcccaacctgtgctttaaatagttaggcatacttacaaaactggcattttcttttaactctaactaaaagacatttttgatgttgtggatggtacatatgtagctcatgtggatttagcacttcacaaagaagacatgtgtaatgagcagcaacaggagccagccaagatttcttcatttacttcactgaaagtttctcaagacctcgatgttgcagtgattgtcagctcctccaactccgcagttgctcttaacttaaatttgtatttcaggtatgtagatgactgcagtttctaatttgaggtaaatagttagactgataagaggttaaaaatatcctcgttagttttttttttttaactagtgtttctttttctattcagttagatcatgttctagctaatacattgtaaagtagttactgaataatatgtataactgaccactggctaccttttatatttttacatgttcatcaaagttttgattttgatttgatttatatatggtttatgtcatgtaaatcaaaattacacaattttaaaccacagtttagcacttaattgtatagacatgttatttccctaattttctcatgtttcccatagagtttataagctccttgagaacccaagttcatgatttgttctttaaattcattgtcaatgactttttcttccagtttaccttagctttccacctccacagccataccctaggcattatcaatatttgaagtcgtccctcccccaagtcactactttttacatctcagtctctgaccacaacttcccaaactttccagctt

SEQ ID NO: 9550 - DNA, 1103 bp, Homo sapiens
cggtggctcacgcctgtaatcccagcactttgggaggcggaggcgggtggatcacgaggtcaggatatcgagaccatcctggctaacacggtgaaaccccgtctctactaaacaaaaatacgtggtggtgggcgcctgtagtcccagctattcgggaggctgaggcaggagaatggcttgaacccgggaggcagagcttgcagtgagccgggatcgcaccactgtactccagcctcggcgacaaacaaacaaacaaacaaaaaaaacagcgcgctgcagatggagccagcacccgggcttctcgctcccagccccctcccgaagccccgccccgcctccgggtctggaggaggctgggaagccccgcccctccacgctagcgccgcccaggctggcacaaaggaggaagcctagtcccgcccctgcgtgcggcgcttctcccaggccccaccttccatccagtgccctggaccctcggctgggtagcgccaccagagcgaccaaacgtcccgcgccttccaggccgcactccagagccaaaagagctccatggcggcggcggccaagcccaacaacctttccctggtggtgcacggaccgggggacttgcgcctggtaagctgggaaggagggtgggaagcataccgatcctgcctcactctcctctgagcccagccatagtcctggcttcccacttccagcctggcgccggccccgcaccttaagcgccctggctgcccagatcccagctggttcccctcggggtgtgggggcagcaggtagtggctgttgcgaagggcagggatctagtcgtgtgcctcccggaacctagccccgtggctggcacgtggccggtgcccaggacggttgcaaactgtttgaatgaagctttctctctcctttgccagctgcagattcatagtccagcctcttgtcattgacctttccaaaggaaatgctaaggctgtctgaattatcggggcagaccgtgcagagcagagaaaggggggccagaggacacttagaaacagcagaacttgtatttaactcccttgcttgggactgataaacctcccttgcaggattatgatgatcacaagagt

SEQ ID NO: 9551 - DNA, 1732 bp, Homo sapiens
tggcagacgtggcagagtgagcgggtgggtgaggggtgggggcaattgcaaataggctctgtacccctgaatcataagccataaggtcctttcctgggttgttggcctgtaaaattggctttgcagaaccacagtgctatcaataaatacggccaagctgatctagtgcttggtagtttggggcacctggctctttcctcttgaaggttgaatataatgctcgtgctcttttacaggtggccagtggcgatttcgatgcttgcgtccaagtctgtgaatgtaaaacccctcgtcacccataggtttcctctggagaaagctctggaggcctttgaaacatttaaaaagggattggggttgaaaatcatgctcaagtgtgaccccagtgaccagaatccctgatgttaatgggctctgccctcatccccacagtcttgggatctcagggcacaatggctggacatgggtgggctctgatgcagaactttctcttttgaatgttaagaataactaatacaattcattgtgaacagaagtccttaagcagaggaattggtgtgccttaaagatacaatctgggatagtttgggggaacttgtagccagaatgccctgttcatgctgagcaaagttcagcaagtagagcagagtttggcaggcaggtgccaggaactccccttcttcctggagtgccttcattgaggaaggaaatctggcccttgggtttcctggttccactgctactgacccagaggggaatgagggctgagttatgaaaagataacttcatgaagacttaactggcccagaagctgattttcatgaaaatctgccactcagggtctgggatgaaggcttgtcagcacttccagtttagaacgcaatgtttctagagacatattggctgtttgttttgatgataaaaggagaataagaaaaggcatcactttcctggatccaggataatttttaaaccaatcaaatgaaaaaaacaaacaaacaaaaaaggaaatgtcatgtgaggttaaaccagtttgcattcccctaatgtggaaaaagtaagaggactactcagcactgtttgaagattgcctcttctacagcttctgagaattgtgttatttcacttgccaagtgaaggaccccctccccaacatgccccagcccacccctaagcatggtcccttgtcaccaggcaaccaggaaactgctacttgtggacctcaccagagaccaggagggtttggttagctcacaggacttcccccaccccagaagattagcatcccatactagactcatactcaactcaactaggctcatactcaattgatggttattagacaattccatttctttctggttattataaacagaaaatctttcctcttctcattaccagtaaaggctcttggtatctttctgttggaatgatttctatgaacttgtcttattttaatggtgggttttttttctggtaagatttagacctaaatcgcatcatgccaacttgtgactttgagactattcatcaagaatgaggatatagtagccatgacatagcttgagctatagcctttaattccttactttggctatgggtggagggtgagtttgaagaggttctgattttcttgtaacctgggaaagccatgaccttgtgcccgattctttcagattgctttgggtaataaatattggtggtggtatctgactcatgctgctgtttatgg

SEQ ID NO: 9552 - DNA, 1181 bp, Homo sapiens
gcctcccaaagtgctgggcttatgggcatgaaccactgtgcccagccaaaaagaatccttttgtaaaatacagaaacactgcaaacctttgtaaatcttttttttttttttttttttttttttttaatgagatggggtctccctatgttgcccaggctggtcttgagctcctgggctcaagaaatccttccacctcgggctcccaaagtgctgagattacagggtgtgagctaccgcacccagccatgaaaacttctgtaaatcttaactatcgtgttctgcttaaagtgaggtacacataaagtttcctgtgctttgtttttgtaggaaaaagtacatagtttgtatctttaccttacggagtctatgagatttgagaatttgatttcactttttgtaacttaacccacagaaaaggacattaacttagcagataggaccaaggactgaatgacttctgacaaaaagcgtttggtctatccttcacttgttgagctacaaccatgcattacacttctcagctgagctctcaaagagctctatgccctgtgaaaagcagtggctgagttggatgaacacatagcattattaattttgcactgggaaaacagattatgacaggaccacagaccacaatataaaaacttggcagttctttggtgtgatatattttaattagtatttgcaaataatcagagttacttgtgtacataaacgtgtgtttcacaactatggccagatgcaaccttttggtctgtttcaggaaaagacctattattccactaacaattatgctgccttagaaacataatgggagtgtaattgaagaaagcatgtctcagaaggttttgatatgcagaactggaagctattgtaattcctacatacatttccattagctatgccttatgtaatgtgagtgcagatttttacaacttagagttcccatcagtgtttttttgccacatcaccgggtttcttattttactgttttcttttcaactttgggtgctttatttccattctctaaaactaagtttcttgctcttacgagacttagtgttccttttgaacccaggtgttccacctgacagtgtttgtctttcatagactttccagaatagacatagtcaagatcagacacgtgagcttctctctcattttaatgtgaggaaaatcat

SEQ ID NO: 9553 - DNA, 1222 bp, Homo sapiens
cctgtagtcccagctacttgggaggctgaggcaggagaattgcttgaacccaggaggcagaggttgcagtaagccaagatcgtgccactgcactccagccttggtgacagagcaagactccgtctccaaaaaaaagaaaaaaaaatttcttgaagtggaatgatgtacaccaaatacccactttatagataattacagggatggtgaaaaattagtaaatagcttcacaaaagaggcagcgtgatacctttagtgttttctagaatttttttctggatattatatgtaagaatttattgtttgagggaaatacgaggtttcattgtttaaaatcaagagtgtattgtttactgttttacagtattatttaatatccaactggtctccaatctccattacatagggactgtacagagcctgtgaagatgtatgaatggtatcttttataatccacaatacatttctggtaagatggaatcactacctctgatcacatatcaggctaacgatagagaaagcattaggtttaagttgagggctaagaactggtttgtttaaaggtttaaattgttggaaaagagcatttgccttctttaatgaatgatggtctcacaattcagttgactttgacctaatatttaagaatataaatatattttatttgaaaggctgagtgttgccctcaaacacttgctaaaactgcctagggcaggattcattagggcttgcagacaatgtcacctaaattgctgaatgtactcattataatatgatatctgacaaaggtagtacagcgtttctgagtcatttgggaccaactgcagtggttgtttaaaatgctggttcctgcacacaattctctatctactgaagcacatctgttttctttgtttgttttgctttgctttttgtttttaaagtttcccccagtgattccagtgcacctgaaaagttgagaaccacaggcttagtggtacgttggggtttcccacgctaggctgcatagcattataacctgggaacgttaaaaaaaatacagacattcttgattcttagtgtagttatgatgtggatcctacgtattttttaaaaaactctccagataattttgatgtcacgagtcactagtatagactatctatctagtgagttgtattataagcgatgaaatactttaaaagctacccagtaactcttgggattaattttatgaaataaattc

SEQ ID NO: 9554 - DNA, 7573 bp, Homo sapiens
ccacaattaattgtatacatggatttaacaattgtgtaatctattgtatattaatgcagttactttaagcgaagccttacgagtttacttttttcaatggttgaattaaaaatacatcttattgatgaaataaaaccgtaaagcaaagaattgaatatttttttgagtatatgaaagtggctaatatcaataagtattaaagatgttaattaaaatatcagagagttggactctaagattattaaaaattagtttgtgttctgttataattttatagttatcttaactgactttccttgactgaaccaacagctatgttcaatgggcagtttttatttgatagacctatgcatgtgaaaatggtgagttcctgtatatcacttcaacctccaacctcttcagatcttttattggctctcttctacattacagttctttgtggtaatatgttaaccatattataaactttcttgcaattaggatgacaagtctgttcctcatgaagagtaccgttcacatgatggtaaaacaccacaattaccacgtaagtaaaagctattatgagaaacaacataggctttttttggtttgttttattatgtgctaagcaacactttgtttttgtgcctacatcctagtttctcacaatttgggattagtttggagttatgaagatagtttggcgctattgattaggaagactgagaagataagtgttacgtgccattttttttttctctttggtaacttttcctgactaatcagcaatacattctaaaatgtttggtaaatttatacacttgaaggaaaaaaagtcctctgtaatttcaccatctgtgggtaacctcattataacatttttgtgtattttcttctagcctgctatgtatattttttacatagttgggaacaaaaataattttgaattattttttgtttaacattagagtataagcattttttcatgttgaagattcttttcaaatatttttattggtagtataatagtctatcatatagatgttccataactatttcactgttctgtattttaggtgttttaacttttcttttgagtaaccacagagtaacacatgcctttttgttcacaaatctttgtaatgtttttgagtacttccttcagacagatattctgaagtagatttacagttctcatgggttagtattatcaaattgttttccaaaatgactataacagtgtaatatacttattgtattatgtgtctcagtgcctctgtgtctcagtgcctcctttgaaaagtggggagaataatattgtctacgtcatggggttgacatgagtattacatgaattaatatatgtaaagcacttagaatcattttggcataatgtaaacactcaataaatattagctattgtttttactatttcactgcatcttctctggtttttaaagtattcttataagaaatcttaaatatacagacaaaagtaaaattactcatatagttatcatatgccatatttgttgtagatttttttctttaaaataaataaaattttatggtaaaatggagcttccccatctcccttgcccatctttcaacttatgccttatccagaggaaacaacttatggatagagtatttatcatttaggttttaataatttgactacacatttgtacatccataaacatagggaattgttttgttggatttaaaattttgtttgagtgatatcataatgtattatgtaacttgcttttttttttaaattgtttttgagattcatttatgttgatagatgtagctctagtttcttcattttaactgctgataccacattttatacatttttctgttttttaggttattttaatttttagttattgtgtattaagttggaaagtatttgctattttttatcagaattatatgttctctttatatttgctagaaattatgtgtaaaactggccttcctctgttgtttctgggaagtttttaactactgatggtttatattttctgtcttttttttttgagtcaatttttgtaatttctatttttctaaggattttttctgtttttgttcattttcaaatattttggcttaaattatctcttaagtttttgctacatctatgtttctgttttaaaaattctgaatgcaatttttatttttttcttggttaattttgttagaaatttgtcggttttaatagagtattcaaataactgaatttggatgttttgtatttctaatttctgcacttagccttattattttttccttctatttattggggtttagtgtgtttttgtcctaactccttaagttgaatgcttacttcaaattggtagcttttcctttctaatataagcatttatgactataaagttagtacatgggttttgctatggagcatttttatgatgggtcagtttttagagtatttaaaaattaccattatgggccgggcatggtggctaacacctgtaatcccagcactttgggaggcccaggcaggtggatcacttgaggtcaggagttcgagatcagcctggtcaacatggtgaaaccccgtctctactaaaaatacaaaaaaaagtagccaggcatggtggcgcatgcctgtagtcccagttactcaggagactagggcaggagaattgcttgaacctgggaggcagaggttgcagtgagctgagatcgtgcccctgcactccagcctgggtgacagagggagactctgtctcaaaaaaaaaaaaaaaaaattaccattatgatttcttattgagccatgtattatttgaaaatggaagttttcaatttccaaatgtatgagtttttttttttttcctttgtactttttcattttaatgtggtcagagaacatggtttatatgtgagtgtgattctttggaattcatttggacttatggatggcctaccatatggcacatttttcttaagtattctgggtacagttggtgagtgcagtgatctatatgtgttcattaaatcaagtttgctaatcatttaaattgtcttagatccaatactttttctgctgtaacactgtttatcttattatcttatgtgtctggtaaaattgcccaatagaatagtggatttgtctactttttcttgtttttacttaaatatttttaagctagcttagtaggtgcatctagattagaattgatatattttcctagtgaattaaaaattttattgggtgattttttttctctagtagttactttgagtctttggtctcattttaatgtaagtacagcagctttattttgtttagtacttgcctggtacatttttcctatttttttactgtttcaggcatgccccttataaagggtgttattgctgggcttagactttttaaaaaaatcactttgatagtttttttcaccatgaaattgaagagttcaatttcttcacatgtattggttcatttggattaatttccattatattgtgtcttatttttttgtcttacaaatacttattttactcctatcttggattcttctggatattttaatatttctgtgaagcctgaagttaatataattattcttttatgtaatagtagagtgacctttggatacagtcactttcctactgaattatactatcattgctcagcattttagttctgtattattagttctgtactatttttttttctgtcctgcaaattagacaatgttatttaccattttcttgtgtcatcactcctctgcttttatagactctggcactaatttttttcccctgaagcatatatgttagaagctcttttaagtgaggatcttttattagtaaattctctcaattttgggttttaaatgttttcaaagatagtttaacttgtataaagattgataattattttctctaagcactttgaaagtattctacagtcttcatgtttacactgttgctattaagtcagctatttgttgaatcgtcctttctttataagtaatctgtccttcctgtgcagtttgtgcagtttgacagcaaagaccaaagtcttaaaatcagctacatgtcattatgcaagcaacctaaggtctcaaaaatttcctcttctatggacaatagatgtggaaacacttaaggtgccatataaatataaataaatatttatatcaatgagaaaactaggtaatataatatttgccttattcagtgttatactttcatggttattgactttttagtttgatttgaaccatttaaaaagtaattatcaaattttaagtgggtctacaaatttgggcaagatactcattttcagatatgtgtgccatatataaggtgatatgatattattcaaaatcctctaggtattttattattcctctcagtgtacctttaagtggggtataaggtgtactttgtattatatcatgttttatttcataaaacacttctcattaataaatggttttatagtcgggcttcagtgtgctactttctagacaaaaacaagaaccagtgcttttatatgaaaatttgcagaaattttacagatactactacaggtatatagctttttaaaaaattttattgccaattagttaatcatatatggatctttgtaatgattgttctcatttttgttttaggtggtcttggaggcattgggatgggacttggtccgggtggacagcctattagtgccagccagttgaacataggtggagtaatgggaaatttaggtccaggtggtgagtattctaacttcctcttttctttttaaatgatacatatgctagctaataaagcctccattgatgtggtctgtaataatgtttaaaggactctaattaatagttagatatttacggtgtcacttcattctgaaaaaggaatgaaaccttgagcacagctaacatgaaagagataggcagaagtcaggagggtttctttggggccagctatgttgtagctagccttttagcattttggattttgaaatgtcttgaaggcagaaggagaatatatcatctatgaacagtatttatggagtagctgaaatgctaccatatcataggcagctaaaatctgtttatccatttgggaaggtggcttttcaggtagttatttggctgctcacctggaagaactcacagttcatttttagagattggtttttaaactttggtgttaggacccttttatattttaaaatttgttgagaacccgaaaatgctttgtttatgtagttataattaccagtatttactgtattataaatgaaaaattagaaattaaaaaaattacatattaaaaaatgataaactcattacatgttaacatacataaaagttttaagaaaataaactatttttcaatgcaaaaaagaaattggtgaggagagtggcattgttttacctttccacacatctttttaatgtttggcttaatattgctgttatatctgtttctgcactttagttttttgtgatattgtacatcatatagtgtttggaaaattacaccttaaactcaagagaatgagggtaaaacatcaaataatgtcttagtagtatttggtgacttaaatagttttgacctattgaaccctcaagagtccctggaccatactttgtgaattactgttttaattgatggactaataaatgctatcagattcctattttgtcaagatgctgtagtcacactttaaattatgaggctcattatcataatcattctgatccaaacaagttttctcccttacccttagactctcacacctacctaccctctcctaaatacatactatttatattttgaaaatttttactgctcttttaactgcgatgtttagagagtccttacattctggcctgatctctaaatctgctgtaatgctatttctgtgtctatgctggaaaaaaaaaatcattgatagtagtatttctgtgtttattgtggaaaaaaaagtgaatgattacctagttcaagatattctctaactgaatgttgtgggtgttactagtgaattttgctttcttgtctgataaatgttcaaagaaacccttttgaagattcatgattagacagctgctatggcatagcactttaaaccatgcctcctgtaccctaccgcttctctagtgtttcattgtggttataccagtggtatctattttgctataatgcattatatcatcttttagtcataaaaataaaatatacttaaagtacatactgtgtattttatttgaggtatgggaatggatggtccaggttttggaggaatgaatagaattggaggaggtatgtataaagatttgtttttttgtatgtacccatcaccatttttaataaactagaaactgtgttgagaattccatgaaaaaaaagtcatggtttattgttggctcatgttctaaaggctgctagcagaaattgagcctggtacatacttaaaggaaggtgatgtgttaagaagtagctgcacaaggtagggtggatgaagagcttactggtgagatttaacatttacaaaacgtacctttcagctacatgactgacagttggatctcaaaattaatctttattccataggaatagggtttggtggtctggaagcaatgaatagcatgggaggatttggaggagttggccgaatgggaggtaggtaaatgtatgcagtgggaagtgtgtgcatatttagttttccctattattaatatttcccccctataacttaggaatgtgtgctaaaaatgtcttcagaaggcatataggcactaggggataaggacaggcctggggaatggggatgatatgtgtggcatgtgaggtaaattgggtaaatgacagactattttatatttgtgacttacgcgtcttttcataatttagatacattcctgaatgttttcaacatgtattgatatatttgaaaaggttaatttgttgcacaattttttcagagctgtaccgtggtgcgatgactagtagcatggagcgagattttggacgtggtgatattggaataaatcaaggctttggagattcctttggtagacttggtagggctggctgcatacttctccttttctttttgtaggctataatttttgaaatttggtttctctttttttgtgaaaaatcagaaaatcataatgttttatacaacttattacctgaagaaaacactttaaggattttaatatgctagctctctttttcaacatcttacatatttgaactctattttcagaagactttatgcttttcatttattgtaaatcagagcacatagtaccttgggaattttaaagtatgattatttaaaattaattagtatattatctttccatccttgtttaggcagtgcaatgattggagggtttgcaggaagaataggatcttctaacatgggtccagtaggatctggaataagtaggtttaaattttactagaatttattcagtaatatttgagtgcttgcaaagactttgcaagagtagttatcgtagtatagtaatactttgttcttatacgttaatgtgtcttgctataatttgagaaaccttga

SEQ ID NO: 9555 - DNA, 1377 bp, Homo sapiens
gctcatttgcgaacggattttttatccagaaatagaagaagttcaagtaagtattacaaaggaagatacagaataagtaatataacatcttaagtgaagaaatatatataatcttgagaatttaatatgctgtttgtaactaaatagtatatatgactaaacttattttaagcaaatttaaaatactagttttagaatttctttaaatgtttttcatgtagctattatgtagtattactttggataataagttatttaaacatactgtgaacttctaatattttattagaattttttaaagttatccagtattctaatttatggagctttttagaatttaattttctttctgtaatctcccttttgaaaagatgatatagcaagagtagaattctggctgtatttttcttaggagctggagaggaaaactgaaagaggctcttaaaaaaaactgtgaagcttactacctttctatctttcaggccttggatgacaccgaaaggggttcaggaggttttggttccactggaaagaattaaaatttatgccaagaacagaaaacaagaagtcatacctttttcttaaaaaaaaaaaaaaagtttttgcttcaagtgttttggtgttttgcacttctgtaaacttactagctttaccttctaaaagtactgcattttttacttttttttatgatcaaggaaaagatcattaaaaaaaaacacaaagaagtttttctttgtgtttggatcaaaaagaaactttgtttttccgcaattgaaggttgtatgtaaatctgctttgtggtgacctgatgtaaacagtgtcttcttaaaatcaaatgtaaatcaattacagattaaaaaaaaaagcctgtatttaactcatatgatctcccttcagcaacttattttgctttaattgctttaaatcttaagcaatattttttattcagtaaacaaattctttcacaaggtacaaaatcttgcataagctgaactaaaataaaaatgaaaaggagagattaaaggtattccttgttcttcccttctcttcactagtctaaaaacttctttttaatcttaagattctttgtgatgagggtgagaaaaagaatcctcagtttatttttccactattaatctttcttttgataaatcctctattgactgggtagaggtatgtttgtgaaagacatgtaacttggggatttgttactttaggtttgttcccttgaatttcatctcatcaggcaaattgtactagttgtagttacgagttttccctcagtgaagtagcaataggctgtaatcaagaaaatatgccatttatagagataagataaatgaaataatacttcagccaccaggtttttctgtctca

SEQ ID NO: 9556 - DNA, 1134 bp, Homo sapiens
ctagttcaaaacaaccactttctcaggcttctcatgtgtgtagctaagctaccttgtcatatgtgttgattcttgaaaactgggacgtgtatttccattgggggttggccatttatgctgacatgccatccttccagcaaacgtacgggaatgtgctttcaattgatggactactctattttttgcaaatttgtaaactttgcttctccaaatacaagtactaggttgtccatttatggtacctatttggtgctagtaaattttcaaactagatttataaatgcactgtaatatgtacacaacttagaaaccaaattacaagtattcagttccaatacttcattaatttcaatcaaccaaagttagttcagtagcttatctcagttatgagtataatacattacatgtaaattaagtgtgtgtatactgtaatcgtgctattttttatcattgaaacatttataaactagaataataatgcccttaatgtgagggtttgtaatggtgcttattaagaccaaagacttgttaaatgtatacaccaagtggtaatgaaatttcggtgactggcccacacgtgcatagaggtctgggaggaccaggaaacagcctcagtggccagaggatcaccagtgcatccttcatcacagcatgtgcaatatgccaagattaccctcggtcattcctgtcaacaaggggtcaatgtcataaatgtcacaataaaacaatctcttcttttttttagtttaccccttggctttgtgttcttgcatggatttggggttggaggggccattccggaggctaaataaagtctcctggatttaaattatcctgggtctcttacttatggcttatgaaagtaccaaatgtataaccactagaagaaaatttaacatatgagtcgatcccttgttttatccattgaaagtagcagagtctggtgtcattaacctgacttgcttgtgagaaatttagattgtagagtcatttctgaaacatgacctaattcatcttgtgacttttaaatagtcttaaataccaagttcagtcattgtcttagagcacatgaatttcattataatagatttatcatgcccccctctcaaatatacacagttttggcaagcctta

SEQ ID NO: 9557 - DNA, 1128 bp, Homo sapiens
tacttgttatgatctgtagcttagcttttaattagtatctaagtgtctttctaagaactgtgtggaaaattcagatctgtttcagcttattttgtaatcaaaaacagtgataaaaagaagaccagatcttaaagaaaataaatttcaaatgcttacttaaaagacattttgaaagttaaagaacaaggttctaaggatagaagcagttatcagtgtttgcttcaggactccacctcctctactctaatttgaccaaaaaattgtttgggcttctttaaaaaagaactgggggtggagtcagaaaattaaatgaaaggctgagggtaactaagtccaccagtgttgtatgttaaaaaatcaatgcaacttttatgtggtccacaaatgtttagtcagaagtcactgattattgtaattaattagtgttgggatgggctaaaacagagccttcaaaacttcggctagcagtggagccaccatcttagattatagctagctagcctcatttgtggaaagtgatagatgctgtctataatagtgaacagtcacccatgataggacctccaggttctgtctcatatttgcttcttacttacctcaggaatgctcttgtacatagacttatttacaaaaagctaggcacatgttgacaggtgaataactgtaaccgattgtatgactgctgcacttacatgtaaactcttcagaaacagagtcttatactggtgtgttctcttgcatgcttctggttcaggactcttgatttgagatatggatttgattgagtatccaaacttgtcctgagtgcaaaactgtttcaccttttaaaaaatacctattttgcacctagccttgagcaccttccacatagcaatgaccatagttactgtcaggaggtcaaggaaaggaactttgcacaacttgtgacatgtatcctgataatcaaggcttagaggaggaagttttagaagataagagaaagttgttctaattgtgctgaaactattagatgatttagagtatacagatatgtaggtattaattctctattcactattatttatctctgcccttctctaggagtttgtatacctgcttaggagacaataaatgagctaaatgttttat

SEQ ID NO: 9558 - DNA, 1375 bp, Homo sapiens
aaaaagcctgggggcaaataagttggttatttgctttcaagtttttaaaagtagtctttattgatagagtaaggagaactactttctaacaaaacacgtgcatagttatgacagtgatgctttaaaggaataaaattctttttttttaaagagtgatattccttttcaaaagaatactaactctcagaatgttcactttaaacgaatatgccagaacatagacagctaaatgaatgttactctgcatagtgatcatgctggaaggttatttcctaatgccagcaatctaccattgcccaaaacctgctgagtttactcttttagaattgcattcaaagttaatttgtcacacacactaaactttatgattatacattgttttaaaaaatatagtattaggaagcttgattatttttagttaccattacttggcaccaaatgaaagtttccaaaacttccacctaactttgaggtaatgcagaaagtatataactggctttgaaggcaatcccaaaagagttttaaaggttttttgagcagtggcagtatacttaggagaatgaactgtggccttccaaggtaactaccttaaaggaactcagctcatttgaatgtattgagttttggatgtatttgtttcattttttaaaaagttcacattattttatagtgtcgaaaggaagaactaggattaacataatttctttggtttttctattgcttgttattattatgtaaaaactgggtggcagttcagaaggaagattgtggttacagaagagtgacaaccaagaattttttgatcattaaatcagattttataaacagtggaaggagcatggacttaaaacaaggcatgcttattcggttttgtcaaaattttacgaaaatatgtgatatatatttatactaaaaatatataatccttagatttagaaaagcaatcagttaatgtctttagcagactaaagcagtattaaacacaggtacaagttggaaattgtagaaaacggaaagaaaacaaaagacaaaatgtctatggtagggaataaaagtttaagatattataaaattatgtgtattttctcttttacataaatcatttgtgaaaagtgtgctaaactttttttacaagagtgatattaattaggatttatttttcaatataatttggagaccctttgttatccaaataaaaatgatgagtttttgtgcctgtattcaaatatgtatgcatgtgataacccttgaaagctaaagcccttcttaacttttgagttgatggaattagaattcaaagatttgaatgaaatgatttaacctttatcctccaattcttacagtgcccagttctcctgtgctatctttgctttgt

SEQ ID NO: 9559 - DNA, 1146 bp, Homo sapiens
ctgttgtatagtgcacataaggaaagtattcttattaacataattatatttagtgctagatgactttgccatgtgtagattaccatcctagctggttttaaaccgtgttacaataatgaaatttagacttggggaatagaaaaattagattacagaaccaaagattaataattagaacacatctacgttaggtttccctcagatttcatgactaacgaaagcttagcaactacagaattggggtcattaaccaatattaggttgcattcttcttttatgttgattctatagaaattttagctttcatctgaaagaaagtaatgattatattctgctatacacttgattttgactcctccttcctcctctcttcaacccctggttttatataacagttgaatatcagtggcattttacgtatgtattcaaggttgttttgttttgtaaaaatatgtggtttttctgtcttaacagcattcactttttacgttgctacgtgtgggtttcttttctttttttcttttaatatttctttctttccaacacaggaatactctgaagatagtaactccgagccaaatgtggatttggaaaatcagtactataattccaaagcattaaaagaagatgacccaaaagcggcattaagcagtttccaaaaggtttatattcttttccatttgattctatgtgttaatttttttaatgatatgctagaacaaataagtcccaggtgattttatctcagaaatgtgttttgaatacttaattatcctatcagttagcattaggcagcacaagcaagtgtttcaaaacggttatcctgatgttttttccaatcaagctgtctatggagcagggccattgtcctgaaaaactaggatggttctggcagaagaaccaccaacatgatggtcagtaggtattatcactgcaatcttgtttcttttaggggtaaatcatacagttgtggtttcattattatgaatagcttgatttcttgacttactgatacacttacggattatttttaccataggttggttattcaggggaaaaaatatttcagaaactatataataatcaagaagtggctctttattttgctgatgaaggaactttaagcttgcttatccttatgtaggc

SEQ ID NO: 9560 - DNA, 1099 bp, Homo sapiens
gcagtttgaggaaataaaggctgaagaaagcccaggtgatacatggttaatagaggcagaaatgtaaagaggacaactctttcacaaagcctaaaatcagctttcctaaaattgtgaaagaatggagataacagagttagtcctcttacccaggaaggagctcagtgaccctgggagaactgaaactgggaaagttctcaaacgctagatgttacttcactgtgagaacacaatgctacactacaattagtaatggaaatgtaattaaccacttggcacttgtggcttgcctcagtcattgccacactcccagcctgaaaagtttaaaccaagtaactccagtgatcacaaatggcctgggtaatccagcttgtcaaaagacttgaacacagcattgatgaagatcactctgctgacatgtttgctcactcatttccaaaagccttccccagcttgtttcattttaagtacccttttctgaaaatatcaagggcctagtatatggaagggacaaatattgttcagttctggaaataagaggaagtggaattatttctgcagagatcaggaagaaatgtctttgcctggaaggaagtgggatggttggaatcccacctgaaaagctgcggaagggcatttgccagcttcctggaattctctaataaactttctcttcctagagtggtcaacctgtacttgttttcatggagcttacattctcgtggggaaagagagaaatgacaattaaaaataatttgaatggtagtgataagtgctatggaaaaaaatgagaaggaatagagactacaggtttgggtgggtactctttctgtggagtggttgaagaaggtcactctgacgaagagatctttgagcagaggcctgaaggaggtgaataaatgagaacagcaaatgcataggccctgaggtggatacttggctgtcaggtgtgaggctcagcaggatcagcatggcagagggccaggaaggaaggagaggtagtagatgaagtaaggaaggaagtggggagccacaccatataggccgtgtaggccatcggaaggcttctggctttgagaagagaaagggggcaatggaa

SEQ ID NO: 9561 - DNA, 1685 bp, Homo sapiens
ttttttacagttccaaatgagttgataaagattgttgaagagatccaaaaccagaataagccactgtttttgtgaattctttttgattttagtacaaaccttaatttctcagaaacggaacagttttaagggtgatcgttgttggttaggccaaatgttgtgtaataattatggtggactgatgctggaattactcctgtaggtataaacctctgtatgaagagaagatttctcccaggaaatctttgtacagctttaagttgtgtcagattctctgaaaacattttttagaaagcaaaatttttatatttgttcaatttcagctatacccaagtagatttacatgtatatgaagcaaatatttttaaaaatttctgtttgtacatattctgcatgttttataatttcaaaatgcatcacttacataggtatttctcccacagaaatgatgaaagtgaccagaaaaaaacaaaaacaaaacccctttactctgtaggtcattgaaacgaagtaagctggcagctggttttattggaatgacagtgttctcggaaggagcagcctacaagataacttgaatttgccaattctgcaaaatctgtgcttttttgaaaatttaagagtggggacgtgaaactgtattctgtgccttccatcatgatttccacatgaaagcactttaaggcactgattttaagataatgtttttggaaaacccaatgcatatgggtttctgaaatattttatggacttatttctccccaggaaatgattcttacggaaaaaaattgcttttgtatgtagaacaggaactttttgtattacagtgatgcaatagacatgtctaatgtaacttctacttttccttttgaaagctcagtgtctgtgctatgacttgctctcatcacaatattgttgaattccacaatgtatggacattaaacactggcagactgttcactttttcttttttttttttggtaaaatattacttcaaacccctttttcttgctttatttttcagtgttttattgctttatgaactgtttaaccctgaaatccctctaggttatctatactgtataaaaaagcaattacccttaaaactgtactctggcctacttttctattttgcaattaaatatctttttcacatatgttcattgtagacttatgtttttatcacatcttattaacacattaaaaatgttatcctactgcatatttgagccaccatatgaaaatattttatactctccacaacatgactttaaaattcctgaggtaactcttgagaatttgttaactctttcactggaattaccagtatatttgttaatgtaataaaggggtctatggtctgtcagcctgatggttactattggaagcacttaaaaaagagtttagggcaaattgaagaactctgtaaggaagaggaaaaagatctttttcaattttccactaaatttgacatattttaagtgatccaaaaactagtttttaaaaatgccaggccatattttcaatagcatgaagtgactttttctgcagtcctgaaaagtcaatagagaatgttgtttctggttacttcggtacattaatttgtcatgttaggcagggtgctggtaccacagccaggtaccctgacatgtggtgctggagcagagaagggccagtgtcttcac

SEQ ID NO: 9562 - DNA, 1195 bp, Homo sapiens
gtaatagtacccaaataacctctgcttcccttgatatctactccacggtatggttttttttgtttttgtttttatttttttattattcctcatttggcattctgggtgagttcaaacatttgataatgccaaacttccagggatcatttaaaggagtttaaaagagccttctctactagagctcctagttcatgagaagtgagataatctatctcaaggtgtctctaagaaccatgacccacattaagaggttaaaggtatgtgtttcatgggaaggtctgagaccttagtcgtatgactaatgttaacctaaatattaaatgtcctggaaggcccagcatcttatgagttaacatattaactgtttacaagatgcctgtggtacaggtgctacagtttgctgccatttatagtatagaaccttaatttcatatgctcagcattttaagacatcttgtatcctttttcttcctcaggccaacatgttatcctaaagctgagatctcaaggctttctgcttctcagattcggaacctcaatcctgtttttggaggttctggaccagctcttactggacttcgtaacttaggaaatacttgttatatgaactcaatattgcagtgcctatgtaacgctccacatttggctgattatttcaaccgaaactgttatcaggatgatattaacaggtaaatacatgtcatactttttgcattataatgctaaaaggatgatctaaccatatttactgtcttagtccattagttttctgctgctataacaaaatacctaagactagataatttgtaaagaacaaaaatttattttctcttagttcttgactgggaaggccatcgtctaggtgccggcatctggtgcgcttttttgctgcatcctcacagggtagaaggtggaagcgaaagaggacagactcgtcctgtcgagccctaaacggcacctaatcctgttcacccgggaggggagccctcatggccttatcacctctttaaaggccccatctcttaatcctgtcacattggcaacacctgaattttggaatatttgacgtgaatctggtggtaacctatgaataagtaagcattttggtgtagggctacagtatgtgaataatttcatgttgacatcaagaacccattttacctttcaaaccatagtacttaccactcagctccag

SEQ ID NO: 9563 - DNA, 1319 bp, Homo sapiens
tacacagcctattgtaaaaatgcagcaagacaacggtggtttaagtttgatgatcatgaagtttctgatatctccgtttcttctgtgaaatcttcagcagcttatatcctcttttatacttcattgggaccacgagtaactgatgtagccacataaggagacataggttataaactagttatcttttaaaaggctcagcaacacaactcttgaaatgcttatcaggataatggtagctatagctggccatttagaggaattctaggacagtgggagctgtgttactagcactatataattccggtcagtgctgacaaataacatttaacaagtattgcagtaatcatcacttacaggtaccatttatttcaaaacaacttttttagtctgctccaaagttaaaataattaactagctaagcattattattcgactggtctaaaaactattgttatcttttttttttccttttcactgttatggccttttcacatttctaaatcccatcttgatatactatgaatactctagaatgatgtaaagcagataggaatgtatgtgtacatatttattgcatacttgcacatcaaatcgatgtacatagtttaacacgtggtccttttgtgaaacctagaactcagaggattgctttttttctttcagcctattttgagttaacttcagtgctttcttagggaaatgacagggcaaagcaatttttctgttggctttgggctgtatttgtgcactaaatctttattctaaaaaaaaaaatggaaactttaatttttttaaaacgagaatttcatttacagctacattaaaatcttaatgagaaaaataatttataaccctgtgggtgttctgtctttaatattgtattatcaaatataggacagtaaaaccatagattttatatacacacgtgctatataataacacccagagtcattctttcaagactagtattctcacatattgagaatattcattctaaatattaaagtaaaaatgccgggagtcaggcatgattgcaaagtgaactgcattataaactacatctttacagagtgatgtattaagagggttaaaggagcttataatttatttaaccgagggactcagttgctatatatatagtcagtaaaacactccatataaaaataagattctaaaagtgcttcagaaagagaccaccattagcaggctctcagggagaagatgaaaggatggggttcaaattgtgaagctgacaacttttcatgttttacaattagtctaagagaccacttcttggctaaattattatatcaaatata

SEQ ID NO: 9564 - DNA, 1580 bp, Homo sapiens
tcagccgggcatggtggctcacacctataatcccagcactttgggaggccgaggcaggtggatcacctgaggacgggagttcaagaccagcctgaccaacatggtgaaaccctgtctctactaaaaatacaaaaaattagccgggcatggtggtgcatgcctgtaatcccagctatttgggaggctgaggtaggagaatcgcttgaacccgggaggtggaggttgcagtgaaccgagatcgcgccattgcactccagcttgggcaacaagagcgaaactccgtcttgaaaagaaaataaaaggttcctaattctccatttctaagaaatactaacttttttcttttctctttcttttttttttttaattgttgtgggtgttcaatgtagatctgaagaggaatgattatacgcctgataaaattatatttcctcaggatgagccttcagatttgaatcttcagcctggaaattccaccaaagaatcagaatcaactaattctgttcgtctgatgttataatattaatattactgaatcattggttttgcctgcacctcacagaaatgttactgtgtcacttttccctcgggaggaaattgtttggtaatatagaaaggtgtatgcaagttgaatttgctgactccagcacagttaaaaggtcaatattcttttgacctgattaatcagtcagaaagtccctataggatagagctggcagctgagaaattttaaaggtaattgataattagtatttataactttttaaagggctctttgtatagcagaggatctcatttgactttgttttgatgagggtgatgctctctcttatgtggtacaataccattaaccaaaggtaggtgtccatgcagattttattggcagctgttttattgccattcaactagggaaatgaagaaatcacgcagccttttggttaaatggcagtcaaaattttcctcagtgtatttagtgtgttcagtgatgatatcactggttcccaactagatgcttgttggccacgggaagggaaatgacttgttctaattctaggttcacagaggtatgagaagcctgaactgaagaccattttcaagagggacggtatttatgaatcagggttaggctccatatttaaagatagagccagtttttttttttaaatagaacccaaattgtgtaaaaatgttaattgggttttttaaacattgttttatcaagtcactgttaagtagaagaaagccatggtaaactgatacataacctaaattataaaagcagaaacctaactcactcgtcaagggaagttaccttttgaggaaagttaaagtacttttttccctatctgtatctatagcaacaacccagaacttacaaacttctccaaagattttattgattgttatatcaaatcagaatgtaaacatgaactcttgcatatatttaaaattgtgttggaacatttgaacatgaatgctgtttgtggtacttaagaaattaattcagttggattatcattatgtgatactggcagattgcagtgcaaccttatgccaataaaatgtaatttaacagcccc

SEQ ID NO: 9565 - DNA, 1225 bp, Homo sapiens
acattaagaagtatcaatttcaaataaattcttgattaatctgactaccacaagggtgaggtatgtttgaatagaagaagggaagcatcagaaatattgagtttctccattactggcatattcagaagcaacaatatattctaattctaaaaagttcttgatccactatctagtaatttatataaactgacatcacagtgtccatgaaacagctctaacttctaagtttaattcagaagtgtgtagaattttagttgcttttttaaaggttttctctaaaatgccagaatttcaaaaatgcctaacattacacatgaattcaaagatattatgaaagtatccttgatttcttacctattgctattaaatttctttgtataaaactacatcttggtccattttatcttctgttccttaatcaaagatgcctgctaatttttattttactttgtcgtttttaaaaagtcacaatttaatcttaaactttttccatttgtgttgcaggggagcctgtcacagtgtatcgtttggaagagagttcacccaacatactaaataacagcatgtcttcttggtcacaactaggcctctgtgccaaaatagagtttttaagcaaagaggagatgggaggaggtttacgaagagctgtcaaagtacagtgtacctggtcagaacatgatatcctcaaatcagggcatctttatattatcaaatcttttcttccagaggtggttaatacatggtcaagtatttacaaagaagatacagttctgcatctctgtctgagagtaagtgtcagtgaatatttaatagtggaacataatttaagctttatattttaacttctgaaatatcaataagccaaatataatcttagtttaaatattaaacaagggttctccccaccctcccttttataggaaattcaacaacagagagcagcacaaaagcttacgtttgcctttaatcaaatgaaacccaaatccataccatattctccaaggtaaatctttaatttttttctgggatcttttattatatggatagcagtcccttttgaccttcatttttgatgttgaatatttaattatccattttgtagatcaattagaattttattaacaaaactgctagtaatatttataactattttttataaggttccttgaagttttcctgctgtattgccattcagcaggacagtggtttgctgtggaagaatgta

SEQ ID NO: 9566 - DNA, 1390 bp, Homo sapiens
accactgcactccagcctgggcaatagagtgagaccctgactccctccctcaaaaaaaagaagtgataatgaggagttatatgctctttggaactgccttttatacttttctctctcatttttgactgaaatagacttttgtcattgtttattgtgtgtgtgtgtgttttgcgtatggtcctgtgccaccgattaattttttctaaatgatgtgtagagcaataataaaaaactacagttacttagaggagaaatgcaaaaacggactagaccaaataacatggtaaaatttagtgttatatgtgttttctggcatttgtagtgatttgatattgtggggtttagtggtttttgttcctttttggtccttgtgtattcttctgtaggtttggctatgaccttgttttaagtttgttatgaccttgttgccttatatcttgaaggtgtggagaaatatatcacatattatagtgttacagatttagcacaggattgttctgaacacagtaatgactgtaatcccagaactttgggaggctgaggcatgagcccaagagttcaagacccacctgtctctactgaaaaaaaaaaaaaaaaaattagccggctgtcttagcacgcacctgtagtcccacctactggggaggctcacaagggaggatcgcttgagtccaggagtttgaggctgcagtgagctgtcattgcgccactgctctctttcctgggtgaccctgtctttaagaaaataaaaaaaacaaaatgaataaactttttttatgaacaggtgtggcaaaacatgttggagatgccctcaaagaacatgcttccagatcatctcgaaagatttgcactatcggaatagctccatggggagtgattgaaaacagaaatgatcttgttgggagagatgtaagaattatttttaaaatttcttatgtttgaaattatatgtaaacaaaattatagtaagaatagtgccagtttaaaatatttatgattatattatacttttcaaattaagtttaaaaggtattttcctgaggtttacttctgaatttttggaaatgcataaatataaataattcataactataaataattaagttcataaatataaatgctgttacagtgttggcacattttgctttcagtcttttatgtgtaaaattatttcacattttccatataagctagtctttgtaattaaatttttaatgactacatgacatgagaattaattttattctcactaagactagggaataggagttaaatgctagtgttttgtttgaataggttaaagacatgtgaattggttatagatatttatcaacactgttaaaaagaattactggctgggcgcagtggctcacacctgtaatcccagcac

SEQ ID NO: 9567 - DNA, 1193 bp, Homo sapiens
tcggctcactgcaagctccgcctcccgggttcacgccattctcctgcctcagcctcccaagtagctaggactacaggcgcccgccactacgcccggctattttttgtagttttagtagagacggggtttcaccgttttagccgggatggtctcgatctcctgacctcgtgatccgcccgcctcggcctcccaaagtgctgggattacaggcgtgagccaccgcgcccggccatatctcagttttctaatctgtaaaatgagtaggttagaccagctaatcactctggtaccttccaacttgaaaaaagttttttccccattctttggtaaattttagatgtggcctgaacattctcctggaagtcagaggtcaaattatctttccattttcttttattttagtaagaatttcgcaaatgacaagtgataacaaaggcagcaggatttttcatttctctgtaaataatgtataaaatatgtgaacagaactatatctttcatctaaggccagttcaatttattaaaaataaaactaatgccttttaaaattgatcagacctttgatacttgaactaaattttgcattagagactttttaaaaattgttcgcttttgctgaataaattgcaaatagagaagcttcattgacagtcagtccctctctgcttaatgcagttatgggtcctttcgtttatggcaaatgacttacctgacaagagttaattttgcctccattgtatcaagtttgaatattttccaagaaatctgatttatttggcagactctgagagagagaacagattaagtgccgttttaaaactctgtattttcatttataataataaaatatttgccaaaatacagctgttttgtaaaattatctgcaccctcatccaagctttatatttaatagccttaatcacattttatgaagaatgttaaagaaaattttttttttactacatcgaaatgagataattaatttcttttttttttttttggaaatggagtctccctctgtcacccaggctggagtgcagtagcaagatcttggctcactacaacctctgcctcctggttcaagcaattttcctgcctcagcctcccaagtagacgggattacaggtgcgtgccaccacacctggctaatttttgtatttttagtagagacggggtttcaccttgttggtcag

SEQ ID NO: 9568 - DNA, 1141 bp, Homo sapiens
caactgtcttgctgcactaattcataagataccatatggacaatgcacgtacgtatctcttacaggaaatcttataatgttggtgtttataatttgaaacaatacaaaagtaggagtattatttgaaacctatatagtccaatatacattggacctacaggtgtttaaatttaaatttaagtaaaattaaataaaattaaaaattgagtttttcattcttattagccacatttcaagtgctcaatagccacatatgactagtagctactatattggacagcacagatatagtacattattcatcatcacagaaaattatattggactgataaacattttattacgtctcatttgttttacttaaaatcaagactttcaaaattgatatttcagtcacttcttatgactgtggttaatatttgctacttcttatatcaagtgaacattgtacttcatctgcagtgttaactattttaatctgttttttaggattgcatgtcgtggcaaaaacatggaagtgagacttatttttctctctggactgtgcatagcagtagctgttgtttgggctgtgtttcgaaatgaagacaggtatgaatactcaatgtatttgcttttagattaaggatgaattgtttcctatcttgccctgatacttattatgattattatggaatttttttgcttctatgccagaacaccagtcttgtaatgaactacttcttaaataagcagatcttatgttaatgcatttgaactcatatagagaaggaaatatgaattatgattttaacacatacactgaaatagactttaaaaatatacttaatttcacgcctgtaatcccagcactttgggaggccgaggcaggcggatcacctgaggtcgggagtttgagaccagcctgaccaacatggagaaaccccgtctctactaaaaatacaaaaaattagccaggcgtggtagtgcatgcctgtaatcccagctactcgggaggctgaggcaggagaatcgcttgaacccgggaggcggaggttgcagtgagcggaggttgcagtgagccaagatcgcgccattgcactccagcctgggcaacaagagtgaaactctatctcaaaaaaatatgtgtgtgtgtgtgtgt

SEQ ID NO: 9569 - DNA, 1277 bp, Homo sapiens
ttgataaaattaacctcatagaaagaaaattattctttaccactgcaaatgctcattttaaagttggatgccctgttttagccttggaggtactctccaaaattccaaaagtaaccaaaacatctgccttatctgcaaaaaaagatcagcctgacttcatttctcacaggatggatgatgtaccttcacattcaaaagctctgagtgatggcaatggaagttctggcattgaatggtcaaatgtaacttcatcacagtatgactggagtcagccaatagtaaaagttgatgaggaacctcttaatcttgattggggtgaagatcacgacagtgccttagatgaagaggaagacgatgctgttggtttagtgatgaaaagtacagatgccagggaaaaagataaacaatcagatcagaaggcctcagaccctaacatgttattaacacctcaggaagaggatgatcctgaaggtgatactgaagttgatgtgattgctgaacaactaaaattcagagcttgtttaaagatccttatgactgaattaagaacattggctacaggttatgaagtagatggaggaaaactcagatttcaactctataactggcttgaaaaggaaattgctgccttgcatgagatatgtaatcatgaatcagttattaaagagtattccagtaagacatattccaaagtagagagtgatctgctggatcaggaagaaatggtagacaaaccagatattggttcctatgagcgccatcaaatagaaagaagaagattgcaggccaaacgagagcatgcagaaagacgaaagtcgtggttgcagaaaaaccaagatctcctgagagtatttctcagctactgtagccttcatggggcccaaggtggtggtttggcttcagtaaggatggaactcaaatttttgctacaagaatcacaacaggtgtgaatatcacttttttttcaatcttggttatttcagtaatttcagtagctcttccagttatagctataaagctcttttactactttttactagttaatctaaatatgttcagctcctctctttataggaggcagatatttatactctatgtgtcttagactgaagttttgataataaggagtaggcttaacagcttgagagtattcttgtgtcatatttatctatataccatctacatctagcatagtacctggtacatactgggtgctcaataaatttgtgtagaatgagtgagcgaacatattccctttacacaatgtttatcaccag

SEQ ID NO: 9570 - DNA, 2051 bp, Homo sapiens
tgtatttaacattccatcctcatcaacatgatgaagcccctttcttccatctttgtagggcacattgtatataaatattttgtacataaagatcatcaaataccataatggggtatttggcttcatctggaaaattgactggagggagatgctgtctcccagccctgcttccctcgtccctgtccaagttgctgcaggcccaggttagaagattaccaacctggaggggcatgcagttcatcttacaataaaagcccattcatttaaaaactcagaaatcatcccagtgcctgtactcctcaaaccaatttccctaagggaagactggcacaccagcccaaagagcaggtgcttctcttccaacagaaacatggcccctgacagggcaccagcattagggaaaccaatgtcctccgaatagctgccatgagaacatttcagatgctcaaactgaaaattcttaaaaccaatattaagcatcagcatgctttaagtgtaagatagccctttggaatttacaaacacatgtgcagctatttccttcttcacagatatgatgtactcagccccctcctaggcactacgaagaagacagaggaagcataaaaattctggactaatataattttatatgtgtttctgagattggggagtagactgagtgccttttttacaaagaagatcccatatttaattcaagtatttatagcatcagcaaaaatgggcagagggcgggaagttgagaacactaggttctgtgctatgttacctgtattcagtagaagtgtttctggagtcaggttttaagtcatgatcctgaagcttccttcccctcttccactaatgatgcaataatagctgttttcattttaacgagcagagaactaagaggaaaggtcctagctctgccttccacttgcagcttccctttacctcctcttattgctttcatctcaaatatccctgctactcaaccaatcctaaagctaaagtactgagatgcacacaaaggaaaggtgtgagagtgcttggaagcatccagctgagcccactggatgaaaatcagacgatagggcctcctgttgtaatatactagccagagaaaagcgccaagaacttcagggatattattcactgctttattgctccctaaccctagatcagattggattttactttgtagttcaggagttaagaagtcaaattgctgaccgaggtggggaaggatgatggaaattaaaggtttacatttgtttaatggcagaactgagatttgctcagcttatctctttcccatctgtctgtaatagcaatgactgaataatcagtagaccaatggaagaggagttgcaagtttaaatttgtaacctgactctgggttctgttctaggaatagtgcatgttttagaggctttgccagttgggatacattgttgacttgggggaggatgaaggagagaactgatgacctagacatagaaaagagtagttaactaactagatgttcttctgatctcttccatggtagacattctgagcacattggcccagttagttggtatggtgaaggggcaccgtactaacagatttggagactgaaacctaatcccatcaccaacacttagcaggtatatgatcatgggcaattcattcaattgcctgccaattatagactatatagggggaagagcactggatttggagtcaagaaacctggacacttggctccacacttccttagctgggtaactttgggcaaaccgcttggtctctcaagcctaaggttcttcagctataaaatgggaataatacttcactaactacctcacagagttgtggtaagaatataatcagataactggataaaaacactatataaactggaaagcgccgtacaaatgtgagagatcagttttattatcaaatcactgttttccactgcctcttgaatcggctttattctaaccaaccattacatctttctcatcttttggagtatgggtaattgaggcttgggtgtgtcatcagggactggagttatttcagctccc

SEQ ID NO: 9571 - DNA, 2137 bp, Homo sapiens
gcatgtaattcttttgttgaagccccttggttctcaacaagtaaatgacagtggtgaatgatgggaagtaggttgttttttttttttttttaattagtggtcatgtgaactggaaatggacatttcaattttgtaaaacttataactggattatgcagaaacttgcttgttataagcaagttaccattgtaaaaactaatagggatttctaacatagtttcttttatttttctcatagtgcgtaagagacgagttgaaggagatcaccagtaagtctgcaaaggtgtaatctttggaagacttcagaagatcaccaagggctcatgttggtgacatcatgtaaaattttcctgggtagaagggaaaagactggaaaaatttttttagtgacatgcattttttttttagttgttatcaaattgtaaaatcagtaatgtgatattttatattctgaaacatttctactttctgctaaaatcaattttaatttagtttaattgaatgatttatgatgaatcttgggcaaaaaaatacaactgtaaaaaatttcacaggtcatttgtgtagaataatttgaacattgtgaggaccaatcttttttaaatcaaaagggatgttgctggtatcagaattgttattgcttcatttagacataaaacacttaagtgttttcttcactccgtgacctggagagttttccattttttaaaatacatgaacttggcaagggtgtgatttttctttatcaagagaacaaaatgccagaatgttaaaacagttaactcaaaatctagtcatctgtgtaggagctaaagcaggtctccagggagagagggtggtcgtctgtgcattccaggttactgcacttgtctgatgtgacgtagcaacacccaggtcttcttaaaacaaagtcatcagctttgccaggttacatactttatttaaaagtatagtgaggtcgaagttcattccagtgtttcattttaataatgtgggcattattaaatttttgtggaagctaatagtaaaaaataaaagctgttttcaccacctccctccccaccccccaaaaaaggcgtacagccaactcttagttatttagggtaagagaaaaaagaaaactgttaaacaatgaaatcaaagataataaatatgatagatttccagtatgaggcacttgcaaaacagtcatttaaactgatggttactgtaagtcagttggaagctggcatgtatgtaaattacttggtgttacaccatatccgaagaagttcctatgtgcagtgcagaattgcataaacagtatttaatcactgctacaaatcttccaaccaagaaggaaaactgctattcttcataaatctaatttttagtatatgcttcctttcatcttatacttttatcaatatttataaaagtcatttctataataaaagcagtctttcttgctcaaagtattaaggtgaacaattgaatagagtactgtggtcgggagactgatttgagactgcagagctgatgctgggtagagggtctggacttgtattcatgttctgtctcagggcagcccctggagcaggagatggcagaggcatttacagctgcagaaaacagggaggaatggaatctgaggtagccctggcctcaaaattcaggcctggctgtatcatttacagagatttttctggagggaaaagtctcatttctgaggaaggcaaggtggctaatcattattaattttttttaaactttttgggccgggcgcagtggctcacgcctgtaatcccagcacttttgggaagccaaagtgggtggatcacttaaggtcaggagttcaagaccagcctggccaacatggtgaaaccctgtctctactaaaaatcaaaaaagtagccgggtgtggtggtgcacacctgtaatcccagctactcaggaggctgaggcaggagaattgcttgaacctgggagatggagattgcagtgagctgagatcgtaccactgcactgcagtctgggtgacaaagcaagactctgtctcaaaaaacaaacaaacaaacaaactttttgaaattgaattgcaatatgtctgctactttggcttgggctggacagtttatctaataagcaaggcagcttc

SEQ ID NO: 9572 - DNA, 1741 bp, Homo sapiens
aaagaagatactgaaatgctagaaactgagccagtagaggatgggaagcttggggagagaggacatgaggaaggatttctgaacaacagtggggagttcctctttaacaagcagctcgagtccataggcatcccacagtttcacagtccagttgggtcaccacttaagtcaatacaggccacattaacaccttctgctatgaaatcttcccctcaaattcctcatcaaacatacagcagcattctgaaacatctgaactaaaacactcagcagacatttatctttgtattcttcatgaaatgtgttttgtctttttttattactagtgtttaagtcattttttacttgaatcagatggtgtcatttagtaaggattttatgagttcttgttttttaaaatccagactttctttttctacatgtgagatagttttcattttaactggcatgtcatttgcacacaaaaataaagactagagcaaaataatgcaacgcaggaggagaaaagaaatgcactaagacaagaacattctctcatagaacattgatctgttttacaggaaacaaaccttgccttgaaatttacacagtgagactgtacataattgcatgaaaatagctatttttttcctaagacatttttcattcatgaatattttcaagtttttcatactgtacacatttcttaaaacacatgataccagcagcaactgaaaatgaatgccgaatttggtacacatgtgttatctacctcaaggtaacaagagtatgtggcaaaacatataccacccatagtgcttcacaaaatgcacttctatttagccagcgtttattgtagtaaactattcttaataaaactcactcactgtttataaatgttctggtatgcattctttatagtgaagtgttaatacatcacatcttatttattttagcaaatcagtatattttctgtatttaattataaaaaattaacttagtttttaaaatttatttgcaaatatactttactttttccatttggcactatggtttgttgcctacctagctgcatctataatgtcagcttatcctaaggctgtccacgtacttaatttacttaagtgttcattttaagtaacgtgctcactgtgtataggaatttgtattttggaggtgcttgatctatctacaaagaaaaattaattaggaattactttattataaaatgctcctagaagtcttaattgtgtttattttttaaaaaaacaaatgttagacttgtgtgcatggaagtaattaaggtacatcattattgtagtttgaaagttgtacatgataagacattttgtttttactgtatgtttttactgaatgatctattccccatcccaaggcaagcatgaataaaattaggttaaacgtagcatgtggcatcgcagtctcttagaatttgtttcatctattttattttattgaatactgtctgtatctttggttatcctgtttgaagaaaaaggacaaataaaacatggccagcaaatacagctcctgtttcactcttgggttaatgaaaattttctgctagaatgaaaattactaccagaatcactttgaattatggccataaattgctagtctgaaaggctgagaaggttcaagtcttttgacttaaaccatcacatattagaatggaataaagctttataatatttcaaaactgttaggtaaaatgtgtagttgaaactttgaactgtgcagt

SEQ ID NO: 9573 - DNA, 1170 bp, Homo sapiens
ttttaaaggcacaggtgtttcttctccaggtcttgcctggtgagtcctttccctttctccttgagaatcctgaggtttcaacatgggaggaggtgaaaccctcctacattgcaggtgggaacatttaataacgtggccacacttcactgcctgactgccgccatcatgggtcgcatgcatgctcctgggaagggcccgtcccggttggctttgccctatcgccacagcatccccacttggctgaagttgacatctgatgacgtgaaggagcagatttactaagtggccaagaagggcctgactccttcacaaattggtgtgatcctgagagactgacatagtgttgcacaagtacgttttgtgacaggcaataaaatcttaagaaatcttaagtctaagggacttgctcctgatctccctgaagatctctaccatttaattaagaaagcagttgctgttcaaaagcatcttgagaggaacagaaaggataagaatgctaaattccatctgattctgatagagagctggattcaccacttggctcgatattacaagaccaagcgagtcctccctcccaattggaaatatgaatcatctacagcctctgccctggtagcataaatttgtctatgtactcaagcaataaaatgattgcttaacaacaacaaaaaaacccaataacgtagccactgtgaaaaacaggttagtagtttctcaaaacattaaacagagttaccatgtgactcagcaattccactgctagatggaattaaaaacatgtccacacaaaagcctaaagttcatatcagcattattcataatagccaaaaagtgcaacaacccaaatgttcatcaactgatgaatggataaacaaagtttggtatgttcaaatagcggagtattactcagccataaaaaaagaatcaagtacagacatatgccacaatgtggacaaaccataaaaacactatgttaaatgaaaaaagtcagacacaaaaagccatgtgttgtctgattctattgatatgcaatgtccagaataggcaaatccatagagataaaaagtaggttaatggttgccagaaggtgagggaagggagaaattgggagtgactcctaatgggtatgaggtttctttatgagatgacagaagtgtctggaattaaaga

SEQ ID NO: 9574 - DNA, 1308 bp, Homo sapiens
gtttcaccatgttggccaggatggcctcgatctcttgacctcgtgatccgcccacctcagcctcccaaagtgctaggattacaggcgtgtgccaccgcgcccggctgacccttttaatttttaagagtgttcaatccgagatgaatcatttgaagtatttttatatgtatatctatttaaaactaatatattattaaagcttaattgccatgccgtttatcttctctgaaagaacttcaaatcttacctgccaacatattcaccataatttttttattttttaatacctttcatacaataacttttttaaaacaacctcagattgaaaaagcaacctaaattactttcgctctctaatcagcatttcaatgtatttatttttaaattttctcaaaaagtaactaaaaaattgtgtcggaccctacttttgagaaatctacgtttcccaagttttatgggaactggctattccttgtcccggcacaccttctcattccttcctttcagagcctaaaacctcatttgataagcactcctagtctctggcctgtggatccagtgctattctgtcaccaacctaagaatcccaattgcaccttctgtttctgacagtcacaggtgacagctgtgattctataatacagactggtgtcttagaggtaggaataatacatgattatgaagcatcaccctgctaatacataataatgtctttttatattataagtgattgagtttagttcatttcaatacattgtacatgaaaaaatgaaaagtagaactttgtaatactttaatcaataaaattaattaccaaatgaattgggtcagattctttcattgcgaggagatgacatgtctcttaagtgtacaagttgtatgcctttctttacggtcatactgaaagatgctagaatctttatagattcataatatctcatttaaagtatattaaaatgtttagagaagaagtaaatatgtcataagtgctggcttaggctgtgtctccagggcgcttccacactgtcagaatgaggggctacttggcagagaattggcagggtttctgatcctgagctgcggcctccatgccctttctagaccttccccacaccatgaggagccatcactgttggttttcggcttccataactcaggatttatgcctgttttatagcacttaccctggactggaagccagaaatgctgcccatttcctctgtaggcctgtgagccccagagggcaggtgccacatcctcctcatccctgccttcatcctactgctgatgaggtgggaagagaactga

SEQ ID NO: 9575 - DNA, 1149 bp, Homo sapiens
ccttggtttataccaagtcccctggggcagagagcagagaatctggaggggcaaacggaatccctccagcaatcccacctaaaaaataattcagggattcagagagcttgtgagcaaaaagaaaaatgaaaaacattcaaaatcaagcacagaatcaaggcaagatgactctccgaggaacctaatgtgaaatgattactgggatattaatttttgtgttgaacttcctagcagccatggcagaggggaaacctgtgtatagacacatgtggtatatgtctacagaggtcgactagaaggaacagtgccccagatgcccctggggtccacttcacgttcctgtcccagagcttggcactgatgctacctgcatatcttgaatgaatccaggtgcccatcttactagtcagagaagagatgcagtattctaatctgggaaaatgtttgtttttaggtttcaaggaggattttcagatggacgtttttaaaatcctggcagccatcctacatctgggcaatgtgcagatcaccgcggtgggcaacgagaggtcctcagttagtgtgagatgctcatttgttttacttttcctttgtctaagggtcatagtggaactggctcgcagctgacctgcctttgctttttagcaccagatatagtcggcctcctgggtagactggtttaacaggaggcaggcggcaagggtttccagggcttgccttcaaagagtaaagcctcctccccttgcaacagtagaggaggggaaatggatctcctgtgtgcttttcttttattcaaaaagtatgtatgaagcacctactaagtgccacggactgtcatagcatctggggaaacagcagtgaacaaaacaaagcaagaagcccttcagggagcttatgatcaagggtagggaggagacacaacaagcaaatatgggctctggcagctgacggctggcacagaggaaagtaaagcagagggggcatgcagaggtgctgtgtctttcatgtggggtggtcagagaaagactttctgagaaggtggtgggtggcagcctgcaggggatgaagaagcaggttgtgcctgtggatgggggaagaacagcaagtgcagaaacccgcaggcaggagatgtcatttgaaaaacagcac

SEQ ID NO: 9576 - DNA, 1398 bp, Homo sapiens
ggattcatatgactaacgtttcctcagtattgtaatgcttgaaatatttgaaagaaaaaatgttgttttttagttgaaactggtatatataattcagtgcttggcaggttagtatatttttatgcatttttcagagtcagcagtttcaaatcttattgttatcatgttataaaattttagcccacatttcaggctccgtaaatcatttgagccattattttttcccaacaaatggtgaattttttctttaaatgtggatatatatgttgtaatttatgattcctggttatgtatttttgtgggatcctgcagtaaaattgacttttttgtgtctttgggagatttaaattgcgctaacagtgttgcgcaaaaatgagttcatgccatttaacatattgtattttaattattaactgtattaatttactatgaaatggacatccttttaactaaaatggaattgaacattgcagttttcaaatatttttccttgttgggtctggaaaaggaattctactttgatctgcatagaaaattttgatacaattttttgaaagttcttaggtgaaacatttacccattaaaaaggaagcagaaatactgagacatgaaaggcattatcaactaactctagactctagaacccattctagcatatctcacgtgcaatttttaaaaataagttaataattcatctcatatcaacaaaagcctttgaaacatgggttttcactagatatcacctagtgctaagataaaaaccaaaacaatatcagaattacatttatgctctaaatttgtagttgtccattgttgtgcttagtaaatgtgtgtcattaatgctgtattctcctagctattatggaaacttgtttaaataaagatatggatataaagagtttttgtcagtgtcttataagcaaatccactgcacattttaaaacaacaaaacaagttgttttcctgaagactagtgaatgtaaatataatccctccccatgagaatattctaagaagtcttggaaatttaaaagttgacgagttcccctcctatactggacaccctagtaatatatatgataaagaagagaactgccaaacacttaagcaaacagaaacagctgaagaagaggtagtgtcttttcttcaagggaaagtcatgcctaaatatattggaattctctgacagagaaatagacataaccaagggaaatttgatatgcataatctacttagattttcaaaagattgagggtgtcatttgtgtcaaaagttctacttttaatatagtgggacagtagacattttttggcataagacatagatcaaagaagtatgcagatgtgcttttttgggtaaggaaacagagcagttattcagatctgtggtggaattagt

SEQ ID NO: 9577 - DNA, 1154 bp, Homo sapiens
ttgttgtgagaaataactttcatggtaaccctaggaaaatgggcacctgccaccatcctgagaagtcctcacacaatgccctttctctcttacacacacacacacacacatacacacacacacacccccgtcactaattcatagagttccttagcaggcatagtcaaggatcctctgggtaatgtcagctgcttagtgataaaacagagccaaaactagtgcatcctgttgaaagtaatgcagaaacagtacctgggtccagatatgctttcctgcggcgctttcctctgttacctcgtttcatcctcacagcagcatggacggtaggtggggtcgcttctacaatcatttctgatgatagcttgggaatagagataggggcagtgacttgcctgatgtcgcacagccctctggctgtcctgctttcccatatggagcagtggtggtgtgggcacctgtgatgcaggagactttaaaaatgtcgtgaggtcacgtgctgcccctcctggtacgtgtggaatgcccctggccagcaaggggtgcttttttatcagagttggcagctggcatgtgggaaccgagcaagtgctgcgtaccaagttacttgttttaaggagaccaagtgctcagcgccaggtggttttcttttttgtcatagttacttgctataactcagcttgacttctgtcatgaatcagtgctctctgggaggatgcaatactctgtttgggcattaattggtagcaggttgtctcaaccaaaaagacaggaaacagcaaaagcctctctgaaattaagaggaaagttactctccccacacccatcagagtctttattggagccaccaggtgagctgtgcagcctggacaggcctgcagctataggccaccttcccagtttaggtcctcagcacaggggagcccaagtcactgggtgccttccgagggctgtcactgggcaggccatatacaagtcagtgtgtgcgtgggcactgcagtgtgtgcatgccgtaggtgttgatgggtgctaggaggggtgtcgtgtgcatgcgcgttgaagaggatctgtattgccgtgacctctgttcatggatgagtgcattgtaatttgttctcaggctgtgctgtgagggccgccttaacccttgctccctt

SEQ ID NO: 9578 - DNA, 1191 bp, Homo sapiens
actgaaaatacatttttaaagagaaagtactgattatctcccaaatgagaagtcattaactggaaatctccctagaatactttcatcactttggaaacaaagataggctctttcgtgctgtgttatctttatagcaacactcatccttaaccaactaggtaccgtgagtttacatacaggagaatgatggaaggaagggaggaaggaaaggaggagaaaaatgtgtcttcagctggcagcatttattttaaatccttagcactgagtttgaatggtataaaaagtataacttccatagatgagctgttgttaggaaggcaccaaagaacctcctctgcactaaacaggagaatggaaagaaaagtctccattgagtacatatcatgtcagtttagtaatcaattatgttgatattgttaaactggttcaaagaaataaactggcaatatgtaaagtaattcctcatttgtgtcactatgatatagagatattaaaggaatgttggtttgctaaatagtatagatgtccatttgtactatagtttactgagcattttaaattgctgctacatactgtcttcttaaaatgtaagtgatattaggcactacaataagtttctcttgtcaattctgtttacaattcaatcagatcacagttttaactggattatatgcaaatacctacagattcacctgcacaagtagcagacactggaaagtcatgtagtaatatgacaaaatgcttgacatttaggggtaggattagacaaagtggctattgttgatgtcattatttattcaggatgtattacattgatgtgctcattaattttccctgggtggatattgcgtcagggtacagtgttctgtgaagtgacttatttttaactaccagatctgattccttcagtgcatattttcaaccttgacaggttttctctcttcttaatttattaagaattaatctcggctgggcgcggtggctcacgcctgtaatcccagcactttgggaagccaaggtgggcggatcacttcaggttaggagttggagaccagcctggccaacatggcgaaaccctgtctctactaaaaatacaaaaattagccgggcgtggtggcacttgcctgtaatcccagctactcgggaggctgaggcacgagaatcgattaaacctgggaggcggagattgca

SEQ ID NO: 9579 - DNA, 1150 bp, Homo sapiens
gactgatttttataggaaaggaggaaaaataatggaaacacatctcattattttattgtcacatttcttttctttgttatcttttgagtgtttcccttttttgccagtagagttattgtctattttttctttctataggacaaaaaaactaatacagactcctttatttttatatggatatactaggattgtaattcagatatttaatatcttttatcagtgttcagatcatagattaatggagaaaacatttaaaattgttttaaatttaaatacattgaactctaacatagatgaaaaatgtgtttactgctttcagtcgacctgataaaaagcaacgtatggtaaatattgaaaactccaggcatcgaaaacaagagcagaagcaccttcagccacagccttataaaagggaaggtaaatggcataaatatggtcgcactaatggaagacaaatggcaaatcttgaaatagaattggggcaattaccttttgatcctcaatactgattcacaattgagttaaattagacaactgtaagagaaaaatttatgctttgtataatgtttggtattgaaactaatgaaattaccaagatgacaatgtcttttcttttgtttctaagtatcagtttgataactttatattattcctcagaagcattagttaaaagtctactaacctgcattttcctgtagtttagcttcgttgaattttttttgacactggaaatgttcaactgtagttttattaaggaagccaggcatgcaacagattttgtgcatgaaatgagacttcctttcagtgtaagagcttaaagcaagctcagtcatacatgacaaagtgtaattaacactgatgtttgtgttaaatttgcagcagagcttgagaaaagtacattgttctggaatttcatcattaacattttataatcttacactcacttcttgtctttttgtgggttcaagagccctctgacttgtgaagaatttgctgccctcttaagagcttgctgacttgttttcttgtgaaattttttgcacatctgaatatcgtggaagaaacaataaaactacaccatgaggaaaactaaaggtctttatttaaaatctggcattgtattaacatgtaattttatactatgtggtat

SEQ ID NO: 9580 - DNA, 1150 bp, Homo sapiens; identical to SEQ ID NO: 9579

SEQ ID NO: 9581 - DNA, 1161 bp, Homo sapiens
aatatttctgcaaactattccaaatgaatgcattttatatagggcaacacatactggcacctgattctggtttattcgagttcatatgtagggtttgttgggaagaattatatgattggcttctttttttagaggaaatattttcccttttttcttatccatatactattctgaacagctttgcagatttccttaagttcatagcttgtaagtagttcatggtatatagacatagtcttgacttacaactgaaaaaaaatttatgttacagaagtttattttttctatggaactgtctttaaaaacaaaaatattacaaatcttgaccttgaaatattctgtttcctgttatcacattctggatatctattttgtttgcaaatgaaaattattactgatgattagcaacttgagcctgttaataggaaattgcaaagcctgaatacacacacattgccttagcctatcagtagagtagaggacatatgttaagaaaatgtgtctgcttgttgctgttgttggacaaaattttatgtctgtgtgtatgatttttttttttctattttcttcaaagatgtgaattaaatgaaagtgtgggagccagttaaattattttgtattatgggtgttctggatcctttcactccgtataccattttcttgtaagggcagcatttgtagacttgctaatggactgtagagctgagctatattaattttatacttgactcaggggatcagttctgtgaatgccattgcacgaagaaagcaaatgtttgccttgattttgaatgtatctttttaatgtcttcttaaaacatatttgtttaataatgtagatttgtttttttttttctagtatcatagtaaatattgcttagtacttgcccccaccccactgggtagtttatatactaccctataggtcatgccaaaaatgaataaaagtttaaatgccaaaatgtttatgaaactgctgtctaaatactgattgattgcacaatttaaataaaagctttccttagttaaaaaagacaaacccatgttttcttttattcttcagttttcttttgggggaatagagaatgaaaattttccatttataggaggttggctttcacatcatgggttgggatgactatagaatccactccaagaagt

SEQ ID NO: 9582 - DNA, 2077 bp, Homo sapiens
gcttatagttacaatagaactttaggctataactatttgataattatttaacagtacattttttaccttttcattttgttcttatacggactttttcataataattctgttaccaaagaattttcagtagaaaataaaattttgattataattccccccaaattgaattaactagaagcatttatagatatgaaacttacacaagtagttactaacccaaaacaatagggtttatattgattgttgtagttaaatagattagtaatgttaactaccttattgttaccagagcatttaaaataagttgtaatactttctttaccagcagatcgttccaaagaatttcaggtatagttttttcttcagcaagtaaatcttcaactatacagtattaaagtatttttatattgttgaaactacttgttggagagaaaattttttttttttaccaaaaataaatactttggtctcattgaataagatatttagtaatacagcaaagacttctttttacttgaccaaatcaagcttctttgaagtcttaagtatgaaattgtaattaaaatgtgaagattttcactcatttttcatagtggtattacttcatggtattgtacttcaaaggggctaatatgcaaatggtaactattttcttttccaaagatgtatttgctgtaagtactgatacctgcatgtcatttttatgccaaatattacaagatactgctcatcagtattttcataccaaagaccattaagatgtataggttagcctgtaagtaagtaaagatgagcagatttgaaataaatttatttagaggccgatagagaatctagctttagtagcaaaaaatatcaaagggctaagtttacataattaaaagcaatacaattatattggtatttatcagtgtttttattcaagtactttttatcagcaaattaaaaagaaaaaaaccaaagatatttaaggttacctccgcatataggcaaatatagttgtacattaaactgttgtttcttgtttttatgttaaaccaaacatgtctcttcggaacacagtctgtatacaaataacatgcatgaggactttccatttaatctgtgattcagccacatgatgtttttgccaaatgatgtgatactttccaaagcaccttgagtgtgaaatgtcaacagaaatatcagcaagcttttatgttgcagagtattatggtacctctgaattagcctgtatagttctcttcctgctttaagcattacctggttagctcagacggcttgaggcagtcccttaataatagggatgcttttcatctctaaggatgtaagaggcaaacaaatcatgtcattctttaagtgggctatgctttgatagatgtgctctttaaaggtgtgagattggaatttagagttgttaaattgaaatgtttgcattgcaccaaaggagctcagttttcaaactttaatggaaccttgggtaaagggaaaaaatttttaatgaaatctggggttttatattttgattagcctaaaagtaaaaatacagctttatccattaagtgacttttaaaaatcagttttgccataccaaagaaattagattcttagtgtcacatgctatacttttgtctgtgcttgaaacgagcaatgccaacattgggaacaatgacagaggtttgcatcagtttgtcttggctttgttaaggacttctgccagaaatgtgctcgtggttgacaacccaggatcattgttcaagttcttatgcagacacctttgaaaacaattcagatcgtgtcacaagaatttggaattgaaaatatcatttattttttaatgcaagaatacccagatgtggtttcacttcagcagtagctatagtggttcacttatatacatttctgtttcactgaatgtaaattttgaatactgaatgtaaaaaaaaaactccagttatattgaaacagtcactaagactgcacatgtgttttgcagactttcttcctgaccatttgccacatgggtctctgataagattctgttggtttaatagtcaaaataatctttgcagtttgt

SEQ ID NO: 9583 - DNA, 1169 bp, Homo sapiens
aagtaccacaccccccaacctctgattctttcactggcagtgattcaggtggagattccgcattgaggaagtgtgaagaccctgctgtgtcatctgttagtgagcagacttcctccttagttctgcagccgccatctgccatgctatgctttgataaaaatgattttccaatctagacggccatgctcaggtattctcaccattaaatctgttcgaaggacaatgaacagggaaccaaagccttttgtgaaaatcttaatatctttatggggtattttagctttttttgaatgtgttttgttttttatttttaaacttgtgtaatttgaatgtttcattgtcagcaatgtgaaagaacggtcgagatgtttgactggattataaaatatatcactggagcaaagggaagacttttgaaagcccctttgctgactatctacctcagtttgcctcccggcaaactctgaagacaactttgttacctcatttgttgttatagtttatctcagctacataaccaatgatacttcctagtagtattgtgttttcattgctgtacgtgtaatgtgtgtgatcaaaggagtcatataggtagatgagtaagaatgtttatctgaagctctgatttttttaaaaaaagaaactatgacatctgcatggtttggataagttcatacctctggctgtgaggaccgttaaaccactgagaagaggaaaagtggggctatttcttctaacgatgaccaaaacaagaaagtatatttcttttgagaacagaactattcaataccaggtagggatcattttgcttaaaaggcctttatgttttgggcattagagtctgagtgctttatctcctatatcccaaacctcaagctgcccagaactgtgccttttctaccttcccctttgcctgacggttggccaaaggctgcactgtctagtttgcaaagcatcctcaactttgccagtattagttgcaaaaccccatgcagaatatggatttttaaagaaaatgggttaaggtggttttttttctttttttaaatcccagtttggcttaaaggagtgaagacatttcatgaactattaagaatgaaggtaaatgcaacagtagacagtaaaatgaactcgaagttattatggtaacagtgcctttcagtataatg

SEQ ID NO: 9584 - DNA, 3012 bp, Homo sapiens
atcgcctggacttgccaccttatgaatcatttgaagaattatgggataaacttcagatggcaattgaaaacacccagggctttgatggagttgattagattacaaataacaatctgtagtgtttttactgccatagttttataaccaaaatcttgacttaaaattttccggggaactactaaaatgtggccactgagtcttcccagatcttgaagaaaatcatataaaaagcatttgaagaaatagtacgacaacttatttttaatcacttttaaataatgtgttgcatttacacagttgtttcatgctgtctttagagttaggtgcctgcctaaagccaggcaccaccacacctggctttagagttcacacaataggatataagtcctgtatgacttaaatagtgaattttgtccttaacatttacctcttgtatagtatctgccaggcagttttttcttaaactactgagatgataactgtgaaatatttgtgatacgtgtcatgtgtgaaaagtttgatgcattttgagatggaaaactgaaatttggaaaaagaaatactttactattgagtaaactacaatatatttagtgctactcgcagctatttattattttgtagacctgccttatgcaccttactgcctagatttttgggaaaaaactttggaaagtgtgttacctatatttctagccaactaactcacagaaaaactgtttacttcttcactttcgaagtatttggcttttgttaatatgcagttttactaaacagatggttcataagacatgtgaagcaaattcatatttgcaatgggtaaaaagtattaaagcctttctcttgcctgcatatcctattgaccattggtatagtcatcactttttcatattttagtgtagttagaagaattccttcttcaaacattaaagatccacaaagcagtatttctaaatatgccttgaagaactaaatgaagtgtatagcacttgcctttactagatattctttacacttgtacaattatgtagtaaatgtatgtttacagggtttatcatgtttacagattaagctaatttctgtagtcgcatttttatatttttagtatcactctagtaaaaaaaccaaataatttgtttaaaataaccaaagagttgttataatgcataatttgtattaaatttattactatttcttatgccttttaaaatactgtttactatgaagacaatgtttttaattacaaatccagaattctgtaggcaaaatgctacagttcatatcttcctttaaccaaactgaagtacataaagaccatgtacatgtattcatcaaacgtttattgaatgctgcgtgcctagcgctgtgctatgctctggggtaagagttgtcagcttcagagaagctgagtcctgatcctcaaggaacttgcaaatgtgtctatgaatttgtaaaacaatcaaaagtaggcgtaagcagaataaggcaaaagggaaagtgttctaggttccagcacacctgcaaagataaagtgtgccaagactgtatttatatttcatacttatattgtttcatccttatattggaatgattatatagaaaatgctcttaaaaagattaaacctatttctcagtatggtatcttggtgatttaggaataattgtaaatatatgttacgaatcttcttaaatatatatatatacacaccctgtgagaactgtaaaaagtacctctggttcttggtttaagtttgttggggtataacatgatgagtactcattagcacctgatagaaatctgaaatgtgacagtagcaaaaccactttctactttccaaacaccacagcatcagcatggtttaggggaagcaattcacagattaatgtaccctgcgttttgtcttcaccattgtcaaccagcagtcaaggatgagcaccaggtatagtcctggtttgatatctcaccagccatgtgaactgaagcagcttacttaacctctctggattcatatttcttcatctgtcaaatgagagtaatcatgcccaccctcattgtcatgccagattgtcagaagttccagacagatgagaaagcaaaaagtactttgtaaagtgttatacaatcagaaggtgctttgtgctgaccgtcagattgtgtcaagtcaggtgtgcaaattgaccacactcccaaagaatcatttaaaagtaaagtgacttctaagagacaaggaagtaggaacatttctgatattaaatatataaataatatggatacacatgtgtatatctgtatatggatcttaccatcataattcattttcttcatatcagcaaagtaatagtaatgtgggccaatgcattttggaaatgtcctcattatgtagaatggaatgtgaaaattatttttgttaaaacaggattttgccacaattatttaaatattatgtttgtgaactatctaagcatgagaaaatacaaagctttctttgtatctggctgatactcatttggatgattctgtgactcatagaacatgatgttaaatgagaccagactcaactgccaccagtccccagctgcagaccttcatccccttcatctcccactaggggctcgtggtctggaagaaacatctatcaagcaacacagccccttatcccagatagaaaagtgtctcaaatgcattctactgcgggacagtcagtaggatcattttcataaagcaaggacatcatatgtttctagaaattacaagcatataactttagcctacaatctcttattaaaaatttttaacaaaattgtattacaaatgcatttcatcagaactcaaatttaaatggtgtttgttttgggtttttatttataatgctgaagttattccatataagtatcaagttaaacacaattcattttgattataaactatttgactttttaaaatcttctgacacagtaaatatatatatcaagattgatgtatcaaaatttattgcacactttaaagtgtaa

SEQ ID NO: 9585 - DNA, 1058 bp, Homo sapiens
ggcttgagaaggatgggaaatttgttttttgttgttgttcttgttgttttgagacaggatctcactttttgccgaggctggaatacctcagcctccccagtagctgggaccacaggttcacaccaccatgcctggctaatttttgtatttttttgtagagatggtgtttcaccatgtttcccaggctagtctcaaattccttggctcaagcagtctgcccacccagcctcccaaagtgctgggattacagaatgagccactgcgtctggccacaggaagttttaaaaatagccactttgaggaataaatgagagagaacagactgtgcacatgtacattttctggccaatattgagatctcagtgaagagcccgtgattgtgtagtggtagaaacttgtgtggatgtgggattcctccagtagcatccagaagctgaggcataggaaaggccattggccctgcccatcaagtttttaaatacatcttttttctagggattctttgaactaataccacaggatctcatcaaaatttttgatgaaaatgaactagaggtaagacataacattttatgttgaaacagaaattgtgaacccattattttccttgtttataatttgacatttcttatgtagcttcttatgtgtggactgggagatgttgatgtgaatgactggagggaacatacaaagtataaaaatggctacagtgcaaatcatcaggttatacagtggttttggaaggtaatttgaaacttctattttcataacttactttttgatagattgaatcatatttaagtcaactcttgattaactatactggtggattacatttaactgatacagaaaaatatacagaccagaaaaaattatctttgattttatactgtatacatgcaccttctgggtctgtaactattactaggtaagtaaaatgttcagaaggtagtaagtggaatgacaggctgagacaggcacttagttttctactaaagtagggactgaaagaacttgtaataacctgcagggtattcctagggactcctgggtggctc

SEQ ID NO: 9586 - DNA, 1119 bp, Homo sapiens
gactcgttccatatttattttagtaaaactagtattttaagttttcttagtttttaacttttgactggacttaatttaaaacaccaagtttctcgtataactacaatatgtatactttttaaatttttctcgctaaaataacatatcaagttattgtgtttaattttagacacatcaacatgagctgaaaaatggtggatcagaaatagttgtcaccaataagaacaaaaaggaatatatttagtaagtattttattagtatgtattttattggatataattttgtactttattccagaaagactcttcttaccatctttctctgtccccttgtccagaatctcagtgttctttttctctatcacaatgcagtagcaagcactcatattcagcttttaccttggtctcagctagcctttagtttttgtttctaactagaataattgtgcctcagaattttgtcttggttcacatgaaaatgaaatgttgtttctttttagtcttgtaatacaatggcgatttgtaaaccgaatccagaagcaaatggctgcttttaaagaggtattcattttcttttatttgctcttccataatgtcacagtataacctataagtttcaaatattaggcctcatcacatctgagaaaaataagtatatggcttgttttgtgaaatcattctaaattatatttttatattaactaaatattccattcagtcattcaagaagtctagacaataaacatggacaggtcccctttcccccaagccttttccctattccattctcttcactttaggacagcaaaagaacaagagtgctttagggatagtataacatattgtttgtttttctaaataggatcaccttacacattttgttttgtgacttactttcttcttttttttttttttttgagcgcggagtgagtcactttgtcgcccaggctggaatgcagtggcgtgatctcggctcactgcaacctgcacctcccaggttcaagcaattctcctgcctcagcctcctgagtagctgggattacaggtgcccgccaccacgcctggctaatttttgtatttttagtagagacatggtttcaccatgttggtcgggctggt

SEQ ID NO: 9587 - DNA, 1191 bp, Homo sapiens
tttaggccgggtgccatggcttatgcctgtaatctcagcactttgggaggccaaggcgggaggattgctagagcttaggagtttgagaccagcctgggcaagatggcaagacctcaaaaacttaaaaaattagtcaggcatgatggcatgcgcctgtggtccagttacttaggaatcggaagcaagaggatcacttgagcccatgaggtcgaggctgcagtaagccatgttcacgccactgcactccagcctggactacagagctgtctccaaaaacaaaagcttcttcagatgtaaagaagtctatattactaagtgattaaagaaaatgcagaaactgtctcataccatagaggaaaccaagacaatatacctagttgtgttttccctgagtatattacgtaaggaaaaagagacttggacacagggtgtagagggaatgttataactttatgagagatgggtttgttattatgttgaactgatttaaacagtacgtctctcctctggattttcagaatgacattccaaacaaatttgaaatgaaacttcgccgagcaactgttcttgaagactcttaccggagaattatgggtgtcaagagagcagacttcctgaaggctcgactgtggattgagtttgatggtgaaaagggattggattatggaggagttgccagagaatggttcttcctgatctcaaaggaaatgtttaacccttattatgggttgtttgaatattctgctacgtaagtacctttacaatgattatcggcagaaaaagaaaaatcactgttttaaaagtaagagtcggccgggtgcagtggctcatgcctgtaatcccagcactttgggaggccgaggcgggcggatcacaaggtcaggatatcgagaccatcctagctaacacggtgaaaccccgtctctactaaaaatacaaaaacttacccaggcgtggtggcgggcgcctgtagtcccagctactcaggaggctgaggcaggagaatggcgtgaacccggaaggcggagccgagatcacgccactgcactccagcctgggcaacagagcaagactcctctaaaaaaaaaagttaccattttagccattttaaatatacaatttagagtcattacatacattcacattgttgtgctgccatcccactatccaactctagaactttttcatctt

SEQ ID NO: 9588 - DNA, 1159 bp, Homo sapiens
cctgtaatcccagcactttggggaggccaaggcaggtggatcacttgagattaggagttcgagaccagcctggccaatatggtgaaaccctgttgatactaaaaataaaaaaattagctgggtgtgttagcacatgcctgtaatcccagctactcaggaggctgaggcacaagaatagcttgaacccaggaagcagaggttgcagtgagccgagatcataccactgcactccagcctgggcaacagagcaagaccctgtctctctctgtctctctctctctctctcactctctcagaaaaggtaaatatatatatatatatatatatatatatatatatttctagaaaaggcaaaactgtagtaacagagcagatgagtggttgcttggggctgagagtagacatagggacagagggaacttttgggggtgatagaaggattcttaaacttgatgtatttaattcttctgttattcttcactttagcttttgcctacttcatctggattaccaccaggttgggaagaaaaacaagatgaaagaggaagatcatattatgtagatcacaattccagaacgactacttggacaaagcccactgtacaggtatcctgtaatctatcaacttgctttcttacaggatttaaactgtcacatccctatgtaaactattacatcactttgtaggatacactggatacttctaccaccttcttttttttttttatttttttgagatggagtctcagtattgtcgcccaggctggagtccaatggcgtgatcgtggctcactgcacctctgcctcctgggttcaagcgattctcctgcctcaccctcctgagtagatgggattacaggtgcccgccaccacacctggctaatttttgtatttttagtagagacagggtttcaccatgttggccaggctgatctgaaactcctgacctcaggtgatccacccacctcggcctcctaaagtgctgggattataggcatgagccaccgtgcctggtcatagcatcttctaattatttatattctgacactgatgttaagtgtctaccttttcctatgaatctctaatatacacgaattaccacttgttattatataaaacaagtacaaatgagaataagaggaaaaagcaaatgatctcg

SEQ ID NO: 9589 - DNA, 1286 bp, Homo sapiens
tcttacaccatctttcattctgcccttcacattcatgcatggagtactctactcctggcttaagaccaattctagaaaatgtactatctgattcacaaagatgtatgtatgtgtaactctattactcttataataacatggcaaaataatacaatgaaataatctatgaagcgctctgatatttattcattcaacaaatatttttgagtacctatatgtgttggacattatcctagacatagtgacaaactaaaatatcaaatcagacatgttataccttttcacaaaaccttaaactccgtaaggtactctaaatataccagtctgcctacccatgattgaatctttgcatgttgaaatagcctttggtcaaagacaataaatttttttattgatgtaatgtagatttttttcccaatgatcacagaatctttgacaatcattttaactacttaagacatggatgatggctttttatacttccaatatagggacaacctaacagatgctgagaatggcaacattcaactgcaagcacaacgtgcatttaccaccaggcggcagatatccgaggaaacagaaagtgttgacaaccgagagtcttccgaggtataagtagtttcctagttctccttgaaagacacatgctatagcaataaagtatgtgtggctcaagcttattctgttcattttagaactgggaaattataagagaagatgaagccaccatgtatagcaaccaggccttcccatcacctccaccgtcaagtaacttggatgttccaactcatcttgcagaagaattgaatgccagactcaccatttttggaaattcagccgtgagccagccagcatcgagctcagtaagatgctcttagattttgttacggcttcagtagtttatattatgcatattatactattcaacaactaacttttatgtaaaattttgtcttaaatgcaataatatgtaataatacattagggaccttgggactttacaacatggtcatttttcaaatatcctcattagtagtatggaccagagtcatggcatccaaatttccattatgtcagtgccctccagtcaaaaatcactagggacacatttgtcattgaacaagttgggtttattattcatttcagcaagggagaacacgcaccattggtgttttggtagcagaatgttagaaaagacttcagggatttgggctcctgttaggtgattttgaagagggttttaggaagcaggactttgctctacatgagatgctgttgggaagcag

SEQ ID NO: 9590 - DNA, 1184 bp, Homo sapiens
catgttagccaggacggtcttgatctcctgacctcatgatccgcccgcctcggcctcccaaagtactgggattacaggcatgagccaccgtgcgcggccacacctagtttttgtttttttttttttaagtgaaagcagtttgcctttactttataagaagagtttacacccatgagataacttgagacaacctgaagtcttacaaaaccagcgtcagaatcattgaattaaccatcttatctcaaaagaagaaagaatgtaataaaaatcaaacaaaattttaaaaatctaggaagcttataatcattaggcctgtgattaaaaggttttctttctagttctttgtgtctttcactaacatggtacttcaggtttttaacgagatgcaaaaattactttaattgcttacctgcctaagaatcctgacttttaaattcaggaaataattgtagatataactaacaaggaaaactgtgaattttatagtctgggtaatctgagcttggggtaagcaataattaaaatttttctttctttttttttttttttttaacagtgatccttacgtgagagtgacgttatatgacccaatgaatggagttcttacaagtgtgcaaacaaaaaccattaaaaaggttagacttagcaatattcaaaagtttttaatgtactttgttttatttttataagacaaaaccttatttagttatactatgtttattattttttagagtttgaatccaaagtggaatgaagaaatattattcagagtaagtatatattttattttactaaagtggaaaaagtaagtttttttcttaggaggttagaatgataaattctcatttttaatatttgaagatgtatctcagaatttgcctaaagttgtgaaaatacaaaaggaattgaaattttgtcttataaaaaacataaatgtaagataatggagaggtaaaagactagaattatcttattctagtaaaactgatttagagactgtacagtagtcttactccagttgagcagattcagtgttttctcataaagatgatgcaaattatatttatgtctccccagtcatttattattaaacagattagggcctatcaagtgaatgcatttctttttatccacacgtcattgacattgctgcctttccaccccatctgcctcatttaccataa

SEQ ID NO: 9591 - DNA, 1035 bp, Homo sapiens
ggtccccaggtccagcttcttatgggaatgacacccttaaccgacaagaaagcgctatgattttccgtttgggatttaagcggggattaagctcacggattcccaggcgtctagtcagaggccgaactctgggtcggatctcagcgagacttgttgctgaggaacactgcagcttggcttcccggcgcttcccggcgctccctggctccccggcgggcccgtcaaccacccacctcccgggaagggaccgagggcgcgccccgccacgcgcgctccccacgccatggtccccgccgcgcgcgctcatcccacccgagccccgccgcacgccctccccactccccgagccccgccacgcgcgcccccgcccagccccaggagcgcgcgccgccggccttttcccgccgcgctgccgggtgccgctagtgcccgctcgccgcgggaggcgctgctgtcgctgagggagcgcctcctcctcttcctccaactcttccccgcctcctcccgcttctcctcctcctcctccacagttgcctgccctgggcgggggcgagcgcgtccggtttgctggaagcgttcggaaatggcaacttgcgcggtggaggtgttcgggctcctggaggacgaggtgcggggaccgcggggctgcggggcgggcttcccttcgggttattcagcagccggacccggggaggtagcggcggcggccacgaccggaggctctgctgtcagcccctcctccctcggcgcgagcctggggagcgcgcgaggcgccgcggggactgtgggggcggctcggcgcgcgggcgctgggggctcgctggagggagcaagcttgtcgggtccacacccgccccttcccggagcggccgccgccttacttgtcagtttccttcaggaagtgttgaggagggggctaggcggtcggcgggggacccacatcaccgcgccagccccttcctgccacccccgccgggtgtgcggagctcccaggcgttgggagacggtcgcagcatccccgctgttgatttgctt

SEQ ID NO: 9592 - DNA, 1139 bp, Homo sapiens
acatagatgcgcaggcacgcacacacaaaacaagcaaatgtaactccaggcatttgtaatttaatataataaatacaagcatgttagaaaaatgctttatgtcttattatttgttaagttaggggaatgagaaggaaaacaaaagcattctcttagtttcatcacaatggctgcatgtacatattgagattctaactgagatttactttgaaatttttcattaaaatattccacaataatcagtttttttcctcttcaattgagtgactgactccctcactcctcctgaatatagtaatgtagtttgatcataggatccctttgaaaaacaggaaggaggataacataaaaaacaacaaaaaacatttcaccacctaaggtctgaagccacaaatctttatatctctgatgaaacaaaggggatatcaatagtacttgaagaagaagagcattttattacttgcttaatttatttattgtgataaccacaattgcaaaagaagaactcaggatttgttttaaaatgtttctctctatggctcccattttgttttgtgaataattatttatgagttgcatgttgacacaaacctactcactggttgaaagctccatttaagtgagtttcaagatcactttcaaagagatttttaaattgccattgtttttaaagctaacataaaaccatttgctatgctaccttgaacctagctaagctttcctttaccttagtaagccaatcagaagactacaatcaatgaatatttagcaaatgtgctgaagggtttaataaggttttgttgttcaataaatttgcaaggtagggtattaacatattttgataaataaatggtgctagagttggcgcagaggtttatatattgatatgtcttagttattggcatttgtgtgtgtttgctgttatcttgatttcatgatttgttaggtatttttttcttgatgctagttatttcttcactgtacattgagacacagcactactgcacaccaaagtatgcaatacccaaaggaaactgtgtgatttctcctgacaaatgatgggagcctttctttatgagatactctgaaaaggagattttgaggccattctaatcccttgtttacattattagcttcct

SEQ ID NO: 9593 - DNA, 1644 bp, Homo sapiens
gacctggaagacgaaaaagaaagaagttgaaattagtcattttaagtttcagtgtaccaacgataagggcatttggaacagtgctatcaggtgagctcagtggtgctgttgtaggttcagaaatggaaatatgtaagggaggtcacacatacactttacctgtatgttcaacctatgttatcaaacaaatcaattcaccaataatagcatgattagtagggattcccaaaaagtttttaaaaacacgaacaggattttaatgataattaaatttgcagtggaaaggtctcatttaatggttttcaaggaaatgggatttggttgctgacatgaattgatgatattagtaatatttataaagcctttcaaacttccatcaatcctaagctaaaaatctttattacctgtatatccttttcagttaactgagaggaagggatttggaaaccatgtacttttggggagtaattgattaaaaacaatggctgattggcattgttaatgaaggctttatttgtgaggatgatgctggtaaatggagcatgcttagagtactaaattgatctaatgagaatttggatgaacataaacttaattttggatttaatataacattccagtcagacgcatgtaaacagaatatttgaatctttgtacctccatacaagtgttagcctgccaggctgtaagcttaccttaattaaactttcagtgaaagtggaattattaagatataaatttatatttgtgctttttgtcagtgtgtaagctgtgtagaaattctttgatgtattagttgtattaatgtaaagtagaaacccattgttgaaactcctgtagctattatgcttttaatattgttttaatgatcttccttagaaataggcccataaaaatggtctggaagccaaaccaaagtatggtataatgtagatattgtaaagcagtaaactgaaaacatgtcctggcatgtattcagccatgtttaagtgacttttctgtaattgtaaaataaaaacttcaaatgggacctaaaacagtgatgtaaaagaactggttttggaaatttagcctaatttatctataagatggctgctaaattgatttttcagttctttttatcatctagaatataatagatatagaaatgaataatatgaagaacagtagtttgctttgaaatactaataaacttttatttaaaatgcttcatttttacttcttaaaatgtgctttggattcttaaattttgtttcactgaatgttcaatgttttaaatggcgattaaaatactctgctgtatatagtagtttttgagtaaatatttgcaataaaaatctgcccccgaataattctatttttccaatcactgcttgattcagattacctttggtgcctttagaaattatatacttgttcaagaaatttaatatcagtgttagtggtgaggattccattctacattctttaactgctgatacattattttaaattaggacttaaagtacaggggacaatattgctaatatttatgagaatagatttgctttataaattcttttacttcaagagaaatagaatttaatattatacttttctatctgcccaacaatttaaagaggctaaataggcaaaatatattat

SEQ ID NO: 9594 - DNA, 1508 bp, Homo sapiens
tacctaacacaatgtaattgctgtgtaaatagttcttatgttggattgtttagggcataatgacaaggaaaaaaatgtctgtatacattcggcacagatgcaaccatccatttttttcccctaaatattttcaaattgtggttgattgatttcacagatgtggaacccacagatagagggcagactgtatatattgttgtaacttattttaggcatgttaactcatttaacaggttgggtctaattgctcaagtatattactgtcaaacctctgcttataagcatttgacttataagcagaccaagtgtcttcccattgctgctggaatctctttgcttaactccactttctgtatctcagaacttaaagggcacctctggtaaagcttctgtgttttatttccatttcattgtagattgcataggtttcagtggatttgtctgggaatttaagcccaagtacactttttttctgtatatttggtacctcaaataaccaaatttcaaagaaaattcttctgtaaacttgatattgcttgcaatataacctatgaaaaattctgaaatctcctagagttacaaaatatgtagaatcaccattttcagactatcaaagggtaatacaaccctgccctcaaaagttaactcttttggcttagtggggtggctcacattcccagcactttgggaggtaggaggattgcttgagcccaggagtttaagaccagcctgagcaatatggtgaaaccctgtctctacaaaaaataaaaaaaattagccaggcatggtggcacatgcctatggtcccacctacctgggaggctgagagggaggattccttgagctggggaggtggagattgcagtgagccagatcacttcactgtattccagcctgggcaacagatccaaccctgtcttaaaaaaaataataaaaaataaaaaaagatatgtagtttgatatacttgaaatttcttcactagatgagatactgaaaatgattataaagtgtcgaagggaaatagtatctgatttgacagtgtttcataaggatgaggccttttactttttccagtgttttaataaccctaaatttcatgaaagaatatgattgtatattcattgatctacattctctgacctttggctgtgctgacaaacacaaaatgttggcaccaagagaaacttgagagaaaggagcctagatacagttgaaggcactaaagccaagaaaaatgaaattacttgttagtttgaaacatggccctggccaggcacaatggctcacccctgtaatcccagcactttgagaggctgaggcaggtggatcacctgagttcaggagttcgagaccagcctgaccaacatggtgaaaccccatctctactaaaaatacaaaaatacaaaaaaaaaaaaaaaaaaaaaaaaaaccagtcaggcatgatggcacatgcttgtaatcccagctgtgtgggaggctgaggcaggagaattgcttgaacgcagga

SEQ ID NO: 9595 - DNA, 1146 bp, Homo sapiens
gatctacataattattaaaaagcagacaatgtggctgggcgcagtggcttacacctgtaattccagcactttgagaggctgaggtgggtggatcacctgaggtcaggagtttgagtccagtctggcccacatggtgaaaccccgtctctactaaacatacaaaaattaggcatggtggtgcgcgcctgtaatcccagctactcaggaggctgaggcatgagaatcgcttgaacacgggaggcagaggtcgcagtgagctgagatcttaccactacactccagcctgggcaaataagtgagactccatctcagaaaaaaaaaagaaaaaaaggccgacaatgtgagggtggagaaaaaaagagaaagtaggtatgggctgaaagcagtggtctaattgaattcaaaacgtacttaatgggtgcgttctaagttaagacattgctgaagttgtaaataattcagaagtgatgaaattttcaggtttgggtcagtatcagcaggaaaataacttgtttccttggccttattttatagtctagtctcctgagacaagatctggggcttgggagcccagcacagctatcttcttcaggaaaacctgggacagcatactattcattctctgctacaagttccaggaggagaccactccatgactctgcagcgcttggtgagtgtatcacacaacaaatcccatcccacatatgttgttgttgttttttcctcccataatctgtacttctggctatgcttttttttttttttctttccgtttctttgtttaagacagcgtctcactctgttacccatgcaggaatgcaacagcacaatcttggcttaccgcagtctcaacctcctgtgctcaagccgtcctcccacctcagcctcgcaagtagctgagactataggcatgtgccactgtgcctggctagttttttattttttgtagagacagggttttgccatgttgtccaggctgctctcgaactcctgatctcaagtgatctgcccacctcagcctcccagagtgctgggattacaggtgtgaaccaccgtgcccagccctgtctgtgcttttaattagaagagagttggattcgtgggtatcacattgatgtcagggcttatttgcacaagaataataca

SEQ ID NO: 9596 - DNA, 1227 bp, Homo sapiens
gaagtggacatgtcagaaagcgagggttatgaggacaggttctggattcagcctgcccgaatgcagttcctcctaagtgatcttggacaagttacttaaactatccaagtgtcagtttcctcatatttaagatggcgataagaatagcacccgccttctggaattgttaaaaggtcgaaatcccgtgtaaagatcttaacacaggcaagggttggcaaactttttctatgaagagccagagagtcaacattttaggctttgtgacaccataggctttggggtttctgttgcaaccactcggccctgctgttgtagcttgaaagcagccacagacagtctgcaaatggaagggcgtggctatgttccaataacactgcgcttttcaaaacaggtgaggggctgggtttggcctgcaggctgtcgtttgccgacccctggctcagcacagggcctggctaagtgggcacaatgggtttttcataaatgccagccattcttccagcctggggacagctccttgacatcagtctccttgttcatttgctttgtgtttttaacagaatgtcgaggtcttggcgagcaggagcaacacttcagagcaagaccaggcggggactgaaatgcgcgtgaagcttctgcaggaggagaatgagaagctgcagggaagaagcgaagagctggagcggagagttgctcagcttcaaaggcagatcgaggacctgaaaggcgatgaagccaaggcgaaggaaacgctgaagaagtacgaggtgaggctcgctgggcccaggcccagctttggcagctgctgctccttctttcctgtgtaagtgatttcaaaagtggggaagggatttattgtcatgatgtagtaggaaaggtcaaggcaatagtgaatacatcctctctgcaagccatttctttgttcccctgggagtggcatgacagggaggccagggaacagggacggtgaggtcaggcgggaacacaggtctaggcacaggaatccccacacacccagataccagacatacccagccttccatggcttcacacaggcatccacctgaaagggctgtcttaacaccaccattagaccgattctcactcaagactatttattcttttttaactcattgttgatgtttttgaagtgacactgattttaacaagccaattatctggttggccagacctctagcagtgggaagctgtgactgagagatggca

SEQ ID NO: 9597 - DNA, 1191 bp, Homo sapiens
gctggcaggctttctgtattctgggagttgacacgagtgtctgctgttttctgacatgtattatgtaccaggcactttactaactattttgtttctaactagaattttatctgtatctgctgataaaattttatctgtatctgtggatactaattctgacaacaaccctgtaaggtagatatgatttcggtgtttccagtgtggacatggccagggcccagagaggttaacgacgtgccccagtcatgtactggtaagtggcacagcagccctaggaccctgaggctgtgtgcctggctccaaaggacgtgcctgctcactcctccatgctgcttccaagtcacaggtgcccacacctggctgactcaggatcaggtgctgggccatctttgagggggccatagaagaaagggagaagaggagatgtgctgtgtgttgaaatgggacccagaccctggtctcagagcatcccagggtgggctcacacccgtgtcacttcttctagatggcagacattgttgaggcctcccgtacctcaaccctggagctccagaaccagctggatgagtataaggagaaaaaccgcagggagctcgcagaaatgcaaagacagttgaaggagaaaacgctggaggcagaaaagtcccgactgacagccatgaaaatgcaggatgaggtaatgcctggccagataagttcttcctttatcccttattcaaagtatcctttgccctgaaagtcttctgtgagggacttgggggtagattcgtgagacagctttggtgcttgactcttcattcttcaccttctggatgggttccgtgggcaaatggcattctggagcacaaaggacccaccggcggactgtgaggctaaatggacacagctttaacctgaccattttcttgatgaatctataattttttgcctaaaatgtttagctgccatttatggagcagccatgatgtgcccagctgtgtccagatgatttatttatatgctttcatgttttaatttaatcctagaatagggattacagtaactgactgttttttggccattgatttttgaaaatacagacttttattggcatgagggtggcggacaagagtttcacaacaacaataatggcgagtaaaagaaatcctcaggaatttatgagtattgaaatgattaaaacattcgttttat

SEQ ID NO: 9598 - DNA, 1187 bp, Homo sapiens
agggaggaaaccatgtatagcttgtacatattttaaaccagaccttctcacgaactgctgctgttgggtttggaatgtgatggaggcttggtagggtggctggtttgtaaagttcatgcatctatattgagtattctttttttttttttttgagatggagtttcattcttgttgccgaggctggagtgcaatggcgcaaccttggctcactgcaacctctgcctccctggttcaagtgattctcctgcctcatcctcccaagaagctgagattacagatgaccaccaccactcctggctaattttttgtatttagtagagacggggtttcaccatgttggtcaggctggtcttgaactcctgacctcaggtgatccacctgcctcagcctcccaaagtgctgagattacaggcatgagccaccacgcccagccattgagtattcttttttaaaatatgaagctattagattttaagtgttgaggagcagaggtgagaagagagagagagagagaaagtcaaataaagtcaaagaccagtttggaaaccaaagttggaaaagaagaattgtagtggtcatggacagctaagactgagcatagcagttcacatggtctgggtaaacaagtcactggcacaggggaaagccagaaggttgcttgtgtctgtgactgcagctatggccttgtttgcttagtttatctggaattctgttataatttctgaactgttctgagacctgttcccagtcactgattgcaatttcttttacacaggttgggtagggagagttgtaggtaaggccttaaacaaatgaggccgtttctggaaggatagggctgtgtggtcatgtcccacagcaagcttttgggatcgggggaataagagggtatgggggaaaggttcatagacttaggtgtgagaatgaggtgggaggtgtctggtaaggtcatgggggaagggagatgagagaggagataggcagatgtgggtatggggcccagtgtgagaaggaagacagagaagttcttgaaagctgggggatgtgtgggcaagaggtggattgagcaggatctcagggttatgtcgaggaagggaagaaagaaacagaagtcaggcagaggcgtgtctgtgcaaactggaggactccttccaacttcctggaacaaagcgacatcgccagcagca

SEQ ID NO: 9599 - DNA, 1089 bp, Homo sapiens
tgcccatgcaaagagaacacaggtcacttttcaaaacacttgcatcattaccctaaaaataggctgttatgcgttttgacaattgcgctatcctacactctgagggagttggcaacgcatgcggtatagtggagtgggaagagttgagactgaaagttaagagaagggttttcaagtcccggctcatctcaccccagtgactttgacagtgtgctcactctcagagccatggattacctggaacaaagtgcagattagtgcccacggtcctttccaggtataacatgctatcgttctttaattttattatatatacatacttttcttctgttttttgctttaagaactaaccccgatcaagagtattttctttagctagcttaaaaagaaaacatatattttatgtaaaaacacatacatggccaaatgcaatactgaagagacaatcatcctgtatcttttatggtttttcctgcttctgagtgtcgttctacaatgcccgttgacttattccattgcgtctctgctttagggtatggtttggtcgctttggttgtcatgagaaagagacattctccttgcagctacctccatgtgagtgaattcctggataaagcaagatttcctttcaataaacgctgtcacccaatgggaattttgactctcctgtgattgtgacttctttgttttctccagagcttggctctgtgtcctttaagaaactgccaaggtgagtggctgggagctactgagggaagtggaacttggaggccttccagccctgggaccggtttctgaaacagaagggtggggactggtcagtggtgaatgctgagggaattaatggctctggattcttgtgatgttctgagaaatccaaactgcccgttccagaacatggcaaaagaggaagcatgttcaatgttaattacagaataagcaggagccccctgtttaccccttttcctaaattcgaggtcttctgcaatcctagttggcccataatctctcttgatctcacaccaggcccatagcaggcaccacagtctctattttacagaaaccaaagcagcttcctcatggaagggg

SEQ ID NO: 9600 - DNA, 1475 bp, Homo sapiens
acatgccatgtagcctctggaaaactccactgtacccatgcgagaaaatgagagggaaataatatcttagtattattatgaaagtagttttgacctaataggcccatccccacactccaccccatccccaaattttggagattgcactttaatgactgctggttcttggaatgtcttatgtgattattatatgcttaaaatacttttgctgaaattctaatttgctgagacaaatgaggcatatattccctattcttcctgcattcccttgttttttgggctatttggataatgaccattttaattgttttattcttgttttggggcagttagaaatcagatatttgacttaaaaatcagcttttctttctttgaagataatgccttgcctttttaatgttatatctcaagttaaaaaaatggctgtaatgtaatagtattcttttccatttgacagaaaattcatttgcaaattgcccgacaaaggtaaaaagatctttgactcttttgccaaactgaaagctgccattgcagaatgtgaagaagttagaagaaaaagtgaactgtttaaccctgttagtttagactgtaagctaaggcaaaaagcaattgcagaagttgatgtgggtacagataaggcccagaattctgacccgatacttgatacttcatcactagttcctggatgttcctctgtagataacatcaagtcatctcaaacctcacaaaaccagggacttggacgtcctactcttgaaggtgatgaagagacttcagaggttgagtacacagtgaataagggcccagcttccagcaatagagacagggtaccaccttcatctgaagctagtgagcatcacccgcggcatcgtgtttcaagtcaagcggaagatacttccagcagctttgacaacctgtttattgacaggttacagaggatcaccattgcggaccaaggtgaacaacagtcagaagaaaacgcaagtactaagaacttgacaggcctttccagtgggactgagaagaaacctcattacatggaagtgctagaaatgcgagccaaaaacccagtgccccagctgcgtaaatttaaaaccaatgtgtaagtaccctcggaaacaggcctgtaacaggaacgtgatatttgttaaactcaaaaatttacgagaaactgggtgtggtggtgcttgcctgtagtcccaggctactcaggaggctgaggtgggaagacagctttgagtccaggagttgtagaccagcttgggcaatataataagaccttttctcttaaataagtcaggagaatgctctaagttccgtgggctttgtatgagaactacttgtagttaggaaataacatgttgtggcaacactgagaccagcctggccggagtagaagattcatgttgaaaaatatttagttttgaaaccaaataatcgacaaggtcttttaaagcacatgggggagtgttaaa

SEQ ID NO: 9601 - DNA, 2239 bp, Homo sapiens
cctcgtgatccgcctgcctcagcttcccaaagtgctgggattacaggcgtgagccactgcaccgggccccagcattagtcatttttgacatttgataggtcaaattgttatgtgagtgtgtatacatgtgcatgtgcccccatatttaacgcatctgtatttataagtattgtagtgctaagctcattactcagtttcttatatagaggagtgtatttcagtgcaatgttgtatattaatggaggtcagtaacttcaactgtagcaggctggtggctgtcagaagcattacccagttgtgtctgatagggcacagccatcaggcttgtattgcccaagggagcactcagtgaggtgtcagtgtccctcttattgctgattctaggtaacttcccattgaaaaattgtaaggaagagatgtgaacgtgtaactttgtgctttgctctttgttttaaaggagatgcaagcaaagctcgcagcgcaaaaattagctgaaagactgaatattaaaatgcggagttataatccagaaggggagtcttcagggagataccgagaagtaagggatgaagatgacgattggtcctctgatgaattctgaagataatctcctaaatcactgacgttgagatgtcatcatcttacatcagactttctaactagtatcaagatcagtgtcagatattgttgagggaagtaattttataaagttacacaaaggtagttataaaaaaagcccagtttgtctttcagaaggtgactttcatgtgcttgaaaagtttaatatttgaatattgtgtttaaccacatggtattaaaattttgcaatatattgtgtattggtctgatattttagtatatagtagaacatactttttttttctttaagccaaatgaaaagaggtaactttgcttttttcctttttcttacctatcaaatagcatttattacatgtctttcagtgaaatacttagttgttccaggcacctaaaatcaattaggaagacatagttcccttcttttttgggtaatgaagggagcagtctaaagaattgtatgcatgtttgcatggggttattgagacattggatgtgaaatacctaggaagacatgtatggagaatgcttaacaaatgctcttctcctttttctgtcttcccttaggaagaacgttatctctcttctgattaggaaggacttcccttttgagtagatgctggaaagtggaggttttttttgttggtttgtttgtttggttttgtgtttttttttgagatggggtcttgctctgtcgcccaggctggagtgcagtggcaggatctcggctcactgcaatctaggtggaggtctttttaaataacctcatgttacttcaggcaaatctggtacaggagaagcccaagctaactgagctgggtgaaggcttgtgcatcacctggcttgagttccttgctgtcacagatgataggttcatgtacacaacattaatgtttgataaggaaagcattttttttttgttaaaattgaattgtcagtactttacttttttccccccaaataggtatatatagactgcagaagcttcagtcccatatataaacgttcatgtcattttagaggattatatggttgtctccagagaaattaacttacattatcaaaaaattctttgtctaatatattggagtctttaaaagtgttgaagaataaaatattaattagaacaacttcaaatgctaaggtgatgttttaccgggacttaattaaatacaactttttcctttcgaaaaagactgttcacatttgcttccaggtgtaattattgctttcattccttacccccctcaagcaaatgtgaaaagtatactgacctaagattctcattagttttagttcttaaaacgaatagtaaatgatttcacagcgtaaaatttgatgttatttctggaagctggatgatatggaagagttcatgtgcctggacacacagttccctgtaatcctgccatctagggagataaactctgttaacattttgatgttgtgtttttgcttatttttctatgcatagttatgcatttatattctcaaaaatgaaatcataatgtacattgctttgtagtctgctctatatattgtcaatatgttcccatattaaatattttgctttttagacagctgtaggatattttatttcatgggtataccataactttaagatttatttcctattcagcaa

SEQ ID NO: 9602 - DNA, 2239 bp, Homo sapiens; identical to SEQ ID NO: 9601

SEQ ID NO: 9603 - DNA, 1206 bp, Homo sapiens
taaataattggcattttaaagagaaagcaaaaacatttaatgtattaacaggcttattgctatgcaggaaatagaaggggcattacaaaaattgaagcttgtgacatatttattgcttctgttttccaactacatcacttcaactagaagtaaagctatgattttcctgacttcacataggaggcaaatttagagaaagttgtaaagatttctatgttttgggtttttttttttcctttttttttttaagagtataaggtttacacaatcattctcataatgtgacgcaagccagcaaggccaaaaatgctagagaaaataacgggatctcttccttgtaaacttgtacagtatgtggtgactttttcaaaatacagctttttgtacatgatttagagacaaattttgtacatgaaaccccagatagactataaataattctaaacaaacaagtaggtagatatgtatgtaattgcttttaaatcatttaaatgcctttgtttttggactgtgcaaaggttggaagtgggtttgcatttctaaaatggtgacttttattctgcaagagttcttagtaacttcttgagtgtggtagactttggaacatgtaaattttttgcttgtaatgttatcctgtggtaggattttggcaggtacacacactgccctattttattttgagtctaagttaaatgttttctgaaaagagatacatgcactgaactctttccactgcgaatcaagatgtggtaatataaaaggatcaagacaaatgagatctaatactactgtcagttttaatgtccactgtgttttatacagtatctttttttgttcactttggaaatttttactaaaaattgcaaaaaataaagtattgtgcaaagatgtaaggttttttgaaacttgaaatgcattaataaatagacgattaaatcaacttgaaggttctatactctttgaactctgagaactatcacaagaagcttcccacaaggcagtgttttcttacagttgtctcttcctacaaaagtatagattatctttattcttaatactttggaatccatgtagaaaatttccagttagatactctgcgtacacacaataaacctttttaaaacacccaactaatctcaactgcattacattgtttctaatcaatattcagtgcttgtcttggtggaagaggtgagtcattttgaa

SEQ ID NO: 9604 - DNA, 1253 bp, Homo sapiens
cagcggccccgagagagttatcaaatgggacacatgagacgctaactgcagcttttgccttggttcttcctagtgcctacaatgggaaaacttcactccaaagagaaacctattaagtcatcatctccaaactaaaccctcacaagtaacagttgaagaaaaaatggcaagagatcatatcctcagaccaggtggaattacttaaattttaaagcctgaaaattccaatttgggggtgggaggtggaaaaggaacccaattttcttatgaacagatatttttaacttaatggcacaaagtcttagaatattattatgtgccccgtgttccctgttcttcgttgctgcattttcttcacttgcaggcaaacttggctctcaataaacttttaccacaaattgaaataaatatatttttttcaactgccaatcaaggctaggaggctcgaccacctcaacattggagacatcacttgccaatgtacataccttgttatatgcagacatgtatttcttacgtacactgtacttctgtgtgcaattgtaaacagaaattgcaatatggatgtttctttgtattataaaatttttccgctcttaattaaaaattactgtttaattgacatactcaggataacagagaatggtggtattcagtggtccaggattctgtaatgctttacacaggcagttttgaaatgaaaatcaatttacctttctgttacgatggagttggttttgatactcattttttctttatcacatggctgctacgggcacaagtgactatactgaagaacacagttaagtgttgtgcaaactggacatagcagcacatactacttcagagttcatgatgtagatgtctggtttctgcttacgtcttttaaactttctaattcaattccatttttcaattaataggtgaaattttattcatgctttgatagaaattatgtcaatgaaatgattctttttatttgtagcctacttatttgtgtttttcatatatctgaaatatgctaattatgttttctgtctgatatggaaaagaaaagctgtgtctttatcaaaatatttaaacggttttttcagcatatcatcactgatcattggtaaccactaaagatgagtaatttgcttaagtagtagttaaaattgtagataggccttctgacattttttttcctaaaatttttaacagcattgaaggtgaaacagcacaatgtcccattccaaatttatttttgaaac

SEQ ID NO: 9605 - DNA, 1264 bp, Homo sapiens
tgctgctgctggtttggggtccacacttaagagatctgctgctgtagtccacgtgcagatccacaactggcttctgaagtaatggggcttcaaagtgagattgcccaagttcaaatctctgcttcaccattttattagctctgtgaccttggaagagttcctcaacctccagatctgtttcttcagtaaagtggggttagcaatggttcagacctcacgggactgttgaaaagagtaaatgatttattttggataaagtaccaagaacagtgcctggtatttgcagtgatgatttgttctttgttctctgatgtttttttcttttaaacctttttcagtaacgcatccccaattaatagaattgtacaaatcagtggcaattccatgccaagaggaagtggctccggatttaagccatttaagggtggacctccgcgacgattctgaaaatgagctctctgccaaggttttaagataatttattgaaatctcctgtaaactttacttgactacttatgaagaggacctctgacttgcttgagagttctgtcagacttttctttttaaaaatttaacatgattgcttttctcaattttggagaagatgtttaaatagttctgttgtaacttttaatagttttgtgtatcattcaactttttttcttgcagcaccgaggcacatttgaaaagatggaattgaagtcgttttgtttaacgctgtgtgaatataaagagtagtttgcagctgtgtggtagtggtttaatttgcagccttagctctgtggtgtctggctctagagttacttctttttaccaagcattttcagcctccattttgaaggctgtctacacttaagaagtcttagctgtctaatttttagagaataagattgttcattgcatttctgagtattatgtaacctatttttgcagaaggtactgttacattaagtgcatctgtgtatcctggtttaaaaaaatgtaatcttttttgaaataaaccttcatattctgtatagttgctaaagtgttgagaacctttttaattgtaaaatgagaaccgattttcagtttagtgtagcagcacacttgttcaggtttgcatggtatgaaaccaaatagattcatgaaaccttggccatgaggtttgtttcacaaggttcttagaccgagttgtgcaggtaagtgcacttttaggtaatctgcactgtttgtttgatggataaattccatctctgggaattgtgtgggtattaatgtttcc

SEQ ID NO: 9606 - DNA, 1166 bp, Homo sapiens
gccaggctggtctagcacttctgacctgaagtgatccacccacctcagccttccaaagtgctgagattacaggcctgagccaccactccccgcctcttcttatctttaaaactgtggaagcactgattgctttggatatgcctcaactgttaagaacagtaaaacattcttcagcttggtagtgacttttgagtgttcggtatcatttctcctgaatgctaaaaaaccaacctttaggctagacacttagttcagtttaaaagaaaatgagttgtaataatcaataactagcttttttccatggctttgccttaagttcattttttggtttcattattgtaggttatgcagacaaagttaagaagaattaagcactcaagtaagcacttcttggacctatattctttgtttctaatcaataggcgggatcgctttgttggtcaaagtgaggggaaaaaagcacgacctactgcacgaagggaagatccaagcttcgaaagatatcccaaaaatttcagtgactccagaagaaatgagcctccaccaccaagaaatgaacttagagaatcagacaggcgagaagtacgaggggagcgagacgaaaggagaacggtgattattcatgacaggcctgatatcactcatcctagacatcctcgagaggcagggcccaatccttccagacccaccagctggaaaagtgaaggaagcatgtccactgacaaacgggaaacaaggtagctgtgtactatgtaatgctttcctagtggtctcatgcattggggttaaaaaaagttaagattacagttttgatcatgtatgtttttatgttttgtttaacagagttgaaaggccagaacgatctgggagagaagtatcagggcacagtgtgagaggcgctccccctgggaatcgtagcagcgcttcggggtacgggagcagagagggagacagaggagtcatcacagaccgaggaggtggatcacaggtaagtgctgcgggaggcttgccgcgagcctgcacacatacatttagaggattcatgagctactctggatatacagtagcattttgatgtggcttagattagctagattggaatgattcagaggcattaattttttatttaaatttttaaaatctgaatttttctcatactttactgt

SEQ ID NO: 9607 - DNA, 1173 bp, Homo sapiens
ggacaaacagatccaatcccaacctatgttcctcttcctaattgacatttggcacagtggtagatttcaaaacaaatacatttcaattagttatttgcatatttttcaagaacagacattgatgcagcagttgggagttctttattattagaaataaactttgttttaatgtataagacttccgaagtctttgaagttaaatcaacatatggcacatggaaaaatgaagccgtattttttggacagcttctagaagctggcttggtaaatattaaataactggaatttagagcatctctagcagcaatttgattagtgtgcattttagtgtgagaaatttgagaactcagattcgtgtttgatgatcttggtattagacctatttttaaagacacagtaaatatataaggtaaaatgaatgaactttgggaatattaaaatatgatcaaatttgacacatttaaaggtgtaaattaccaaaaacgtttggtggatagcccacactactttgcctctagttgtaccaaattttcttaccattaaaaggactgtgaattggagaatcaagaggcacatgagcaagatggaaatgatgaactaaaggactctgaagaatttggtgaaaatgaagaagaaaatgtgcattccaaggagttactctctgcagaagaaaacaagagagctcatgaattaatagaggcagaaggaatagaagatatagaaaaagaggacatcgaaagtcaggtctttagccagttttttttaaaacatgacacagataaattaagttttaaataataaaaagtatttttttctagttcaatttggaagtctcagaatttttaaaagatgtgttactaaagctacttataagtcatctaaaatcctaccaccttaggcaaccttttaaatttttgcttatttcatataatatatatttatacatagttgttatagagtaagttcctatttattctgtattttcacatgacgtataatttcataatttccccataatttattagactgctttctacatatctaatagacactcctttaattttggacattttaagttttaaggcttttttcctactccacgatgaatgaatgtaccaatttcattctggcattgccaacattacttggtggtagggttttttcccctttctg

SEQ ID NO: 9608 - DNA, 1499 bp, Homo sapiens
aataggttttgaagtaattgtttgatttgaccaaatatgttttgttgctgaaggtagtgagatatgcaataagatcagtttttggttaatagaagtttttaagtaggcttatgctctatatctactgtatttctaaaaattggatgcatgagtagagtgaccagagaaaaacgttttataagaatagtaaaataattcataacagacattttgtgtactgatgaggaaaagacagttctgcctttataagggatcttcttggtggaatttgagaactcttcaattaaatagtataataaaacacattaaaaatcttttaaatatctaattttgtcttctaggctttccttaaagtttcccatgtctcaatggactcctgaatataacgagctctacaccttaaaagtggatatgaagagtgagattccttctgatgcaccaaagacacaggagagtctgaaagggatccttttgcatccagagcccattggggcagccaaaagttttcctgcaggagttgagatgattaatagtaaagtggggaatgaattctctcacctgtgtgatgattctcaaaagcaagagaaggaaatgaatggtaaccagcaagaacaagaaaaaagtctcgttgtgaggaaaaaacgcaaaagccagcaggctggcccttcgtatgtgcagaattgtgttaaagaaaaccagggaatattaggactgaggcaacacctagggacaccaagtgatgaagataatgattcctcttttagtgattgtctttcttctccttcatctagtctgcattttggagattctgatactgtgacttcagatgaggataaagaagtctctgtaagacattcccagaccattttgaatgctaaaagtagaagccatagtgcacggtctcataagtggcctcggactgagacagaatctgtatcgggattgttaatgaaaagaccctgtttacatggcagttcgttacggagacttccatgcagaaagagatttgtaaaaaataattcctcacagaggacacagaaacaaaaagagaggatattaatgcagaggaagaaacgagaagtgttagctcgaagaaaatatgccttgctacctagttctagtagttccagtgagaatgacctcagcagtgaatcctcttctagctcatcaactgaaggagaagaagatttgtttgtttctgccagtgaaaaccaccaaaacaatccagctgttccctcaggtaaaaatgtttaagctgagtaaaacatggaacctattgcattgcatttgtgcttaattttttgtttgtgtcttactgattttatttaaagggactatcaggttctattaacttttatttttaagtcatataaattaccaattgcagtattaaaccatgactctaatgctaagataaaaatttaaaaaatttctagtgacaaaaataagtcagagttttttgggagaataacccttcattacttttttttttctgaaac

SEQ ID NO: 9609 - DNA, 1159 bp, Homo sapiens
ccccgacacagccagtccctgaccatggcaccatactcatctgtaagcctcgtggagcagctggaagacaggatcctctgccatgagaaaaccaccgccgccctcgtagagcacgcctttcggattaaagatgacattgtcaacagtttgcagaaaatgcaaaacaaagggggaggtgaccgcttggccaggcttttcttggaggagcatatcagaaacataactgccatagtgaagcaacttaatcgggatatcgaggtaaggtttgtgaaagtcaggtggcctatgtccctttccacagaattgctccatgtcaggaggtcacccacatctaactcctacctcccaggcagtactgcatttagaacaaagctgtctgtcttgtctattcttaatgatcgccaaggagacagcttgcagaaatatcctaattaaatttattccagtgtttgataacagttactgttagtgttatgtttaatctaaatttaccttgctgattattaaatgattttattttgtttggctcttaatgaagagagagaagaactagtcgaatagtttcactctataatctttcatatctttgaagacagctattaagtcaattactaaggtcagactctgttgcttcagattaaatgtttctaggtcataatgattatatgtaatacagtttattactcaaacaatttaggcatttggattgctcctcagactcccctttttactgctgtagttttctttgaaatgagaccaataaaaggccaatattgtctatttttagaattggtagatttactgctatttattgagcaatcacagggaccacacagtttagttcagaaagcttcagatcatttagggcttgggtttccctcactacgcaatgttcatatctttcacatgtaatgactgaatatatgaatactaatagatatatggctagattaaggaaaacttttgcttcctgtgatggagattatatctgaattatgcttcctaaaattaaacctcatttcttttttttccattgtcagatttgtatgtatgtatttattttaaccgctttattgagatataatgtaaatgtcacaaaaagtgtaaaattaaatgatttttagtaaatttataaaattgtgcaacctcaacacaattc

SEQ ID NO: 9610 - DNA, 1316 bp, Homo sapiens
tctgtcttttgtaaggggaaaggatttaacatttagaataaaccccaccatttatgtaatggaaatagtttaaaaattgctaactgccatgtggattgcaaattaaatggaaacttatttagataacgtaaggctcaatatctgcgttgaccacctagatattacaggttttaatatttaaaactatttttgaattatccacaacctgtatagtgatagccatatatttaataatggaatggtggttaacagtctatttactgcacaattaattgttcactaatcaaatagaatgtggtaatttttcagactttatgatctgtttccaaaattggcacaaagtgctagggtttatatacacttatcgtaactgtatttttgtgccttggttttatcatgtcaatgcactgtactctgtaaaagttttgcagacaaaatagaaagtatgataatccgtcagaagtatgatgtaaaactggaatcctctgtattttttaaatgttctaaaaattttatcgctgttaaggtattaatcattcagtattactaatggaatagaaattcatacttttgtatggacaacaattcaaattgatattgcatttatagcactgtaagaaactttcatcttgagcaactttgtagatgatgggtgttttattttcaatcgccatatttgatcagtcattgaaaattggccccagtgctgtttgttcatctctgtatgtaaaaactgacagtgagacacaacgttctgaactgtgagggtgtcccaggaaaaagaaaaacaggaatactttaacaattaaaaagaaaaaaatgttttttgtttgccaaggactcaggaaaataaaaagcattttctatttttaggacaaatcacaaatgaagtgtctaactggctattactgtttacccatataaaatatgctgctaaagtacatattttgctgtcaatggcttgacaattttttttttcaaatttggacatgagaggttatatagggactatattatccaacacatattttcttattttgccacaaatttccacttaacaaataaaaaaaggcgaatgctgttttgcaatcagaaagtgaatttcttttgtggtagcgtacacgtggttcatgtggttctccacgtttaagcacaaaccacagcacaggaagccacaccccctccagcatctctgtcttgtggggtctttgaggagaaggaatcagaacatcgacacctgggaagagggaggcggggaacaccagctggactctggccaaggagtgatgtaagcaggtgacacttggctgtcagct

SEQ ID NO: 9611 - DNA, 1193 bp, Homo sapiens
aaacagagttgatcaagaacttaatggaaaacaagatgaaccgaaaaatgaacagtaagtttggcatctagtccaaacaagactgaagaatgtgctgatggagcagtgctgtttctgcattcataatgcatttattggcccatatttttatgtaacctgttacaaaatagacttgactttttcataatggacttttgtattatacaagggactgttcactgctgtactggtttgcaaatttcttgaatttagctctttaatagctaactgtattattatcgttttatattttatattgctaaatagagaaccacactttatataaagtagtttttgcatttgtttattgaatgatgcatcttcttcggtgaaatatttatatgcataaatggcaaaggaaagaaataatatatatttttatgtcattgagcaatattttttaatgtgtacctgtcttatggaagaaatatgcaggtatataagaccacgattttctaaagtgcatattagaatttttgtttttgtaaatggttaaatacatttcctgggtaacttaggaaattaagtttttcataaggcaacagatggttaaactgattgtcatgaatacccaaagatcatgtatataatcgaagtgtattagtaccatcccaaggtttttttctcatttaacatatttgtttcataattcagcaagtacagatgcaagcgcattgcacactttttcctttctaaacttaaagacaagtcaaaaagccattcttagaactagaggatttaagagggtaggaattagggtttgtatatatgtatatatgggacattttatcttctggcccaaagtcagaactttataaaaatcttgagtttgttcactaatgtgaaataagctatgtgtccagggtattgctcccctgagtgtatatgagtgctgagtagtattgcagagaatgtgatgagttattcactgtcacaactttttctatagaaaacaggggctgctttttaaactctcactatgggcactttaccaaaatacttccatatcaattatttgaactcggtagttgtttgacctagttagatgtggtgtttattcaagtttgtatgaaatcatgtttgacaatactgtaaattaggttaattttgtaagtcttagcatcatcatattgtgctgttttggataacacgtt

SEQ ID NO: 9612 - DNA, 1700 bp, Homo sapiens
atgggacattaattctctgtagaatgtagtttaagcaatgccatttaaatatattggaagatctcataaattaacaagagaatgatgggtattacagtggaaaagtggtcaaagaacaccaacaggtagttactgaaaaaaaattaaattggtcaataaagataaacatatgaaaaatattcaccttattatccagtgaagataaacattaaatcgaaatttttaattttttttttttttacttattaaatgtacaatgattgtgtgttactctctccaccagcaaaggtacatgcttttacatgttaatgaaagtatgaatcgctttttggctctctcaccagcaccatggctgttggcaagaacaagcgccttacgaaaggcggcaaaaagggagccaagaagaaagtggttgatccattttctaagaaagattggtatgatgtgaaagcacctgctatgttcaatataagaaatattggaaagacgctcgtcaccaggacccaaggaaccaaaattgcgtctgatggtctcaagggtcgtgtgtttgaagtgagtcttgctgatttgcagaatgatgaagttgcatttagaaaattcaagctgattactgaagatgttcagggtaaaaactgcctgactaacttccatggcatggatcttacccgtgacaaaatgtgttccatggtcaaaaaatggcagacaatgattgaagctcacgttgatgtcaagactaccgatggttacttgcttcgtctgttctgtgttggttttactaaaaaacgcaaaaatcagatacggaagacctcttatgctcagcaccaacaggtccgccaaatccggaagaagatgatggaaatcatgatccgagaggtgcagacaaatgacttgaaagaagtggtcaataaattgattccagacagcattggaaaagacatagaaaaggcttgccaatctatttatcctctccatgatgtcttcgttagaaaagtaaaaatgctgaagaagcccaagtttgaattgggaaagctcatggagcttcatggtgaaggcagtagttctggaaaagccactggggacgagacaggtgctaaagttgaacgagctgatggatatgaaccaccagtccaagaatctgtttaaagttcagacttcaaatagtggcaaataaaacgtgctatttgtaaaaaaaaaaaaaaaaaaaaatcccagcatttcggcataagaattctgcctgtttagttttgtctaatttataaaacagaagcgaataaaagtttgtaaataaataattagttaattaaattataacttgtccatgcactagaacacaatgcagcctttaaaatattacagaaaattatataatttcattaaaaatttcacaaattttataatgaaaaaacaggctttaaaataatataattttatttaaaaaattaataatgcctttactttaggtggttgaatagaatttctttgtactgtacttatttttattttttaaatattattttttaaagcaatgaataatcattactgagattctgaaaataatttagtactatatatgaatataaaaatatgaaaatattttaatatttaacattttaattagttgatcttgcagcaacctggcctaaaacaaatatgatatgtatacaaatgtttaaaagccacaatattacttaaactattat

SEQ ID NO: 9613 - DNA, 1232 bp, Homo sapiens
agaagttcctcagatgtccaaaggcatgcccatggttagcaaggataaagttagagctggattttttgtagccaggtttattagggcacatgtttaaagtcaaaggaccagttagactcttagtaattgttcctcacctcaccagcttatttccacttgaccttaataatgcaggaaataggagagtgagctaggaaagtaccctgttttctgtggaaagacgaggacgagagaggaaagttagggtgtttgtaggaccttgctgcagtaagaacagccctggtcactaacctatgtcaatcctcagcaccttgcactccctccaccccacagtcctaaggagccttgagtgtcttccccagcacctcctccgaccacactcctggaggcttccctggcaatggtttgggtgtggccttccaggcctttgtatcagggcaggtctcctgcagagtcttctctttgtcatgggagaagcttcattgtgcgttgaggctacttctgtgttattgaggagtctgggcttttttctgataccacgtttcttttctttcctgggccattgtagcaagacactaagggcgactaccagaaagcgctgctgtacctgtgtggtggagatgactgaagcccgacacggcctgagcgtccagaaatggtgctcaccatgcttccagctaacaggtctagaaaaccagcttgcgaataacagtccccgtggccatccctgtgagggtgacgttagcattacccccaacctcattttagttgcctaagcattgcctggccttcctgtctagtctctcctgtaagccaaagaaatgaacattccaaggagttggaagtgaagtctatgatgtgaaacactttgcctcctgtgtactgtgtcataaacagatgaataaactgaatttgtactttagaaacacgtactttgtggccctgctttcaactgaattgtttgaaaattaaacgtgcttggggttcagctggtgaggctgtccctgtaggaagaaagctctgggactgagctgtacagtatggttgcccctatccaagtgtcgctatttaagttaaatttaaatgaaataaaataaaataaaatcagttcctgagtcacacaatccacatttcgaatgctcagctttcacatgtggtcagcagctagtatatctggacagcgcaggcagggaacatttcgatagaaagttctgttgggcagcagtacatgc

SEQ ID NO: 9614 - DNA, 1196 bp, Homo sapiens
agatgtggtagtttgtaaatattccatttcttgtgctattataacttggcaaatttgcctgttatcatgaacatatcagtgggaagatgaggttaataatagctggtagtagtttgttgtcatcttaaacaagaaccttttacaaccattagacttttctttctactttaaaagagcaggaagtatgtatgacagggatagggacattaagagataggtagggtggcttgaaatttttactaatactttaccaatttatttacataagatgtcctgtgaagtcaacgagtgccgaaaaattgagagtcttgaaaacttgtatttggattttgatgatgatgtcacagaacttgaaacttttggagtaaccaccaccaaagtatcaaaatcaccaagtccagcaagtacttccacagtacctaacatgacagatgctcctacagcccccaaagcaggaactacaactgtggcaccaagtgcaccagacatttctgctaattctagaagtttatctcagattctgatggaacaattgcaaaaggagaaacagctggtcactggtatggatggtggccctgaggaatgcaaaaataaagatgatcagggatttgaatcatgtgaaaaggtatcaaattctgacaagcctttgatacaagatagtgacttgaaaacatctgatgccttacagttagaaaattctcaggaaattgaaacttctaataaaaatgatatgactatagatatattacatgctgatggtgaaagacctaatgttctagaaaacctagacaactcaaaggaaaagactgttggatcagaagcagcaaaaactgaagatacagttctctgcagcagtgatacagatgaggagtgtttaatcattgatacagaatgtaaaaataatagtgatggaaagacagctgttgtgggttctaacttaagttccagaccagctagtccaaattcttcctcaggacaggcttctgtaggaaaccagactaatactgcttgtagtcctgaagagtcatgtgttttaaaaaaacctatcaaacgagtatataaaaaatttgatccagttggagagattttaaaaatgcaggatgagctcttaaagccaatttccagaaaagtaccagaattgcccttaatgaatttagaaaattctaaacagccttctgtttctgagcaattgtctg

SEQ ID NO: 9615 - DNA, 1189 bp, Homo sapiens
ggcagcctatatttttacagctgggttttaacttaacaccttttgggatgctgtcttccaagagtatggatttgtgcttttcaactctgacttttggattttaaaaaatggagcccagagactgtgttggacacatacttataaatccacgaaggcttagcctacagaagccacaggaaatactatgatattttggaaaaggtcgagtttcatggattctgtaaggcactcagcaggttgtaattatttcttttatttaaaagccttccagatatttttttccagagggtctgcaattgaggggtagtagacatttttttcatagtgtacattctttttggctgagtgctggaaatacacaggaaattaagcggctttaaaagacccagcggcatccagtccaaggcatgaggtcactgaaacagaatgggagatctccaaatcagcagcatcagtttttggctgcctctgtccctgtccttgtgcaggagggaaaaaaatgaagcaggtgaacacactgacctgttctgttttaacagaaaccaaatgtcgccatgtctacaggcatggctcagcagctggaatcgctcaagaggtttagacacaggccaacaagacagatgtgttgaggcggccaggaaagtgaaatgagttgcctgtgtcttagttcaagatcctggtgctgctttgggccctggcctctctggccatgccgaggccaaggaaagcaggccagctccttattgaccagcctctgggctgcctcttaggaaaatcagatgcaaggactcttgcctcagaccagagacagaatcggccaagtttttggtctcagcaactaaaaacaaaaagaaaagatctgcttctgaggcagcaggtagctacccggacatgtgtctgatgacttttgcacaggaagatgcggatcctgggagtgacgggaacgtatggggagaggacttcacagaaggtgggctcttggcttcagcctagccgttgcctctgaggttggatgagattctgctggaatcctggaaagcagagaaaactcccctggaagcaaatttagagtgtgcgaggtcttcactccctgctgtctcattcggtttctttttggctgctttgggctgagtagagttaattttgagcaaagaacttcagccagcatgaatgaagcactcccaagacg

SEQ ID NO: 9616 - DNA, 1097 bp, Homo sapiens
tttaaagtagcagctgagacgctttatggcaacacaagtgtggttacttcatattatcggcacttgacttttaagtctctgtcacgtatatcaatgggtgataaacattttcttcttgttacctttttttatctttgtgaatcttggcttcaaggaccaggtgtacctgtatctcaggtgggaagattgaggctggagcaatgcctttataggaccatcagagaactcttctgtgaacagatttctgttgtgcatgatgtaccttttacatcatgcagggcattgtagcagatataggagttatgctttatttggtccccagcttcaggtgactaacagtccaatcagaatccatgcacacagagatcagcatgacacaacatgagaaaagaaatgttatgtggggaagtgtagcaaatggaacggccaggtgagaggccagagagatctaagaatgtcctgaaggaggtgagatttgcccttgaccttgatggagtggtcagacttgggaaagaagatgaataaagcctatataaactgagagttaagagtgaagactggagacagatggctttggcttaaatcgcagttctgctgcttgctatctgtgtgaccttgggtaagttacttaacctcagtttcccagttatgacatgggaatgataacaatggtgtcggtctcttgggttgctttgaggttatttgaaataatacctgtaaagcacacagctaaaaaggaggaatgatggtggtgatgcagggagaccaaagagtgaaacagtctagagtgaagcgaatgtgttaaaatccagaggcgatcaagtgaagccagcctttggaggcccgtagaagtcatttggaggaatttggacttcgtgcagtaggaaagagggaaaactgtttttagaaaaaaaaaaaaaaaagatttgtgtgccaaagtgtaacatgatgaaaatggattttaaggagaaactggtgtgtctgcaattcatctctcctgatcgtgtaactctctagtcgctgccccattcagtagatcagctgcacagactcctaattagccattccagtaggccaaagactattttttgagcagg

SEQ ID NO: 9617 - DNA, 1145 bp, Homo sapiens
agcctcagttttcctgtctgtaactgagataaaaattgcttcctcaggactctttggagagttaaatgaaggcagcccagtacttatcacaaagcaagggctccctaagtggatactcagtgtaactgaatctctgtttcaaagaagtgaggtgccttcactgccctcaagaatgtctggggagacgatgaaatccccaaaatgttgtacaaatcatacacatcctgaaggatgtggttataagtctcaggtttttggtattaatgagagaagggcatcagtaattggctggaataatgaaagttgtaatacttaccatttttgagcacccctaatcctcactatgacccagaattttatgataaagaatctgtgattcagagaggttgtttgcccatctcagatctggtcaacctcgaagtccatggttttcccatcatgcagtactgttttggtaggatttgagttgagctttgaagaataagcagacttggataatctggagtctgtcttggataattatgattagacagaccgtcctccaggaaagaaggaacagctgggaccaaggcacggaggtgagaatgacgtgcccaacaataaggagacaccatccatgtggcatgggaagaaataatgagacattataaccccatgtctttagtcctgaaatctgttctgagcatcagtctacccagctgacctcagcatgctaccaatatcatcatatcccttgttatgtgattaccagtctttccatggagaggcaagtttagtcttattccaggaatgtttggcattactggacatccgaagtagctgaatccaaagtgctttgagtggaggacaggcaaagaaaatgaacaaacaaacatatgaaaaaaccaaagtgctttatttaatcacccggtctgcggattgtgttgaatcaaggtgtcagtgattctaggtggttctgtctccccctaaactgagacagagcagatacttcaggaaaacgtggaagttggtccgtacttctacaatcctactggcccagcctgacccccatgtgacagctttgagagttttcatgcagttagagacaaacacaggtcaatgacaacaactacagcatgtgatgtgtgctttatgatctaagcact

SEQ ID NO: 9618 - DNA, 1098 bp, Homo sapiens
agttggcagtaggcttctcagttgcaggcatctgttttctgttccctgtagccagtgccacctagacagagggtcatggctttggatggaagggcagtatgggcaaaacagtttctgcctttcacgttcataaccctatctaggtacccatagtcgagaatgaaggaaacgcttcaagtttctgaagatgtaatcatttatctggacgtgtctttcaaggtaaatggcaaatgactgaatccacaattcttcagttcccctaaacatgtcttcttcattaggagcctgaatccggtagggcacccgtaatgtgctgtccttctaaaatcatttgtttgttctctctccttatctttctcccctcactaccctttccttgcccccaccacaccccctgtattaatatattcccccttgatcacacctggtatcatctacgattaaatattactttaacagctgacaatatctcaagccgtgctttaaggaggtatcattctacttaacagcgtcctgtgcctgctgatcccactgcagtgttttctccgtttaaggcattaccgcaacaaaatcggttttagtgtttcccttgcttctccatgctgaattacagtcacagtcaacggcccacttgtgtgtagttcaagaagcaattaagggctttttttttttttactttgaacaagcaagggagagggggtagagtgaaaaatgatcattattctgatgattcctctgcttagctgaacagttcacagttctttgataccaagagtcacccacatttaaacccatttctgtaactgcctgctgcagccatgcctgctgtcagatccggttgatggcagttcaaggactcacatgccattaggttggagcagcccaatctggctttagaattgtgattaaatacagttgtaacatctgcacagtgatccacggcatgatgatggtatcactgaaaattaaaaagtgcaaactttggagacttcccagggaattttgcagtttctattgtaagccttttgttttattcagtgggatttcttataatctgaatatggtagtcttatctttctatgcatgtctacatgaatt

SEQ ID NO: 9619 - DNA, 1138 bp, Homo sapiens
acacacacacacacacgcacgcacgcacgcgcgtgtatatatgtgtatatatgtaatgatttacatatatatgtatatgtatgtatatatgtgtatatatgtatgtttttaatatatattatatatatacattacaagttttctacaggaaacaacactcagcatattcctaaatactagtagaactctgggcttttacaactgtttggtggagttttgtctgagcaagtttccagatgttttataggtgcctgaaaaggtaggtgaacatcaggggatatccccaagagcaaatatacagaagcaagaaatgttagaaccatctttgcatctgtgtgaatgtgcaggaaacatgcattgaagtgtggctgtaatacagggactgtgtaggagagtggtgggtggggtgggaccaccttggagggtcctgaatgccacattaaaagatttcggttctacagattatgaaggacctaacccagaggtggtggttgagatgctgtattaaaagtaacaccttaaatgtggcaggggattaagtgagatctaaatttgaaaggttggttttcaacataagtgtggggaaagctccctgatgccaaccttgctggtcctgaattgtggcacactgtcaccacctggtggtcacatagccaaattgtagggctaatggatttagccagagtcctggttgtagagaaatttcttcataaaaaaaaaaaaaaaaaaaaaaaaaaaaaaaaaaaaaaaatcctggtcaaattatttgcatcctttaaagagttctaaaggcttataaatatctggataaggatctcaatgtttattattaacctgagtgtctgtaataatgtggacacattctttaagtaactcaaaattgttcaaacctagcagacaaagaacattgtcattttctggactatatgaatatcaggatccatctggaagttgaaaagactcaatagctttgagatttgtaatgaaggaaaaaaaaatcttttaaagtaattcctagcaggttgacatttaagagacttaactgctgagtaccgagtgaagagtgatttttacagaagctctcgtttcagctgattccagggcctgattagatgtcattacaagaagaactggattt

SEQ ID NO: 9620 - DNA, 1194 bp, Homo sapiens
tttctattagaaagacaagcccctgtggcgagctctgaattaggatgttggccattagaagtactgaagcagtgaggcttttagagctgattcagcttctgaaaaactcatctgtgaatctttagggtaaggaaagaaccttcaatttaaagcttataaacagccatggattttacctaaaaacaaatactgagaagacaagaaaacgaaaaatataagtactaacgcaagcagagaataaccaaatcatgggttatccagtatgatatataccacaaaaacattctggtcattgaatcaggcacatctgtttgtgaggatattttattatctttatggttaatgccctgagtgtttatgtgaagcaaaataatgaagacaaattgtgaagaatacactggacaagtaaccaggaggcctcggttctgatcccagcccaccattaattatgtaagtggctctgggcaaatggctttcaccctgagacctcaccttctccttagtacagagaggcactgaactacagcttcctgccagctctgatattctataatcctgtgatttttaaaggaaccaccaaagaatatacttctttattcattccaactttaaaaaaattattattgaagcataatttacttaccattacattcacccatcttaagtatacaattcaataatttttagtaaatttatagagttgtacaaccaccaccacagtctagttcaacatttccatcagccccagaagatccacatgcccgtttgctgttactcctccttcctagccctagtctaagacagccattaatctgttttctctatatatagattttccttttctggacatttcatttaagtggaatcatatactatgtgttcttctgtgtctgcctcctttcacttagcattgtgttttgggggtttgtctatgtcataaaatggatcagtaccttggtcctttatgttgctgaataatcttccattatgtggatgtatcacattttgtttattcattcatcaactgatagactcctttctcttcctttcctacccttggagcgcttcccctcctcttgcctacccccatactgggaaaaaacaggtctctcttagagaaatgcgaggtctttatttcaggccttcccttgcagaagaggccggagctttgtgttttaaacccttccaagtcag

SEQ ID NO: 9621 - DNA, 1102 bp, Homo sapiens
tagcttatgtgatgacccaatacaaacacacagaagtttcacaaaacagtatttactcttactgggtataatgtactttcatgctttttattgtttcattaaaacaataagatgctgtttctgacccactaaactgatttcactgcctactaaacttgcaccccattatttgaaaaatgtggttgtagacctaatcattactgataaccgcacctccagcaaaatctggacaaactcaccagtctgaccgtccccttttctcttttgtcttattgcctctagtacttggttccacctagctttcacctacaagggcttctgacctggtggccctttctttttcattgtccatcatccctttcttgtcctccttacccagctcagattcttgcatataccctcaactaccttgacctttccccgctttgtcttactgtcctcggaaagaaaaccccatccttggttaagcccaccctctgctcactctccttcagcttcaggctgatgatcctgcctagagaaaacacatatctctctgcattgtcttgcttttaatttatggccacaaacctcaaggggactcttgacactttcaggtccactatgtttctatacccacttctcagctgatgacctggcttatttcactgagagaagaagcaattagaagctactttcatcatcttcctatactaaacttactaacctaccagcacacacgtgtgaatgagatcctgtcctctcttggctttcatacatgcagctatctcctttcccttttgcatcatcagtttctcactctgatggatagtccccatcagaaacatgcagtagtacctgtcatctaaaggaaaaaaacagcaggctgggtgtggtccctcacgcgtaatcccagcactttgggaggctgaggtgggcggatcacgaggtctggagttggagaccagcttgaccaacatggtgaaaccccgtctctactaaaaacacaaaaattggctgggcatggtggcgtgtgcctgtagtcccagctactcgggaggctgagacaggagaattgcttgaatccaggaggcagaggttgcagtgagccgagatcgtgtga

SEQ ID NO: 9622 - DNA, 1197 bp, Homo sapiens
actcatccagatgtgtttgacatagtttctgaaatagaccacagcatatgccacttggtttctattttaagataggtatgttgacagaggcattggtccccaaatagaggggcagagggtgtgagatgtgtactcctagggagaggaactgggtgtctttatttggtgatgtgaatttcaacctgaaatacaaatcatggtgttttctgggaagaagactgcagccctgacagggctccagcctgggcgtttcattcagaggctctcacctatacctgttgctggccacagggacccaggggacaatctgacacagaagcctgagggtttttgccttgtaacttcttgttgtatctgaattaagtcaactctaaggctgtggtatccctctggactaatcgattcctggtccaggaggcctgattccaaagttctgaaactccatagggcctgctgagaaccagaggacaaatccctgtaccacctgactgtcaccgaggcagaccgctggggcataccacctctgtttctagtcttggtgttagccaatctcaggggtgtgaattctctatttagtcctcttgactatggactgtgattgtgttacctgcttgcttcgggtctgctcacagactgagttgtgttttctgcttttgagtcaaggttgtcactcactggtttttttcccccagatggcctttgtacataagggcccctgttctggtgtaagggatactaatcttatcatacctgcctcagttatttgaagcttgaatgaatcgagtctcctgtccagattcacttcccttcttgtggatcacttgagatcaggagttcaagaccagcctggccaacgtggtgaaaccctgcctctactaaaaatacaaaaattagccaggagtgatggcaggtacctgtaatcccagctactcaggaggctgaggcaggagaatcacttgaacccaggaggcagaggttgcagtgagccgagatcacgccactgcactccagcctgggtgacagagcaagattctgtccccccgcccccgcccaaaaaaaagattgtctccctaatttaggctcatctgtcctcctttctttttaatacaattttaattttcaaaaagttaaatttcacatgtaaaaattttaaaaagtagaaagaggcatgcagtgaaaagtaactttgctccaatc

SEQ ID NO: 9623 - DNA, 1199 bp, Homo sapiens
gcagcatcgtctccctcaagctttcattgtccacgctgctagaatttacaaggaactgacagaacccccctgttctttaaaggactatgaggcagagtttcaggtgtttctgggaatagaaatagaattcttttaggtagtctttgtatcccaactcaaaagactcaattcaaaggatcctaaaatgaaggaggtataattgggaaatctcagaaatttctctgtatggaagtagggcagtagtatggactgtcacatgtgactaatgaagttataaattagtgggacatgtcaaatcacaaggatgaagtagaatagcagagcgtgtgagactgaagcaatggtttcattgaatgaaatggtcaggtaagtaagaaaccgagcagtggtcctgtaagtaagaaaccgaggcccagagcaggaagggctttgatgggactgcgggggcacatggagagggaccaggattcaaccacagtgcccaaaacctgttcctgtctcacttcaggttgtgagccccactattagctcccctgtgtgccaggagcagctgattgaagcagggaagctggtggaccgctcggtggagaactgtgtccgtgcctgccaggcggccactaccgatagtgagctcctgaagcaggtcagcgcagcggccagcgtggtcagccaggccctccatgatctcctgcagcatgtgcggcagtttgccagccgaggcgagcccatcggccgctacgaccaggctactgacaccatcatgtgtgtcaccgagagcatcttcagctccatgggtgacgctggtaaggcactgtgctgtgggtgggtggatgggtggcttttgatgttcctgatggtggtgctaacccatagggaaggtgaaggctgcctggatgactggcaagggcaagttctcttcagtctcaaagacttccccactgaagctcagaaaaagatataagactcttccatagtcatgcttacagatttctacagagttcactgggtttttgttataatggttagattttgttattttgttagatttacagtgaatcccctttgttctgcgaatgcacgtgttgggtacggtatggcaaagttggagcagccacagaaggaaacaagatcaaggcttggaatttaagaagtttattatacttgcatgtcccctggagggctcaccacatgccgcacag

SEQ ID NO: 9624 - DNA, 1237 bp, Homo sapiens
cttaactccctagaacttttcacaaatggttatcagtctgctagatgacatttaaaagttattagcaaaggccactaatataattggtggctattagtttggaagaacgtgatttgaagtttgagagcatctgccttttagtttacaaagctaaaacttagctttcatcttaacagagacaaaatagggtagagttttagagaatggaccctggagtcggattgccttggtgtggatcctgtctctgccacttaggaaaccttgagcccctgtagatagcttacatttttagatccacagtgtctagcactgagcaggtgtttgatacatttaaatgaatgaatggatgtatatgttggtggtcaaacctattaataaaatgggctcagatgactcagagccttttaatcgtgatgactcaaatgcatctctgaagagtctgtctcccttccacaataccttccttttatccctcccctgcaaagcagaatgtctcatggggtgtgccgtctgttccccacagctacctccaagcacgaagcctttccaggaagcccagagtgaactgaaccaggcagcagctgatctgaaccagtctgctggggaagtggtccatgccacccggggccagagtggagagttggctgcagcctctggaaagttcagtgatgattttgatgaattcctcgatgctggcattgagatggctggccaagctcaggtgggtgtggaggtggttgtctggagttgaccttagcctctcctctcggatggataatccatccttgagactgactgaacaaataggaaaaggaacctggaaacaggcaggccatggttgcattctttttgctgcttaggaagctcatgccctcatgggaatggcattcccaaagatgctatcagcttatgcatgaggtgctgttagtaataaagaataacttctcccacgatcctccagcagaattcatagtcttactatttggagggagggtaggaggagggagaatgtttaacaaagattagaacagctcttcaaatgtgggataatacaataaaaatatatatgtatttgaggtttaatggaccattcagatggtctgtgtctaatacagagtgtcaagtgattaaaaattacctccttcagatgaacagataaaccccttgtttagaacaagggagcttgactgatctggtgtcagcttgcagagctgtgttttttgtttttttttttttt

SEQ ID NO: 9625 - DNA, 1128 bp, Homo sapiens
ggatacagctggggaagggggtgttctagttggtaaacataccaattttgcaagaatctgaacacttcaaaatatgcttaatacggaaaccacattttgaacctctaattaccctctagagctattttgaagaataaatgaaattaaacacattacctgcttagaagaggccttgacacacaataggggctcagtaaatgcttgttgaatgaataacagaattatcccacaaagttcctctaattaacattcttaccaggtggctggaggagcagataagctataaaccaggaaagatatgtatcaaggagggtatcacgctaggacctcaagatacagccttgctaggtagagactgggcattttacagtctctcaaaagggaagcaaaatcaaccaaattccatacttcaccaaacacagactcctaataggagtggaattttcctagccaggctcccataggacataggagaaattttccacgtagggaaggcctcgatggcagagtccatcacgcttctccttccccatcctgggcttgcctctgcagatcggattccagattcgcactcgtgtgcaggacctgggccacggctgtatcttcctggtgcagaaggcaggggccctccaggtctgccccacagacagctacaccaagagggagctgatcgaatgcgcccgtgccgtcacggaaaaggtaaggagcagccctcagtttagagtcacaagaacctgcgctggctctcagtgatccgctgtaatcaaggacaaaagcaggaaactcagccaaaactaacccagctgactcagctgtctcatcccgatcttccccactgcccaggttctcccaaaaatggggtgcatcagggagctggggtgatcataggcccagagaatttgagggcttagagggactatcccatgaaggtcaggccctggcactcccccttcttgcagggcttccccgtaggcagattgtatcaaagtccccatcagcagccaggagcccctggtcaggggaggcctggagccagagccctttcctgcaacctctgttgacaccatctttcttctcaaggaggctgctgagggctgagggctgagtcaggaggagtgaaaatccctt

SEQ ID NO: 9626 - DNA, 1378 bp, Homo sapiens
aggggagctgctggagccctagcctgttggggaaaagctggcacactcttggctcgccctctttgagtggagctgatccaacacctcatgcctgccttggccggacactgagaggaggggcacacgtgcttccagagacactcaggagtcagaccccaatgctcagagtcacaatgtgttcatggcctcctgtaacaggactctggggatcccctctgtggcccagcccaccccaccctctgctcttctatgctgtgcccagggcagctgccctcttctgcctgtgccccatcccatcctgaaaacccaggaccaaggcaggggcaggcagccagttcttccaccttgcctcagagtcatttaaaacctttactgcatttgataccagaaaagcctccagagacaaaccaaatgcaaaggcctttcctttataactctaaagaacaggcatcgaaagtttatttttgtaggagctatataaatactcacctttctggagtcgtccagtgctgggagctttggggagtttggttctcagttatcacctggtatggtcccagtttctcatctgtcctttcctcatccaccctgcacatgtgtatgtgaacggcttcgtggccggtgtggtggtttctcatttcataagatagttgaagggccatgccttgtctggatgttatttaataggcactactgcggtgtcctcagatggtactgagggggccttctggtccttcaaaggaaaataacacaggcatgagttcatttgggagtgtgaactttcagaacacctaataagagagtggtgtcagagtaaaaacggccccaggtctggagcatagaagtgtatctctgtgaagagagagccggtgtgttgacatgtggttcttctcacacccctctactcctcgagggctttgaatccttgggctgatttttgtgccagaaattgctgttcccgatggccaaaaggggaacctgaactggatttcagaactgcccagtgatttgaaaatttagattttacttgggcctttcaggagtctttagatagggatgctgaggtcatatttagttcaatgaacagcccttgtttaagttttgccagtgtccagccagctgtggccctggccatctgtgcaggcaggttcctcaattcctggttggccctgcagtcggtcaacacagtccctccaggtcggctgcagaggcagctgcccagcctgcagtctatgcacgggccttaagaaatgagctgcctgtagcctcacggcatatgcttttatcagggaaaacccttcgagcttcttctgattctcacctgcttgctttctggctgtcttagtcagtgtgtttacaggcaactaaagcctgttcc

SEQ ID NO: 9627 - DNA, 1119 bp, Homo sapiens
acaaatttgattttgtcagttatctcaccaacttgtctcacgttagtgtctcttgtattcttccactgcagtaaggaggtagatgcacagatcagccatcaaattgatggagttcttaggtttactttgttttcctggcagcccccacctttttagtacatgtctcatcctactgctgtttttgagattgtgaatgtgtattttatccctccttccacattttggtctggctgccggttcacctaggtcagacttccaattgagactgcccaatcacagctaaccattctgagtcaaagcagaagcctctgatctcctctctgctggcactcctaatagagagttgcttctctctggtctaccagaaagaggatcatattgtttgtagacaaaacccttagggcctgatgggatctgatctctacccccatgcccttctgttacacaaagcttgcaagacccatggtgtgtgtgttgtgtcttcctgctgcaggtggcccgtaagctggtcatcattgagagcgacctggaacgtgcagaggagcgggctgagctctcagaagggtaagcgggcccggcgccaggaggccacgaatggggtgctgcagagcagtgactaaacagcatgaccttctggcagctgcacattacctgtttcagctccgggctccttttgtgctcatttgatgtggatgagccacgagtatggaacatggaggactcgtgtggggtgtcttatgtatgaatgcgtgtatcactgcatgccttacctgcacactgattttgtgaatggccttgtgcatttcctgtgtccactaacagccaagtccgacagctggaagaacaattaagaataatggatcagaccttgaaagcattaatggctgcagaggataaggtactgatggctcgtgtggtttttaggtttaactgcaacccagacatctttcagcttccaatgcctcctggttcgtttggtataacgactgcaccttcacttcaccctctgctatttatatcttgccttaagtgctttcccttggtcctttatgctcctttgttttcccttcataaatgctctttgggcagccaaaaaaggagccaaattatcgcacttca

SEQ ID NO: 9628 - DNA, 1290 bp, Homo sapiens
cctgactgctctgtgagaatccgtgccatggctcctttgggtcaaagatgccctcccctccgtcttaggttcttgtctagaaatgagtaatgtcttacaagcatgcctagttctaatcatctcatcctgtgtttgtgattgatgtttgcctgcctaaatgtacaaaccaccattgtgtccaaagcacagctattcatgacttaattttctaatctcaccacagagaaagtggctcatgccaaagaagaaaaccttagtatgcatcagatgctggatcagactttactggagttaaacaacatgtgaaaacctccttagctgcgaccacattctttcgttttgttttgttttgtttttaaacacctgcttaccccttaaatgcaatttatttacttttaccactgtcacagaaacatccacaagataccagctaggtcagggggtggggaaaacacatacaaaaaggcaagcccatgtcagggcgatcctggttcaaatgtgccatttcccgggttgatgctgccacactttgtagagagtttagcaacacagtgtgcttagtcagcgtaggaatcctcactaaagcagaagaagttccattcaaagtgccaatgatagagtcaacaggaaggttaatgttggaaacacaatcaggtgtggattggtgctactttgaacaaaaggtccccctgtggtcttttgttcaacattgtacaatgtagaactctgtccaacactaatttattttgtcttgagttttactacaagatgagactatggatcccgcatgcctgaattcactaaagccaagggtctgtaagccacgctgctcttccgagacttccattcctttctgattggcacacgtgcagctcatgacaatctgtaggataacaatcagtgtggatttccactcttttcagtccttcatgttaaagatttagacaccacatacaactggtaaaggacgttttcttgagagttttaactatatgtaaacattgtataatgatatggaataaaatgcacattgtaggacattttctaaatttggtggtcctgtcatttgtatgttcttaatttgtgaacttttgaacgtgtgactgacctgccttcccccacaaataggttctcaaaacaatatcccacagtccaggggaaactgggtttcatgtgttaccttctcagaaacactaaaggcagcattattttggtctgttaaagttataaccaagcaggagagaccctttccaaatgttgttttcaatgttattggtgtatgcctgcaca

SEQ ID NO: 9629 - DNA, 1406 bp, Homo sapiens
agtctttgttataaattttcagaagactatactctttactttgaaggtctattttttaattatacctcatttagctaactagtattctaatacctggtagaaaaacagtgagccagcctttaagcatctaacaaaatttagactctttgttttgttttgaactgaagacatcattgggaaaggtaggaaatattagtttaggatagagcatacatgtcatatccagtagcataaaaaaagtattatctccctgtctccattaataaatttagctgtgcaatataggtgcgtttttgcagaagtttctagtaagagattataactccattttacaggttctgaatgctcagagtctatattaaggcttataaagtttttcctgtgatcagtaagtgacacatttaagcagacattcttttcaagttcatgacttagattcctttacaaatttagttctcaatctttaaaaaccacatttcattatgttggttaattattataaattttaagcactcatttctgcaatcaggtttctcagaattttttttttttaaacagaagagacattcctttttccttgttacatccaaggggggcacaggggtgggtggaaaggaatgtctaaaaatgaaatcccttgatatagagggacctagacggacaggatatgctaaaataatttcaaattctagcacaattttagagtagaataagtcatttttttagactaataaaattaatggctgtcatgttcactctgaaaaaaatctaaatgactgaaatgtacagaaataaaaattagcaaacaattattctagggatattttcagattttacttcatttcttgaaatgcgtgtgccatatgcaattgcatttcttgtgccaagaaactaatagaacttatttcactttacctttttttaaaatgtgaatttagttattatagttcaattttatggccttacagatggcttttattttgtttgcagctgacactgcagttcctttcatgcaaaataccataaactgtttgatgaaaatcatgcccctaatggaaactctctagtttttccatataactatcctactgtacatgtttaaacatattttatttttgctccaatggcttaatgtgaaaagctcctgcagataagtggacctgtcatgtggttaatcttgtttaagccaattcattaactgtgtactgatactgatgctatgttttttttaaatggattttattccaggtgaactttttttttataataatgttcgtctaaaataaaaactacataatgaaaatgaaaatgctaatggctctctgaaatggactgcacattttaaaaatatttctgcaaatttgggccagatgcagtggctcacgcctgtggtcccagcactttgg

SEQ ID NO: 9630 - DNA, 1143 bp, Homo sapiens
ggacactttcacagtcctgtcctctggatcacagacactgcacagaccttagggaatggcaggttcaagttccacttcttggtggggatgagaagggagagagagctagagggacaaagagaatgagaagacatggatgatctgggagagtctcactttggaatcagaattggaatcacattctgtttatcaagccataatgtaaggacagaataatacaatattaagtccaaatccaacctcctgtcagtggagcagttatgttttatactctacagattttacaaataatgaggctgttccttgaaaatgtgttgttgctgtgtcctggaggagacatgagttccgagatgacccaatctgcctttgaatctggaggaaataggcagaaacaaaatgactgtagaacttattctctgtaggccaaatttcatttcagccacttctgcaggatccctactgccaacctggaatggagacttttatctacttctctctctctgaagatgtcaaatcgtggtttagatcaaatatatttcaagctataaaagcaggaggttatctgtgcagggggctggcatcatgtatttaggggcaagtaataatggaatgctactaagatactccatattcttccccgaatcacacagacagtttctgacaggcgcaactcctccattttcctcccgcaggtgagaaccctgtggagatgagtcagtgccatgactgagaaggaaccgacccctagttgagagcaccttgcagttccccgagaactttctgattcacagtctcattttgacagcatgaaatgtcctcttgaagcatagctttttaaatatctttttccttctactcctccctctgactctaagaattctctcttctggaatcgcttgaacccaggaggcggaggttgcagtaagccaaggtcatgccactgcactctagcctgggtgacagagcgagactccatctcaaaaaaaaaaaaaaaaaaattattctgtaccatcacaacttttcacaacgatggcaagccttatgtcttgggagcctgttttgctaggcaaagttacaagtgacctaatgggagctcaaatgtgtgtgtgtctctctgtgtgtttgtgtgtgtgtgtgcactca

SEQ ID NO: 9631 - DNA, 1160 bp, Homo sapiens
tagaagcacttaaattctgcagttgaagagacagattcctctcctagattttgagaggtgagaattataatgcaataaaatttatgtagttctgttctccagaagtctcgtagtgctctacaacctaaatcttgatggtcatgtgccaatcaaaagacctgacaaactcaaaaattagagattaatgttcttaaacaacaaactaaaataggttttggaaaaataaatggaaaaatttctagcctctgcaggtggactgttgtcaattgcaaacaagcttaaatttagaaatttgacatagttttggagaaatgtgatgaagtagattaaacagaaaattcagaatagcctgaatttggatctccattttacatagctgattggttaatattcttttatcatgtaatcccaggtgttgattgccaaatttattgattttttggtaattttagactgcttgtctttagggaaatcgtaaagtgaatattcttcccactaggaaacatagtttatcaatagcatatatgggttataaattctgctggtcttcatgacaccatcccatttaagttatttttcaaatttttgtgattgttattagaaatttgtgacatatgtagtgaaatttttcctcttgtgctgtagaccaaaatgtctagttaaaatccaaaactagatgagggaaatatttaatttcctgttagctagtttatacaaaactgttaacctcttcgactaatatatttaggtatcaggcaaaacattgctaatcttaatatcagtattcctacttcttagtttatctctgatatgcaccggaactatttaaacatctagtacatttagaaactacagcattgtagttaaatggactatgtaaagatgatgagttctcaaaaatgtgcaagtggtaatgtgcttattcagtattattactgtagcaatgaattactgttgtttttcatggtttagtattataaatatatatgataagaataggtgattaagattaagtattgaacctatatgataccttagagtttgccttttatttgtttatttatttatttatttatttatttacttattggacagagtctcactctgtcacccaggctgcagtggagtggggtgatctcggctcactgcaacctctgcct

SEQ ID NO: 9632 - DNA, 1307 bp, Homo sapiens
caggtctttttgtgatttctgaggttcttttttcctttggtcttttgcctttacagggttggttctggacattacacagcatacgcaactcacgaaggccgctggttccacttcaatgacagtactgtaacactgactgacgaggagactgtggtgaaggcgaaggcctacatccttttctacgtggaacaccaggccaaagctggatcggataaactttaatacctcctccaaatcatcattcaccaaccataccagagaaacatttccagttttccacaaatacttgatacaagatttaatttcattatgcacttttcaatttcctattttggatttagttttgtcaatggtagtgacttactgaacatgggcaccaactaattttgttgttgttctaccagaaaacctcagcagatgttttgatttgctgctttagttgtaataattcaatttttataggtagttgtaagaacttagtcttatttgacttttttattttatgttaatgttttcagttctcactttgaggcacatttacatcaatgcttttgttcctctcacatgctgaaagcaagatgtgttccttattgtgaagagcgacacaactgcctgctgcctttccacagctataatggacatcaggttgactctaaatcaaggatcatgtgtgcacaatacttgtggcccacaaaatttcacaatgactgctgaggaatcattctttttgcctgtaaaatataacaaagggcatcattaagtagaccaggtaattactgcttgtctctcaaggctgctgtctttatcagcactaactaaataaatttgttggttcagttgtacttgtcctgcaaatacaagaattactctctttgttggtttttttggttttggggcatacttgtttgcggggaggtaagatgggagtaaagaccaaatacatgtaatgtttaaaaaaaatgctgtgactcactgacatggtataggtgttaccagtgaggtaaagccatggcgtctgcctccttttgaatcagtatctcattcccccttagttgtaccactggaagtcacgacatgtccattatagacttacttactgcttgtgtttggcatctgagtctgaggtgtgaccctctgggatttacttggatcatcacccgcacttcagtttatcactggggggtgtgcttccacaggaggaaatttagaatcttcgctgctctgggttttaacacctctctctggcctatcctgattgataggacaagttgaaaatactgttggagtaagtaagtggagttttcgtt

SEQ ID NO: 9633 - DNA, 1175 bp, Homo sapiens
gtcattaagactcatctgctagatttggaatggccttgttgcagcttagtttttagcagtcggagctgtgaggactgttatgataaagaaaatcagaatgtattttattattgggggctgggcgtggtggctcacacctgtaatcccagcactttgggaggccaaggtgggtggattgcctgagctcaggagttcaagatcagcctggccaagatggtgaaaccccatctctactaaaaatacaaaaattagccaggtgtggtggcgggcacctgtaatctcagccacttgggaggctgaggcagaaaattgcttgaaccagggaggcagagcttgcagtgagctgagattgtgccactgcactccagcctggacaacagagcaagactccatctcaaaaaaaaaaaaaaagaatgtgttttattgatgctgatgcatggtacagttattaacttatttatgtctgccaccatctaagaaaaatttcatattgacttcctctcttcctctttctaattgaatgtctgtatatttgtgatttattcccagctcggcttaggccataccaaccatgttcgagaaccaaccctggtaacaggtctgcaagggaaaaatgttcggcagatctcggctggccgctgccacagtgctgcatggacagcaccacctgtcccaccaagagcaccaggtgaggaatgaaatattcatgctcctgcagcgtttcttttttagcagtaccccatggcactgtctgcttgccagttcccaactgtatccagcatcgttgtgaaaccatcaagccttctgccacacaaagcattctttgtgctactagcactggaagtattttcatagcaggcatttgttctgctgacatcagtatgaaccacgtcctctctgcactcccaaaagcagaatacatattacttatgcaagcaaaaatttataattttagcagcaactaagtttttttttgagatggagtcttgctctgtcacctaggctggagtgcagtggtgtgatctcagctcactgcagcctccgcctcccaggttcaaatgactgctgcctcagcctcccaagtagctgggactacaggcatgcactaccattcctggctaattttttctgtttttagtagaaacggggtttcgccatgttggccaggctggtct

SEQ ID NO: 9634 - DNA, 1185 bp, Homo sapiens
gcatggtggcatgtgcctgtggtccaagctactcaggaggctgaggtaggaggatcatttaaacccgacaggttgaggctgcagtgagccgaggtcgcaccactgcactgtactccagtctgggcgacagagcgagaccctgtctcaaaaaagaacataagaaacttgagggcctgaactgtgtcagtcagaccctatcctttcaaagatgtggatattggagaagcctcttattttgaaacaagttaccgagtttagatacaactttttaaaaaatttttatgaataaagagcctgtgatgttttgcagagaaacagcttcacactttttatttattcagaacgtggtgtacctttccagaatagcagctttagcctcagttgagttatatgtgtcattgccattccaccataataagctaaatgactgatcagaaaatataaaagcactgtgttgtgtggtgcataacatttccacatgtttttgttttgtttttttcagatcgcctgataggcttgccagaggggcgtgctcgcaatcacaatcgaccgcaacaaatccctgtcctggctggagtaatcatagaagatgtggcagttggagctgaacacacacttgctttggcatcaaatggagatgtgtatgcctgggggagcaattcagaagggcaggtaaatatttatattgcttgctgctttctcatattctagaaatctcacagtgttcctcagttggggaaagagataagctaggaaattcataatctactgcaatactccaagcacatcactttgctatgggactgattattttgtaagtctagttatgtctttctctctcgactgcggccaaagaagtattataccatggtttaaaacaattctggtagtacagcaaagtgattaaggggattggctgagtatttatgtgtgtgtcctcatacactgttaagtgcctggcatgtagtaagctgcagtatgtaaggatttgctactgtcaacattatcatcattactacagcaagatgtgagattaggtcctgggaacatcagttgatatgggaaaaagaatgaaacaataatatttttatattttataatatgatggcatacaaagtatctttaggtttttgcaggaagtcttgtcactcccattatttataggattaaactgagcctctgaga

SEQ ID NO: 9635 - DNA, 1687 bp, Homo sapiens
tacaaagtaaacttttttatgaaatgaagtcctcactgaaataagttataagtaaccatttataaactagatttattatacaaattttctgaatagcttacatcaaactacatctgaccaacctcctgtttttataagtaaaggtacacagccacacccatttgtttagttgtatcagtggctgcttttgcactatgatggcagggttgagtggttgcagctgagactgtgtgccctgcagagtctaaaatatttcctgtctggccccttacagaaagtttgctaactcctggcatacattatatattagtgaatattcttatttgaaagcatctcattgcttctgcatttagtatcacatctccccattttctcataatagactcgtttttctctgtgtttgtaatgatttctctagtttgtgtaaattattctctgtattgtgtacatgatgcaccttattttgtctacattattttccgtaccttcctcccgtctttccctcacttgcttcttcctgtgtcattctgatctttattaaagcttcccaactttttggtcgcctagtgatactccattgtataatctggaaccctgtgaaccattgccgtttgatgtggcgcgattccgaggcctgacggcttctgtgctgctggacctaacatatctcactggcgttcatgaagacatgggcaaacagagcaccaaacgacatgaaaagaaacaccgacatgaatccgaggagaaaggggatgttgagcagaaacctgagagtgaatccgctttagatatgcgaacaggcctaacatctgatgacgtcaaaagtcagagtaccacaagctccaaatcagaaaatgaaatcgcttcattttctttagatccaacactgccaagtgtggaatcccaacatcaaataacagaagggaaaagaaaaaatcatgaacacatgtccaaaaaccatgatgtagcccagtcagaaatcagagcagtccagctgtcctatctttacctcggtgctatgaagtcacttagtgcccttcttggctgtagtaaatatgctgagctgttgctgataccaaaagttctggctgaaaatggccacaactcagactgtgcaagttctccagttgttcatgaagacgtggagatgcgagcagccctgcagttcttgatgcgacacatggtgaagcgagcagtcatgcggtcacccataaagagagcattgggattagctgatctggaacgagcgcaagccatgatctataaattagtggttcatgggcttttggaagaccagtttgggggcaaaattaagcaaggtatgttatctgattttttttttttttgcttttgtgctgttgagattattttcataattgtcagaagtgatacattctgtaagtgatttgtaaaaaaaaaaaaattttttttttggtcaaagcaattttcacatcattttttcttgaaaacagttcttttttattatttttctattagtaatcttctgtctataattttgctattttaaacctataccagtgttagaacacagcaattattactacattttgtaaaacaaaatttaacttataccaaaaaaagtatttattgatctgactcaaaatacatagtattctggcaagcatggtggctcatgcctgtaatcccagcactttgggaggccgag

SEQ ID NO: 9636 - DNA, 1173 bp, Homo sapiens
ctagcagtgtcttaagtgcctagttcctttttgttcataaatgatgatctggtttaatactgcagagcattttaagctaagcattttgagaacagcttctgcctttctttttcttgtggcagcgtgttgctaaagcgcttacagagacactggtacatcaaacagggctttccctttattttcttacattgctctaatttttgtttgtttgttgtttttaccaaagcattttgctcagattcacttaatgcatgcgcgtattcaaacatgagtatccatttttcaccagttggttatggtagcagcactcagccttatctagtttcagaatgtatgctctacttgattgccattgatatatgtttattctgtttgtatataggtcctatgcacagtcaattggaatccctgagtgactcttgggctcgcctgaaacatagcagagactggttatgcaactcctcctattcctttgagtcagattttgatcttaccaagtctttgggagttcacactttgattgaaaatgttgtaagctttgtgagtggagatgtggggaatgccccaggttttaaagagccagaggaaagtatgtctacaagtccccaggcctccatcattgcaatggaacagcagcagttaagggcagaagtaagtctttgatatttactccttatgagagctctggaaacttaaaactgaaccattgaatgtatagttctagggaaaacctttccttttcttctattccttgccttcccctttcctgtacctgagcttttaaacataacattcttcactagaacagcacattattttgtttgaactagacaaaagtgcattttaaaattgtcatctctcagaacaatatactcagaagtcttcacatgtctcctacaaactagggtgagactagttgatgacaataggtcatcagagccttttttttttttttttttggagacggagtttcgctctcgttgcccaggctgtagtgcaatggtgagatcttgactcactggaacctctgcctcctgggttcaagtgattctcctgcctcagcctccagagtagcagagattataggcatgcgccaccatgcttggctaatttttttgtattattaggagagacaaagtttcaccatgttggccaggctggtctcgagcttct

SEQ ID NO: 9637 - DNA, 1158 bp, Homo sapiens
tcccaccctgctcctcctaacaataatataagctctgttagatcagggatttagttttgttcactgctatatccacagcgcttggaacagtaagtgggatctaatgaggtgcatttgttaagtaacagtttagaaagatgataaaattcaggtgttggatgactaaagctataaaaattacctctgaactgttttctgagcccttttaaatgtcaatgcatcatttttattttcagattgggacagtgcaactttaagtaatgagtcactcttggacactgtgtctagatttgttcttgcagctcttctgaaacacacaaatttacttagtcaagcatgtggagaaagccggcaagtaacttaaaactatcctcagacaaatatttgctctcatgatgtcagaaattaggtaacttttctattttggttcttcatttagatatcaacctggtaaacacttatcagaagtgtaccgttgtgtatacaaagttcgaagtcgtttacttgcttgcaagaaccttgaacttattcaaacaaggtcatcatcacgggacagatgggtaaagtttgaaatcaattaatttctatgtttttctgcaagctgtgagagctagctctaaattggtttatgtgagaaaaaaatgtgccttggttattgcatatgttcaatacatgttgagtagttcttttcctagcagaaaaaaaaaaaggaaaagatttgagatttacttaacctcacatttaccaagtgtgatattggttctaagaaactttagttggctgcataaatattaataacaaattgaatgattcaaatcatatgaatgattattcctctctttgtgctgattgggccacatttgaattatcctgtttaatttggggtgccataatttatgagggacattaagcaataccttggattgataaagtccaaaaattatgtcatagaaggactagaaagtatcaaaaatattcagcttagagaagtgaaaaccaaggagggggttgtgtgtgtgtgtgtgtgtgtgtgtgtgtgtgtgtgtgtgtcacataatagctgccttaaaaatacttaaagagcttctctgtaagagaggaaataaatgttttccttgttccggaggacacaactaggacgaaagggtaacaatcaaa

SEQ ID NO: 9638 - DNA, 1196 bp, Homo sapiens
tcacacccatcctccagtctctctaggctgagctcaggagacccagcagccacagaccacccagccaagtggccttgattatatggcagccacaaagggaactagatgtaattttctttattataatttggcctctcctgatgtctggtttcccttagatgccctgctgctttccttcctccaagcagttggtctggcctcgtttcagatccctcccatcccccagcccctggatggatcagcaggcttgctttcaccacccacctccctggcttgtagtcccgtggtccaggtgaatcaacccaggttgcccagcacagccccattcctggcgtctcatgatcctcctgccctggacctctttctcttttttttctccagaggaactgtgagagtgacactgaggaggacatcgccaggaggaaagccctccacccacggaggaggagcagcacctcctaactggcctgacctgcagtggccgccagggaggtctgggcccagcggggctcccttctgtgcagacttttggacccagctcagcaccagcacccgggcgtcctgagcactttgcaagagagatgggcccaaggaattcagaagagcttgcaggcaagccaggagaccctgggagctgtggctgtcttctgtggaggaggctccagcattcccaaagctcttaattctccataaaatgggctttcctctgtctgccatcctcagagtctggggtgggagtgtggacttaggaaaacaatataaaggacatcctcatcatcacggggtgaaggtcagactaaggcagccttcttcacaggctgagggggttcagaaccagcctggccaaaaattacaccagagagacagagtcctccccattgggaacagggtgattgaggaaagtgaaccttgggtgtgagggaccaatcctgtgacctcccagaaccatggaagccaggacgtcaggctgaccaacacctcagaccttctgaagcagcccattgctggcccgccatgttgtaattttgctcatttttattaaacttctggtttacctgatgcttggcttcttttagggctacccccatctcatttcctttagcccgtgtgcctgtaactctgagggggggcacccagtggggtgctgagtgggcagaatctcagaaggtcctcctgaaccgtccgcgcaggcctgc

SEQ ID NO: 9639 - DNA, 1214 bp, Homo sapiens
tggcgatctccattatgtcaccactgtacacattagacacgggaaaacttatgttctaagttgtctttggaggccattagcagaaatattcgttcaaaggtgggaagctgtgctggactgagtcccttaggagacgagaaagccaaaaagccctccccatgccatacctgactacctcactggcttcccatgacatcccttttcacagcaactgaaacctacttcctgtccgatcaggaagtaagaaagacgttggctgtcagcggatcccgcggagaaataattgtaaagagtctccgtgctggagaactcaagatctcctttcccctaccccttcaggattcatctttaacttatcacggatactgagtgagtcagtcgcggttaacagaccgttacatccacttctaccaggcggacactacaagtcccagaatacaattcgctgccttccgaagaaaatagctcacgcatcccagcatgcaatgtgctgacgagccgcgaagattgtttttgtcccgccgaaatcgagcaaagcacgctggaacttgtagtccttgaggccccttccctaggtccttcgagctactccgtctggccccgccttttctctgctctcctgaacctttaggcttgtctcggcccatttgaagaccaggaagttgatcaatcccgaggctgctgagagacggtggcgcgattgggacagtcgccagggatggctgagcgtgaagatgcagcgggtgtccgggctgctctcctggacgctgagcagagtcctgtggctctccggcctctctgagccgggagctgcccggcagccccggatcatggaagagaaagcgctagaagtttatggtaattaattttacccagcacagcatttggcgttataggtgcaggccggagctgaggggtgcggggatgatggcctcacctgagggctgggaggggagacctttttttttgtttgtttgtttgtttgtttttggccagatcttgtccggggcgtagcaggcgctttcttcggggtcctaagtcacgtggggggtgtgggtctttctgggaactgggctcttcgtaaacctggggcaagccgaacccagaggtcttaaaagcttcattctccacgtgtggcctacgtcttagtaaccattccaagacttgtggggagaccacaagtctagggtgcctggttaggaagcaaagctggc

SEQ ID NO: 9640 - DNA, 1310 bp, Homo sapiens
ttctttggcctgtttgttatttaacaactgggctttggttctccagggatattggagctgcttccttcaggtaggcctaacccagtgaaactcaggacagctggtgcctctccctcctgctcctgtgaccaggccacattctctttactctctgaatacagttaactgtggtgtaagtgactgggttgcagagccctcagttcccagatatgcagtgggcggcattgctaagacatgccatgcagtgtcagctgatttgtcccttttccttgtgagatcagagaggcctctgctgtcttttcctccttccagagctagcgctgaacacagcccagtttgcaaagagtctagccatgcttgggagctctgaggacaacacggcattgtcacgggcactctcccagctggctgaggtggaagaaaaaattgagcagctccaccaggaacaggccaacaatgacttcttcctccttgctgagctcctgagtgactacattcgcctcctggccatagtccgcgtaagcttctgtttccttttctcctccttcccttgatttgatttgtttttcctttgctggtccccttcccaagacagtttcatcccattatagcttgtaaataggtgtcactttttctacttttaagaggaaaggtatcctgtaaaccaagcaatctattcacctgttagctagttatcactgaatcattttgagccccacagccaagattcctagatggcatttggagaaaagaccactcttgaatttccgaataggttgccctttattgttgaggccagacagtgtcttctgtggtcctttcttgaagcaaggttgcttacagacctactctcttggtcccctggagcagtgacttcctcagtcctttggtctttgcctccttaacagtaactggtggctttgccctggttaagagctcttgctgacttccacttgtccttccagtatgggcagtcaggtaactacatggaactggcttggcattgcatggaggagtgcggccaggggactgagagagcttgtcaccagagccttcctgtgctgtgtcaccccacactggtaacattccagcctgcccctcgtcaagcacctcactctttctcctggtgatcaagcagtgtggtttccccgtgagcactcctagtgattaaggttaaggaattttgacagtagtattagctgtcgcatggcctccctaagacagaggaaagaaccaagaggaagcctggcacctacactctaagggcctaagtctgtccttgatttcgcttgggatcaggatgtgtgagc

SEQ ID NO: 9641 - DNA, 1204 bp, Homo sapiens
tcaggaggctgaggcaggagaatcgcttgaaaccaggaggtggaggttgcagtgcagtgagccaagatcgcgccattgcactccagcctgagtgacaagagtgaaactccgtctaaaaagaaaatattcggggaacttttgcagggcagtgagggagccgctggaacccggctgggcggctggccccaggcacagatccttgatccaggctgctgcttggggcctattaagcaagtccgggtgggcgtggttagtcaggccagcagcttccttccctggaaatgctgattgtggtcaaggaactggaaacaaggaaaactagcaaatagattttggggagcttcttggaggccttggtagcctagagcaggtgagtgtgtggttgggaaaaagcaatgtggccctatggtggttttaggtgttgatttaaagatttgttaagctaaccttgtgcattatttgggtgtcagtttaaaggctgggtccttagggtggacttccctgacatatttcccaggctaagctaggcctctggtttcatgttatagtaccctgctgctttcccagtagtctgcatacttgtatctatttgtaattgtaaatgtaatgttggccttttccattagatgacaagttccatgaaaatgggaccatgagtttcatccactgtattcttagctcctggcacatggcaggcactcagggaaagtatgtagccttatgaactgactgatctgagggaggcacttctgtaagccatagtattggtcactggcatgaggccacctactggatccctgccatccagccctgggagtagcatgaagcagcatggcactggccttctggaagcttggagaggagtcttacccaagctttgctcctagacattaaacttcccagctgggcactaacatgtggctgcagaacctgcccttgctcagtctgtccctggtgcagctgctgggagagcctgcctcgaggcagagccagcagagctcttgaagagctggttgtgctcctcctcaaccccacccccacaggctgccttcgaccagcgcatgaagacatggcagcgctggcaggatgcccaagccacactgcagaagaagcgggaggccgaggctcggctgctgtgggccaacaagcctgataagctgcagcaggccaaggacgagatcctcgaggtgagtccactgaggca

SEQ ID NO: 9642 - DNA, 1376 bp, Homo sapiens
agggctactactgggcaatcctcaccggggattcaacacagaccccagggcaggagctccatgtgtccatccctttcccaaaaggacccaacccacagatgcagcccagtgctcctgtccagaataaaccctgtacctccatgcctccaaggttctaaattcttccagccccctcagagcccagccaggaaggctgcacaactgccagagcctccctcccctccttcactcagtgacgtgctggtcccacccctgaggtatacagagtgcagctgaacgcaatgtccctgagaagccacatgccctggtcaccctcttcctcctcctcacccttggcccaacctgggtcttacttcaaaggaacaaaattcctgtaccccctcgtcaaatctgcattctccctgctctggccaggagtctgttagaattttggtgcctccagttttgtgtgctgttgatcacttgtgggtcttagccctcctgagccatacgctggggcctttctcctgagcggtggacctcctgatccaccatgccctcctgcttccacctttcttttccaggaggtggtgcggaaggtggagagcaccaagacagacagccgggataaacccctgaaggatgtgatcatcgcagactgcggcaagatcgaggtggagaagccctttgccatcgccaaggagtagggcacagggacatctttctttgagtgaccgtctgtgcaggccctgtagtccgccacagggctctgagctgcactggccccggtgctggcatctggtggagcggacccactcccctcacattccacaggcccatggactcacttttgtaacaaactcctaccaacactgaccaataaaaaaaaatgtgggtttttttttttttaatatataatgtgtgggcctggttcttgagcctgcagcacctcccctaggcctacatcccaacatgcctgcaactctcctgtggcaatgggtgcctgccccttccctgggatcctgcctgaaattttgacccaggagctacccaggaaaagtcaggcaggagcttttgccccctgcttctaaactttgccagctactgggcctccacatttgctccccttgccaccaccctccagtctatgttaagggatgtatctgtactttttcatagcctacctctaaattgattttttttttttttttttttttttggtagagacaggtctcactatgttgcgctggctggtctcaaacttccagacccaagcatcctcctgccttggcctcctaaagtattgggattacaggcatgagcctctgcacccagctgacttcttcctttattatttatttattttgagacggagtttcactcttgttgcccaggct

SEQ ID NO: 9643 - DNA, 1124 bp, Homo sapiens
aattctaacagactcctggccagagcagggagaatgcagatttgacgagggggtacaggaattttgttcctttgaagtaagacccaggttgggccaagggtgaggaggaggaagagggtgaccagggcatgtggcttctcagggacattgcgttcagctgcactctgtatacctcaggggtgggaccagcacgtcactgagtgaaggaggggagggaggctctggcagttgtgcagccttcctggctgggctctgagggggctggaagaatttagaaccttggaggcatggaggtacagggtttattctggacaggagcactgggctgcatctgtgggttgggtccttttgggaaagggatggacacatggagctcctgccctggggtctgtgttgaatccccggtgaggattgcccagtagtagcccttgcttccacaactcaccatgccctctagaactttgccaaacaccacatgcttgccatctagccaggctgtcttgactgtcgtgatgaagaactgggagccgttggtgtctttgcctgcgttggccatgctcacccagccaggcccgtagtgcttcagtttgaagttctcatcggggaagcgctcaccgtagatgctctttcctgggaaaaaagacagagcaggtcaggggcgctggattgcgccaaaccaagcagacattcggggccaggactgagggggcttaacctgtcctctgtgccaggctaggctggagtggactacaaggacataaaagcagcgtccttcctatcttctggcctcagagccaagccatgctgactgaggccaagtggggcatcaggccaggctgatgtggtgaacagctcacagaaggattactttgagaagatagttttgtggcttttaaataaggcgcatgttatcagctccccttagctatggcccaggcctgccacggagggactttggtggagggaagtgccgtgcaggatgcaggggagtcaacagggtcggaactctccagaaaaggaggactgctgtggctgaccagcctgttttcctatgagcacaaaagacacaggcatagctgcagaggagaaagcagccagagatgtgtggggaggggcagaaaaga

SEQ ID NO: 9644 - DNA, 1195 bp, Homo sapiens
aaaacaatacttcctgccagcagagatgtgctaaagaaaaaaaaatcattaaaacaacacaacaagacagagctattgggtgaatatagaacattgtactcaagttttaaagaattagtttcatacagttactactatttgcagatatagttactttgtggaatccaaaatttctgtaatgcgagaggtaacaaccttcaaagtagccctgaaaatctcaacaaattcaaagaatatgtattctatagaccaaaccttcgatgacagtgcaaactaaattaggactcagttttttaaaaaaatgacctttaaaaatgtttggaaatttaaaagaacacatctaaataactcttgaggttacaaaagaaataatgatagaggtttaccaatgcataacactgaatgttaattaaaaaaacaacatcaaaattgatggatgcaacttagtggttcttgggcatagcatatagtcaagtttcataaatactctgtgagagtttgaaaagaccattctctagttgagggcagtggtattaatagaggaaaagagcctcagaaattgagaactgtcagtcactcctcttgatttaatattcgtatttaaggccttgtgcaatttgtcctctgacagttgtcagtgggcactactgctcctcctgtttcttttgctttaatcttaattacataattaaagttctcttattagacactagtggttctaaaatgttagcatgtattggaattttctggagggtttgttaaaacacagattgctggctgggctcatgtctgtaatcccagcactttgggaggccgaggcgggtggatcacctgaggtcaggagtttgagaccagctgggccaacatggcgaatccctgtctctactaaaaatacagaaattagccgggcgtggtggtgggtgcctgtaatcccagctacttgggaggctgaggcaggagaatcgcttgaacctgggaggcagaggttgcagtgagcggagattgtgccactgcactcccccttgggcgagagagtgagactctacctcaaaacaacaacaacaataacaacaaaaaacaaaaaaacacagattgctggtcctcaccccctgaatttctgattcagctcatctggggtagggcctccaaatttccattttcagcagatttgcagatgatgttcatgctggtgacc

SEQ ID NO: 9645 - DNA, 1191 bp, Homo sapiens
caactcgactaactgcaacctccaccttctgtttttctattgtattatctgtccttttcttagtggtttctgattaagtcaactttatatttatttttcctattttattgatggcccatatttccaaatctgtgaatatcatctgcttttagaggcattcttgtttcttatgatctccaatttagctgtgcttaaagatgtcatataaacagatttaactgctacatttaccctccactagctatagtaatgggctgaaagctactagcagaaaagacaaggtaattatcagctagtttttctagagtataacctttcctcagaaccttgattataactaatttgtatttcttcctttcactgccttctttcttggttcttggatagtatataagttgttactgaacagaacggagcattttctcccttgactttttacattgtcattaattatttgatgttattttgatgtctttgtacgataggcacaagagaacagcaactccgtaaagaagaagacaaagtttgtcaatttatacacaagagagggacaggacaggcttgcagtcctgctccctggtcgtcacccttgtgattgcctgggccagaagcacaagctcatcaataactgtctgatctgtgggcgcattgtctgtgaacaagaaggctcaggcccttgcttattctgtggcactctggtaaattatttcttttctattttattttactgtgctttgtgttaatacgcagagccagtcagatctcaagtaatttctctttttttgtttttttttggttgagacggagtctcactttgtcgcccaggctggagtgcagtggcacgatctcggctcgctgcaggctctgcctcccgggttcatgccattctcctgcctcagcctcccgagcagctggaactacaggtgcctgccaccacgcccagctaatttttttgtatttttattagagacgggattttacagtgttagccaggatggtctcgatctcctgaccttgtgatccgcccacctcggcctctcaaagttctgggattacaggcgtcagccaccgtgcctggctttctctttttcttagtaaatttcttccctaaaatatccagtgaactcgagtgtcagggatatgattagttagaaacccaaggttaggccaggcacagtggcacacgcctgt

SEQ ID NO: 9646 - DNA, 1155 bp, Homo sapiens
ccttgaattctatgctggagttgtctggctctcttaataccaaaataaaactagaagacaggaggtgaagagcctagggagggaggaaaaaagtttatttgaacaacagcctgagcatagaggtgtctggattgatttttttctcctggatagactgtgtgcatgccgaaagaaaaacatcaggagctgtgacagatcaggttatgcaaccattttgtgtgctgagataagacagtttacaagaacttcacaagtttacaagaacccacctcagcatccaaaatatgcaactggagcctcattagtaaatggcagaataacatggaaacttctccttttcatggttagactgtgaaagtctgtctttagttcatatggtggtggtggtataaggtctctcttttatttgtggagacaccagggaggaagtgtgggagaaacttgggggtagatggccttcagttgctcagtgatgaatagcacaatttaaagcctagtggaaattcttagcagcctgagtgcaaacttgcccaggaatagccttttaggactttacaacactttgctctgactgtgtaactctgggacagtgtggcctaaaggaagtttcacatttctgagctggttttttgttgcagtctaaatatctgtacccacttttgaatagttgggttcaattgctgtcaatttgtatagtgcctaaaggtttcagcttttttgtttttgtttttgtttttgtttttccaggcaggactcagtctcatttatataaagtcagagtagggggatatatgaaactggagactttctctgacggggtttaggaagccttggctttattgcttctcggccttttggctaagatcaaatgtaggaagccttggctttgcagttagatgtttggaatagagtaagggtttttgtttgtttcttgctatagctaatctggaaaaagaaaactaggtatcccctcttttaagtcagaagtttacataaattcattttttcctaggaagtaagtgtgaaaaatttagacttcaaagcccatttatgtggatttcatttaatttagtaaattttaaaaatgcacctagccaagatcaagacagcatgggagttattctcaaaaagtcagctcaaaaagacgagtaaaca

SEQ ID NO: 9647 - DNA, 1878 bp, Homo sapiens
tcattcttaaccataagacttttccttcccaatagtaggaggaatctatactatttgtactagagatagaccctgttagagagtttttaaagcttttgctagatcatgttctgcgtctctgataatgtaagaaaaagcaaggagaaatgggggtataagtaaagttgtgctagagcttgcatctgtgatatgccaggacctgtattgattgaggaagggttgccagctgacagtggtagtagaaataggtctcttaggagtgggaaattaactctagaggactcctagttaagacttaccatggaatctctgggcaattggaaatactgtactttcccctagggagatggagtgggaattgatttttccttaggtccaatgtaacttggttagaaatacaattgaacctgtttgtcatgtctgttgtgatatgatagccccataggaagggtctgtttttgtgtgggagtttatttcaggcgtctcttgcctgtattgtttcttttaacagctttttaaattttctttttccagcaatgatgttgtccactgggcatgtactgaccaatgtggcaggtctgagaacatagctgaagctgaaaataggaaagctgggggcaaggaagagccttgaatcttgaggtgggacgttgactctaagatgtccttgagcagtggagcctccggagggaaaggagtggatgcaaacccggttgagacatacgacagtggggatgaatgggacattggagtagggaatctcatcattgacctggacgccgatctggaaaaggaccagcagaaactggaaatgtcaggctcaaaggaggtggggataccggctcccaatgctgtggccacactaccagacaacatcaagtttgtgaccccagtgccaggtcctcaagggaaggaaggcaaatcaaaatccaaaaggagtaagagtggcaaagacactagcaaacccactccagggacttccctgttcactccaagtgagggggcagctagcaagaaagaggtgcaggggcgctcaggagatggtgccaatgctggaggcctggttgctgctattgctcccaagggctcagagaaggcggctaaggcatcccgcagtgtagccggttccaaaaaggagaaggagaacagctcatctaagagcaagaaggagagaagcgaaggagtggggacttgttcagaaaaggatcctggggtcctccagccagttcccttgggaggacggggtggtcagtatgatggaagtgcaggggtggatacaggagctgtggagccacttgggagtatagctattgagcctggggcagcgctcaatcctttgggaactaaaccggagccagaggaaggggagaatgagtgtcgcctgctaaagaaagtcaagtctgaaaaggtaagaggtggccagatatggctgcccactgactgccagtcagaactgccctggactaactgccaaatactatgtgtactctgtgggaggctcattagtgtgtgggtaatgaccaattacaaggtcagagcagctggtaatgataatgtggttttcttccaaattagaggattcccctacagactcatttacagcaggcctggacattgtggaacaggatatttgttgttgggggcagctactttgtagaatgaactttctgtagtctgagttgagaccttcccaccttgtctttgcccacctcagacacttgttggtagagattggcatcagacctttatttgtttcccagcttgactggcatttcatcatcagactcataatagttgataaacaatacgcctttggtgataatgtagattgagtacggttcttgatgggataaatggtgctgttgggtctctggtaga

SEQ ID NO: 9648 - DNA, 1211 bp, Homo sapiens
gaaacaagcaatgatgcctttgattctttagaaaggaagtgtatggaaaaagaaaaatgtaaaaaaccctctagtttaaaacctgaaaagattccttccaagagcctaaagtcagcccgtcccattgcccctgccatccccccacagcaaatctacaccttccagacagccaccttcacagcagcgagcccaggctcttcctcaggcttgaccgccacagtggcacaagccatgcccaacagtccccaactcaagcccattcagcccaagcccactgttatgggagaacctttcacagtcaaccctgccttgactccagccaaggacaagaaaaagaaagacaaaaaaaagaaggaatcttcaaaggaacttgaaagtcctctgacccctgggaaggtgtgtcgagcagaggaaggcaaaagcccattcagggaatcttcaggagatgggatgaaaatggaggggctcctaaatggctcatcagacccccaccaaagccgactggctagcatcaaggctgaagccgacaagatctacagtttcacggacaatgcccccagcccttccattggaggcagtagccgccttgaaaacactacccctactcagcccctgactcccttacatgtggtgacccagaatggagctgaagccagctcagtcaaaaccaacagccctgcatactctgacatctctgatgctggggaggatggggagggcaaggtagacagtgtcaaatcaaaggacgccgaacagttggttaaagaaggggctaagaaaactctttttccccctcagcctcagagcaaagactcaccatattaccaaggctttgagagttactattctccaagttatgcacagtccagccctggggctctgaaccccagcagccaggcaggagtggagagccaggccctgaagacaaaaagggatgaggaacctgagagcatagaagggaaagtgaagaacgatatctgtgaagaaaagaagcccgagctgagcagttccagtcagcagccctcggtcatccagcagcgtcccaatatgtacatgcagtccctgtactacaaccagtatgcctatgtacccccctatggctacagcgaccagagttaccacacccaccttctgagcactaacacggcttaccggcagcagtacgaagaacagcagaaacgccagagcttagagcagcagcagcggggagt

SEQ ID NO: 9649 - DNA, 3984 bp, Homo sapiens
gcctggttatctgtccatgtttcccttgcagacaccaagtgcccggataaagtcagcttcacgggcccggactggcttacccaaggaggtgctgaaggtgccgtttagacatcagttaaatggtgttgatcatcctgtttgccgtttccaccatgactgaaggcagacccttggctatctcacctccaccagacctccggactacctgaccctacctcttcctcaggagctggagagctggtacttagcaaaaatatttattctctcagccacagttatgactattgtggcctctgtggagatgaaggcacgggaagcaaccaggggaacatggcctcagcccagagaagccactgctctgttccccaagcccttggtctgctgctggagcagtaccagcccccccgcccaccagggagggacccccacccccaagcactgggtaaggtctgaagacagcacagcagccatacccctcaccatcattaccaccatcaccagattctgcatctccctagtgctttgcaccctgggaattggcagcatgtggaggaactagaatctcaggaaagaaattgggggttgttttctacataattgtgaaaacaaggtcttcaaatgtggagacttctccccatttacatgagcacatataaacgctcacaacctagcctggaaaggaagaccaaggcatctgccccaacatggccttgagctgcctgtgaggcagggggcaggggttccaacaccagcacagggctccccagggacactgggagcaagctggtgctggagcatgaatgacgtctgtgaagtagaacctgcgtccccactaagtcctgctgcttcttattccccaactccttgcccttttcccttccctcctaaccccttggtgcctttcccagggggatccccacactggtcttgcctcttcttttccactgcttggctcttaagcctcaggcagataaactagtattccccccagcttggggaaccttggagtctgccaggtcaccttagggcaaggcccagaaggcagcccctgggagcacccagcagttcttggagatgtcctgtcatctagccatctgatatcttcctcatttgaggccacagatatatacagcccaattcctctgtctacaagtacatgattttatatagctcagtctataacctccatgtgggccaatataagctgtgtttcttggtaacacatattttgtttgaggggccactggccatgggaggttatttgttccttagaccctggaataacacatccaagccattacttattagagtctcagaatgtactcagtggagctgtgctttgaggcagccaacatttctctgctctccttagaaatgcagtctcccaatggaagctttatactctttgtactgggaaagtgaggatgatttggtagctttattggggtcatgtcttccccaaggtgtggggagcttagcttacttggcttttgaggtatcatccctctgttctcccctcctatctttccatgaccctctggattgagagagagagataaagactgacagacaccagtgtaggctggaaaagggagtgtgtgaccagagtgccaaaagtgactaggagcaggaacttggctccgactcagtttggaaaatgggaaataggggacagtaagcacaatgcccagtagtagttgatttccaaggaccctggaaccctacacttgagaggcttagggtcaccatctgctcaagaggatcccctctgatctacaggccttttccctaggtttctgcctcctcgtttttgttcaagttgggttctgagtcctccccaaaaaccattgttttagacctcttggcagggccccaaaacagcctccctcatacccatcattccctctgccttctgctgccctcatgggcagtgctctgagcagtgacctccctttcctccgtggaagtagctagtgcagacaccgtcatcccaccccacctgagtcaccccaaccaagagggtgactgaatttcagcctgattatgccctcctggggctcctgtgaggtggagccaaggttccctctctgttcctgtttgtttttaaatattgttgtgtgttttgtatctgtggcactggcctgcagcatactctgtatatattgtaaagaaaccgttaggagtaattttcttttgcattgggcaggcatggccctgcattcctgccctttccactcattctgtaacacagaggacgaacttctgtattagctgggcagccttgggttctccagaagagaacaggtttttcttttcctttttaatttttcttcttaaacatttggctctttgatcctcatatccaagtctcccctgaagagtaggagctgctcagaagagcaggtgaaagccaccatggcagatcctgatgcctgccgggcctagtcttccctctgaaataacatgaagcagcagctgtggagattcttgacaagtgctgagtgaaagatttgctgcccacctctacatggggaggagaaacacaggtgggagctacctgtggcatccatgacctagtcagagggatgagatgctcagcaggggtccccatcctatcccaccccacaaacaaaggctggaaaaatttgctaccaagggccaagaccaccagaccaagcctgtttatgagccacccctgcccaggccctcacagacattgctcacggggcttcccatagaggagaagctaaagagggagggggcctcatccccagatagatcaggcaaggcttggagagctgctctttaggatccacatcaactacttcctcattttaaggtatggcagttcccttcatccccttttcctgccttgtacatgtacatgtatgaaatttccttctcttaccgaactctctccacacatcacaaggtcaaagaaccacacgcttagaagggtaagagggcaccctatgaaatgaaatggtgatttcttgagtctcttttttccacgtttaaggggccatggcaggacttagagttgcgagttaagactgcagagggctagagaattatttcatacaggctttgaggccacccatgtcacttatcccgtataccctctcaccatccccttgtctactctgatgcccccaagatgcaactgggcagctagttggccccataattctgggcctttgttgtttgttttaattacttgggcatcccaggaagctttccagtgatctcctaccatgggcccccctcctgggatcaagcccctcccaggccctgtccccagcccctcctgccccagcccacccgcttgccttggtgctcagccctcccattgggagcaggttggggcgagctggaggcccgggctggaggggcagtgttgctgttcatagattttgttccattggcgttgctctgttgaatttaatttcagtcttcctgattcttcccttctgtaaagtgtacattaccaagttccttgtttttttatatatatatataaatatatatatatacaaactgtactctttttgcctttgtacattcaggcaagaagagaaaataaatctttttaagagacaatcacaaatctgtgagggctgctggttatttctcctggagtttgctgctgagctgcctcttccttcctcccaattttcctgttctccctcagctctcctgatcttcctggccctgctccatatgcatcctcagcttcactttccctggctgatggcaagctgttgaatccagtgtccagactacctgccttgtaacccttttctgcccagcattgttttctggcttggccactggcttagcccaggagctttactctgtgccctggcctcccctctcttcacctttagatttccattcaccgaagtggctttggacccctgggtactctgggacctgtttcctggaggccctggcttgggacactcacctgtgaaactatgcagc

SEQ ID NO: 9650 - DNA, 1789 bp, Homo sapiens
tccggctccctgaagggccgtagttcctccctctgccccgggtctcaagagcttagccgagcccagagcaggcctggctttagctctagtcccacgcctctgctcacggccgcctctctccctccctccaggtctggtcaccggggaggtggttctggtaatctgtggtggtgccgggacaggcgccccgagttcccactgcccccgggcggcctgcacagagctgctgccctccagagactgtgaatcccaagcctgactcagtggactgcttcctgttcccctccctcctcttcctcaccttgttctgcaccctcaagcctttctccaatgcctcccaggaggatttggggactttctccctggggcgcccagatccagctcggaggcctcactgggacctggcaaggcctgacctcccgcccaaacttgcttctgtagctccccctcgaggaagtgaggtgtttaattttgcatgttttctggcatgaattaagacacttatacttgtatatatgagtgtacagtttgttctcacactgtcaccatagcgacaggtcctggctcccagtggttcatcctgcctgcccctctctcctcgccccgcccctgcacccaccccgcttcagggaggcccaagttccgtggccccacacgcttccaggctcagctcccacctccacccaacagatagatggggtttgctttttcatttcacatggggctcctccgctcctgccttctcggatgggccaacagtcgtaagaaagccctctctgcccgttctgttcacctctccacagcgcaccccgcccgccgctgctcctcattctttccaaacctcgaaaccaaccaaaacgtgagaagtatttttgtaccctgtgtaacaaaatatttatgcatcataaaggatttttcatgtgcgtaccattaattattaaagcgacctcgttcgccctgtcagataagtttaatgtttagtttgaggcatgaagaagaaaagggtttccattcttcagcagtacgcctttgtgtctggcatttgtttaagaaaatgaaatgaaggaaacactgtgcaatgttttttgttttgagcatatcagtgctttactgtcagccgcagctgtgaccgtctggccatttcagacttgggagatgaggcggctgttgtcattgctgatcctgtgagaatgtgaaactggataatatatgaaatgcaaaataaaacaaaaccaaaatgactgctctcggcctttgcttcccccttccgtggacgcagactgccattgggaaggcagagccagagagatgtggagtcgggggaaggaagtgaagtgggcctggcccgctggcagctggcttgtgactgtaaaggtggtgggggaggaccttggagctcacttagcctctcctgcctccctggtttgtaagctggggaaacaaagtccagggtaagtgacttgcctaagggcctggcagttgtggctttacttcctcagtttccaggctgtcagggtagggagagactccctacaccaagagcaggcccccaggtgggaccttcctgggggaaggcggtgatatactcggcttaaccatttacggcctgtggtctttttgagtctcgctctggtaaaagaggactgaggtttgggctgttgggctctgccaggtggtgtctgtccttggcgtgcctcttgtgaggctgtgctggagggaaggctaggacctggaatcttgcccagaaggggttaacctcatccaccctgtagtctatgggctgcaactc

SEQ ID NO: 9651 - DNA, 1050 bp, Homo sapiens
atttttagtagagatggggtttcaccatattggccatgatggtctggatctcttgaccttgtgatctgcccgcctcggcctcccaaagtgctgggattacagacgtgagccatgatgcccagctaacagtaagaatctttaaatatatgtggttatataaagaatctttgagattcagtgtagccttttcagtttgcagatgagaaaacttaaaaggtaaggtctgtgctctcgggttactagttagtggagcaaatgggaatttctgcctgaagtgatgagtgctgccgcgtgatgcccaccctatgtgctagaccgcgtgattcagaacgcagggcggtggacgtttggcagtggcggaggtcagggtgggttgatgttgacagggagaagggtgtgagaatgactcaggggaacgcgggggctgatgaggtggcagcgctgggctagcacaacatacgcttctgaccttccacggtaacagccacctctctccgcaggggtatgaagggtccctgatcaagctcactgcaagacaggtaatttctctcctagggttttcttcctcccagcccagaccggctgctgagcttcaaacaagggcccgttaacccttccctaatctagaggcatctggcggtacagacttgcgctccctgttgtcctgtttctgacagagcagcctctgtaggtcccactgtctcttcactggccatctgagcccagccagctcctggtcctccctgtctgtttcttaggaatctgggagccccgctggctgaggacagtaaagcagttagctgagctctagctttttttttttttgagatggagttttgctcttgttgcccaggctggagtgcaatggcacgattgagctctagcttttaatacaaggaggccagggcccgctagcctttgggggctatttggggtctagactgatccttgggaaaatgaagttggagcagttttcaacctattgctccttgatagaaccggagtcttcccatgcccttgatacattggtgtcccctttcttgctgggga

SEQ ID NO: 9652 - DNA, 1245 bp, Homo sapiens
gggattgggcaggccttggggtggtctgcccagaactggacaatggtactgtgagtgtaaacaggggtgtgagagtccaaaggcagatcttccccaaggctaagcccagcctctgtgtgcgggctagaggggagagggagtgtgctggaaggatggttctgaaaataaatcttcggagtcgcgtagggttttcagacccgacaccacgcgccgccgggtggctgccgcagcggcggcctcctcccaccacgcccagccgtccactggatttggtatgctcagccaccaccataaacctccttcctctagcaggcaattggtacagcccaagctcctggagtagagacgcaaagaaagacacgcccattgttacgcccctacctctgagtggctggagaatttaaagatccagtcggtgattgggtgattttctgcctctagcatttgaaaaatttctagtttcggagcttagccacaggccggctacgatctgcttgttcatctgagtgtcggcacaagtgagtgtctgcccgaacccagaggtggggagcaaagagcctgatttatctaggggtttccggcgggagggtgcaaacaaatgggtcagcctgagggagcacggcttctagggtcccagggtcccccgcgatttccctagccgaatattttccacctcgtccccaccttggtggtgggaagcgcgagggcatgggaatcacactgactttgactactagccgctgtggcttatgaagggcaagtgagtttccctctcttagcctgtttccacgtctgtacacggggaagagtgagacctgcccgctgcatataagccagtgaatgtacctacaaggcagaagtcgcttattacacggcagccctctttgcatctccccacgggcgattctcctgcttcctggggagagtactctgaggattcatgtgctcgccctgggtctcggggaaggaggattctttctgcgcagggacccctgttctagtgaggtccttgcaggacacctgaggctccctaatcctcggtgcccatccgccgctctggaaattgttgtgtagcacggtgtgtgtgtatatgtgtgtgtgtgtgtgtgtgtatatatatagaaattgtatatatattgtgtgtatatatatatagaaattggatatatagaaatggaaattgtgtagcagggtgcgtgtgtgtatatatatatatacatatatatacacacacacacacacata

SEQ ID NO: 9653 - DNA, 1228 bp, Homo sapiens
gacagtcctgagcctgccaagccctctcaggctgagggcaccccaggaactcctccaaaggatgcaacaacatccacagcactgcccccctgggacctgccacctcagttccatccccgctgctcctcccttggggacttgcttggggaaggcccgcggcatcccttgcagcccagggaacggctatatcgggcccagctggaggtgaaggtggcctcggaacagacggagaaactgttgaacaaggtgctgggcagtgagccggcccctgttagtgccgaaacattgctcagccaggctgtggagcagctgaggcaggccacccaggtcctgcaggaaatgagagatttgggagagctgagccaggaagcacctgggctaagggagaagcggaaggagctggtgaccctctacaggagaagtgcaccctagggccttctgggccagaggcaccatcccttctggccatccatcaagtccatcaaggcccagccctgctgagaaatgtgcttctgcttctacagcaatggctgcaggagggccattgggcatgtcagggtttggccatgacccgaagagactcctggcgtccttcctactctgctctggccagtggtgccaggtgccacccagggctactgcctggctatctggcctggcctctgggctggggctggggctgggagcacacacgctgggacctatgtgtttgtgtggtcgttccaaactgccccagggctttgggggcggcacttggggtttctgggaatgacatcatctctgttccccatccccagtagtttacattcctgacttctgaatacagcacagctgagccccctgcagctcccatctccagctattcctaggcaaagagcctcatggctaaggcagcctcaaagccagcccctcctcccacctattctgagtagctgcagaggccttgggtccaggctctaggttcatccctcagttggggggaacgtaggacccagctggagcctcttgagggagatgagaggcctctttgtgaggaggacattagctgtgtggcctctctctctttggccctgtttccttttttgcaaaacaaggacattttctgcagccccttcctctcagtgagctatgattggagggcttaggtctggaggattcaagagtggaagaggaatttaaggggtcccctagtctagtctctgcccctggatagtgtccagccttgtat

SEQ ID NO: 9654 - DNA, 1168 bp, Homo sapiens
cctcccacctcaacctcccaagtagctaggactctaggcacgtaccaccatgcctggctaatttttgtatttttagtatacaggccttttccatatttccctagcttggttttgttggtttctttttttcttttctttttttttttttttttaagacggagtctcgctctgttgcccaggctggagtgcagtggtgcgatcttggctcactgcaacctccgcctgccaggttcaagcgattctgctgcctcagcctcccgagtagctgggactacaggcacgcaccaccatgcctggctagtttttttgtatttttagtagagacggtttcaccatgctggctaggctggtctcgaactcctgacctcgtgatctgcctgcctcggcctcccaaagtgctgggattacaggtgtgagccaccgtgcctggactggttttgttttctaatgcaatctgtgaatgatattttttttaattatataacttggatgccaagttgtattatcttgatggactgtataaattgcatttaaatacaatattttctaaatttctagctgctgtaaatattttagtctattggctagtgataacatattctgtggttagtgataattgaagcaactttttaatactcaggttcaagattgatcagtatttcagaatctgccttatatttgtttataattaggttcatctttttggcgcttctttgggaggctttttggcccagaaatttgctgaatacactcacaaatctcctagagtccattccctaatcctctgcaattccttcagtgacacctctatcttcaaccaaacttggactgcaaacaggtaagaacaaaattactttttttgttcagtgaaattttgaaaatgttggcttttgagtgtttggtacattaggaagggaagacttatatctacttctatattctgcaacttccttggctttttttttgagacagagtcttgctctgtcacccaggctgaagtgcagtggtgcaatcacagcttactgcagcctttatttcccaggctcaagcgatcctcctacctcagcctcccaagtagctggaactacaggcaggcatgcatggcaccacacctggttaatttctgtatatttttgtacagatgaggttttgccatgttgtcccatgc

SEQ ID NO: 9655 - DNA, 1120 bp, Homo sapiens
gtctgtcctccagcctcagcagatgagacttttacgcatcatcttcagcgactgagaaaactcattaaaaagcgctctgaactgtatgaagctgaagagagagccctcagagttatgctagaaggagaacaagaggaagagaggaaaagagaattagaaaagaaacaaagaaaagaaaaagagaaaattttacttcagaaacgtgaaattgagtccaagttgtttggggatccaggtatgttgctctataaccagtggagaaaatgaaaatactagattgacgctcttctcatcacgggtgatctcaagctaagaggtggtaggcaacaaatgacaccttccagatgcaattctgtgtcatagaactcatggatacagatagaacacattttctcattctgtcgtaatcataggctcagtcaccttgccttgagaaatacactgtggatatcaagcatgataacgtggtattgtgcttttctctttcagatgagttcccacttgctcacctcttggagcctttccgacagtattatctccaagccgagcactccctgccagcgctcatccagatcaggtcagaggggctggctctccatgttgtctttctcttaggtagcaggaagcacttgaagaagtgcttacattgtttaggtctattactgtctttttttttttaagttccataaggaacttaaaaaaaactatgggtttataatgtttccatgtttcaaggatgctgcatacatcttgtttagtcctcattagtccttgagaagttgatgtccctatttttataggtgaagaaaaaaactcaggttgtgacttgccctgtgttagtaggcacatatgcaaatacagaatctgtaaataatgaggattgactttatttgttatttggttatccataaggtttaagttcttcagagtttttcctctttttatatgtacatttaagaaatatagtcattttcttgattcctagaaatcaagttctgtaatagattagtatatcagtcatttgaaagctaagtcttagaatatgtagttgctgaacatcttatttggaataaaacagaaataaatagttgttctataatgttcttattaaggcatgatt

SEQ ID NO: 9656 - DNA, 1111 bp, Homo sapiens
tgtggcccgcttccagtgccaaatccatgggcttcccaaacccctgatcacttgggagaagaacagagtcccaattgacacggacaatgagaggtgagccacgtgtgggaaagacagagggaggacaaagaggtggccagtgactctggccgtagagaaggatggcccgcggctctgggagctgcagttggtgcccacaggtgcctgagatagtggtgtttctgcaaccacagtttagactgggtatccacatgactggctgggcccagattgtaggctcatggatgtgtctgaggatgtgtgcgatcgttgtcaaggctggaattgagggtgtgtccacctttgaaagtcccagtgtgtgtctgctgatgttgggatggtgcagtgcttaggtcctgggctgtatcttggatgcccagagtctttgtggctgattatgtcaatggctgtgctggtggccaactatgtccctcccctcaacaggtacacattgctgcccaagggggtcctgcagatcacaggacttcgagctgaggacggtggcatcttccactgtgtggcctcaaacatcgccagtatccggatcagccacggggccaggctcactgtgtcaggtgagggtccttcagcactttcccccaacctccccacctggcctcctcctcctccctacccttagatcaacccccttcagctggcctctgcagccttctcagccacgtgcgtgcagagtgccgggctctgtgctgcctggcgtgagggtgcacaggaatctaaggctggatctctggctcatttccccctgggaatcccatcctatgctgatctccaggacttccccattgctggcagccctgcagagcccgcagcagagggacggatgtctggaacgtcctggtctcctggtatctctctgcccacaggacctggtttctgggctggtgtttgtttcccacccgctgtgtcctgggctgtgggtggggtgaggaagcgggaaagtccccagctgaagtgaggatatgtggcgtcttcctcccaggctcgggctctggggcctacaaggagccagccatcctcgtggggcctgagaacctcaccctgacagtgcacc

SEQ ID NO: 9657 - DNA, 1428 bp, Homo sapiens
ggtgacagtgcaagaccctgtctcaaaccaaaccaaaccacacacacacaaacacacatacacacacacacacacgaggtccaaatggtagcagggatccaaagggaacacagtatgtaggtcaaactggcagtaacagtgtacagcctttgacaaactagaaatattagagtaggccaaacacacctccaaactgtaaggctgtgcacaaacataaaaaatggcagccttccatctcctgcactggctgagtccatttacttgtgtacttgttctagtgagtggtgggactgtacatttttgaatagacctcaaaaatacttcattctgctgctgttcagttggctttttaaacctgtctgcagtaggacactgaaaacagcaagaacttcggggtgaacacccgctgatcctttaacaaggatttctggcaggaaactcacaaaaaggagaactgaaaatttagacatacagttggccattgtaaaaaacatcagtttcctctcatacattccaagtaaaccaagtaaaataagtgttggagtaacacttgcataaaagaatttaaggagtgatagctctttctgttctgccattcccaacattcctgggggaaaggagactcaatgagttaatactatttcactgagcccaagatggaaacttggtttgacctaaaacatctgattaatataggctagctgatttcttaaaaattcgttgcattgaaggatattttgcatgtctgtaacacctgtcaatacttgtttgtattgatttctgatattcttgcagctgactacgtgtaattgggcagatcagctttgcagtagattatgctgcatcctcgtggcaaaattctgtattcttagtgattgttacaaacccctttattgctgtctgagaaagtgaaagattgtgtatttctattaaaacatttacaatcaaaattctaatgactgtgcttaaagataatttagtctaatggttctctgttagtgataaagacctttgttcaggcaaaatattatgtagcagttcagcatgttaaaccaaaaacagttgctctggttgaagcctgagagttacatggaaggtggtgcaaatgaaaaacactgatgatgcagacaaagccttgagaagttgcccaaagtcataaagctagctgataaattggaaccataattaactttggaatcggatcggtgatctgtcaggattacctagccagaaccttgcttaggcaatgaggcctaatcagtgtcagaaataaggaaacctcatgatttatgaatctatgccacttagaaagttgaaattatattaaagtgataagacagaccaaaagcaaacgacctttagtttcatagtgaaaccattttctagaaaatcaaatattttattttcattaaaaaaaaaccttgaata

SEQ ID NO: 9658 - DNA, 1130 bp, Homo sapiens
tctatatatatattttttattacttgggagaatgaattttaaaatgtcagtgctagtgtcaagtgttgtcctaggattgcatgttagtacccctaagcctgagtgtggggagtgagttatgcaagggtagcgtgcactgcccagactgactcatggagccttgtgcaaggagagccagagaggttcactataccatgactccaaaattgtctctattgctaatagatacgtatagtatacagggaaaacagcttataaatccaaatatcaatttaaattttaatattctacatgaaaacttacattgggaaatatgcagacaagtgattatattccaaattttacccttattttaatatctaaaatattgggtatgatgcaaattatactatagaatatttatctgaaatatgacttactggggtattctgttaatactatatataaatattcagaatttttttcaaaagtagaaaaattcccctctaaaagtacagccagatagattttcatccatattgaggaacttagctttttcaacaagcttcagaatctgaagtctgtagaatctaaaatacagaaatatccagaaatcagacaataaattgaaagtttagacatcatgagtattaaatagctttaaaaatatatttttagtcatattatttctaatgtaactttctttgggtaatttctggtaaggaaaaacatcttttggctgctagaattagttatagattttcaatatgtgtgtgtgtttgcacacattatcattagtgaaggaattccctagccagctttaaagaaggaaaaaatggatagtcccaaattaggtgtataaagccagtagagtccacgacacttggactggaggtatcttggagtcctgagacttagaatcagttcagctgcagaaaacccaccttttgagttcacaccattagtgaatagcaccatgctgaaacatttcacagcttccaactctgggaaataatggagagagtttaaaaatgtaaaacttcagttagtttggggctgaacttgcttacttgaaaaatctggtgctaggcacatatatctgcctctcctttgtaaataccactccaatattattctttactattcagatc

SEQ ID NO: 9659 - DNA, 1199 bp, Homo sapiens
ctgcaggaaaatttttgcacccgaagtattcagatccctgctaatagatcaaaaacagctatgtctaaatgtccaatatttccaatggccaggagtattagtacttctggccccttggataaggaagatactggaagacagaagctcatttctacaggcagcctgccagctactttacaaggagctacagtatgtattttggtgtatttttttatttggaaattgatcacttacgtatgattttgttccccttgtcttaagtagtcttattagctttattattgccaagaagagtctcttatcccatgatacaattatattacttttctactcatatgggaatcattgaattttttaatggcttagtattattttgcatttgccatttatggtttttatttattcaacaggattctttaggtttagaatggcaccttccaagtcccgatcctgtcactgttccgtatcttagtcctttagtggtatggaaagaacttgaaagcttattggaaaatgaaggtgatcatgcaataacagtagcagactttgtggaccatcatccaattgttttttggaacctggtatggtatttcagacgtcttgacttgcccagtaacttacctggattgattctttcttctgagcactgtaacaagtattcaaaggtatgagactaaaaattaaaaggcaatgaatgcttctgttaccattgtaatgtttgcatattcctaatgattaaaaagtaaggtctgtttttatgctaaatttattttattttattttttgagacgtagtctcactctttcgccaggctggagtgcagtggcactatctcggctcactgcagcctccagctacagggttcaagcaattctcctgcctcagcctcccaagtagctgggattgcaggcacacaccaccacgctcagctaatttttgtatttttagtagagacggggtttcaccatgttggccaggatggtcttgatttcttgaccttatgatccacctgcctcagcctcccaaagtgttgggattacaggcgtgagccaccgtgcccagcctatgctaaatatttttaatagccctctgggtcattagataaatagaattgttttagttgtatttacaaataatattttcttcttacaggctagcaataagagtcttttttttttgccttctcctaaaatttacat

SEQ ID NO: 9660 - DNA, 1206 bp, Homo sapiens
tgttggaatgtttacagtaggaaatataagtaaagtgtttagtatagtatctgtcaaatagcagacactcagtgagtgcttgctattatcattttcatcactagaattttaaatatttaagatgacttatatttgctattatattttcatggctaaaagcactttacttgtttttcagaaagcacacctgagctgctcttaatatcatctcttgaagatacaaatgaaacacgaaacattcaaagtagatgcttcaggaaaagacataaaagtgacaatgaaactaatttgcagcagcaagtggtctggggaaatagaaaccgtaatcttagtggaggggtactgatgggatttatgctcaatagaattaaccaggaagcaacccctggagatatagttgaaaaattgggagctgatgcaaaaattctttcaaatgttatctcaaaaagcacgagaccaaatactcttgatattgggaagccacctttaagatcaaaaagagacagtctagaaaaggaatctagtgatgatgatacaccttttgatggttctaactatttggcagataaagtggattctcctgttatttttgacttagaagacttagacagtgaaacagatgtatcaaaagcaggatgtgttgctacacaaaatcccaagaggattcaacgtatgaacagcagcttttcagtaaaaccttttgaaaaaactgatgtcgcaacaggatttgatcccctctctcttttggttgctgagactgaacagcagcaaaaagaagaagaggaggaggatgaagatgatagcaaaagcatttcaacaccatctgctaggcgtgatttagctgaagaaattgtgatgtatatgaataacatgagcagtcctttgacaagtcgtacaccaagcattgatttacaacgggcatgtgatgataaattaaataagaaaagtccaccattggtcaaggcatgcagaagatctagtctgcctcctaattctcctaagccagtgagacttaccaaatctaaaagttacacaaaaagtgaggagaaaccaagggatagactttggtcttctccagccttctcacctacttgcccatttagggaagaatctcaggatacattaacccactcatcaccttcatttaacttagatacactactagtacctaaactagatgttctaagaaacagtatgttcactgct

SEQ ID NO: 9661 - DNA, 1558 bp, Homo sapiens
caaatatatctcctacctttatgtatcttttatcctaactatgataggtttattcacactaagtattgtggtttcttttttccttcagagatttaccgcattgtttctcagaagcaaatgtcagacagacgcgaaaatgacatgtctccaagcaacaatgtggttcctattcatgttccaccaaccactgaaaacaagccaaaggtgcagtgctgtcagaacatctaaggcatttctcttctcccctagaaggctgtgtatagtccatttcccaggtctgagatttaaatatatttgtaattcttgtgtcacttttgtgttttattacttcatacttatgaatttttccatgtcctaagtcttttgattttagctttataaaatcatccacttgtcccgaatgactgcagctttttttcatgctatggcttcactagccttagtttaataaactgaatgtttggattcctcagttattgtttacttttcatcatggaagcctgtcactgtatgtaggacataatagaacttgatcacttgaagctcagacctattggtcttgatcaaatcaaactaagaagaccttagaaataagctaccattttgccacagagcagcttataggtaatacactcttctctcagtgcagtgtacatttccacaaatctaagaattgccctataaacatagcaggattttgagagcttgaaaattttccattattctggacatgaatttctaaaatgccttaataggtttatgtagttgagtaaattttgttttttaatttttgtaagcatcaaagttgattagagaggggggcactttttctggagaattctcttagtaaacacaaaagattgttacggtttcattagtagtatggttgtggggccataagttaaacagtgctgcctggtaggctgggaactgaagagacttgtggtattccatctcgggtgcctctgttggcaatgatcaggcagcccaaaagatttaaatgatctataataatttccaagcggtagattatgtggcattttattgctcaggcaataattggtttaatgctggtagtgtcaaattttgaagtgttaattttgtcttagaaccttccagtaagtgaaatacaacctagttttatcaccatatccaccagcaggcatggataattattttaacaatgctaatatttgagttttgcagtatattatagaatatagtccagttaaatctttggtttcagtatgtctgaagagtacagtgagaggttaatttctgctcaagtggtaccacttaaaggcatgtattcttttagtatgtaaaatgaaatagtaccttgagtttaaatagaatgcatttaggcattgtagagatctgaaatagttttcttccactacattgttgaaatcaatgaagcaattagtttctcattcagaaatgtgcacactaatatttagttttgctttctcgtggataatattaagcacttactctgcagtttcctggaagttgtgtcaactgcagtgatactattcaggatggtgggaaatcccca

SEQ ID NO: 9662 - DNA, 1217 bp, Homo sapiens
tatcactatcagacaaaaagttctgttgggctgagttggagattgccaactccacgagggcagaaattttgtctgtgttgttcactgctgtgtccttaccgtctggaagaatccctggcacatagtaggcgctcagtatttggacacttgaggagtgctagccttgatgctgccaccatctttctgtgtgaacggggacacactgcttcccctctctgggtctcttcatccataaattgaagggttggcctcatctctggcatccttttcagctttaatgagctatgatctgaagtatctagttggctgatttcatttattttattcacgaggaggggccagagagagcaggagaggatgaggtggcagatttgatttttgatttcaggtctcagttagctgtggctcaccagcacttccccagtgcagggatttgcaggcctcatctcctgcggcctctcctttctgcccgtcctttgtccacaatttcccgatatcaccaaacagcttcttggccctccctcgcagatctacaggactggaagcctgggcggggcatgaggggctcaccccattcacatagcttggtcctccctgcctccactgtctggaacctgcagctgtttctccctttggataccttctgtgttccgtggtttaaggtaaactgctggagccttcaacttgagtcccaactgctggtgctcctgtatggctgggggggagtccctggcaggaagtccctggcagtggggactctgtgctggctgccacctcaggacatctgccagcaagcctctgggggatgggccctgacatggggatgccgcgtgtgcggatgcaggccaggcaaagacttggcagtgggggtggaaggaagcgcattcttgtgttactggggggctctgtgccaagaggagaaaaataaatgtaattaccttcactactgggatcctggcagagtgaggggccagcccagcctggctctagggctctgcaggctgagggtttggtcatgctaggaggagaagcctcctttatcttctctctttcttagaggcctagggtagggccagggagggcaccctagcttcccttttgcagccagtccccccacgatgcacccagcttgtgctgatggggatgggagaatacaatccagagggcggagagatgataggtgggtgccaagtcccacctctgtgtgctgggcctgg

SEQ ID NO: 9663 - DNA, 1146 bp, Homo sapiens
tttaatgttctgcaccatgcctcacacaaaggcattcaggacatctaaatttctttcttttccagatagatttatttgactggctgcagttgtcagtatggctatgtttgtatttgtgtttgtgtttccacttgtgtctagattggtgtgtttctctttgttgtctgtgtatgtgctgctgttatccacgtgtgtatttctgagtgtggtggtgtagatagggatgtgaggacgtctgtatatgtctttgtgcttgtgtctttgcgtgttgggttgagtagcgtgctttgtgcctgtgagcagctgtgtctctgtgtgtcagtgtttccatgatggcatgactgctctatgtgtgtgtgtattgcagggctggtatgcccagagatctccagggattcaggaagcttcacagtgcacaggagccctggacctgggtcccctctaaggtccctatggtgtcctcctccccgcaaaaaagcctcctgcagttcctggagaccttcctaattgccctctgtctgttttcctctgcctcccactggaggcacatggggcctaagaatgcttccgaggtggcagggcccctggtccatttgcattcgtgtttgcatatcatttgcattgtctatacagactgtgctttcagttctgcagttttcaaggtaaaatgtagttgctcttcttgaaggtcattatattaagaatttttctctgttttattctttctggtccagaccactctcccagaaccgggagggtagggcaggatagaagccccagaagcctctgctgttccgtcagcccctcctcctggtccactgcccctccctgggcctccagcttgggggacactgtgacagtcttccactcagcgggcctggttcagtgggtagagaccctgggccctgggaggaggagcagctgcgggggagattttcttacccagaggtagttgattcggcccagatcccaagagggcagggaataacacagtccaacttgtgcctattgcctgcttgcccagtccccatgacttactcctgttagggaaggaccaccatggatgtttcaacgtctgtatacccatctttggctggggaggggccacggggctgggctggccttataggaaacaaaggagtcaaa

SEQ ID NO: 9664 - DNA, 1105 bp, Homo sapiens
cactttgggaggctgaggtgggcagttcacttgaggtcaggagtttgggaacagcctgaccaacatggggaaaccccatctgtactgaaaatacaaaaattagctgagtggggtggtgcacgcctgtaatcccagctactcaggaggctgaggcaggagaattaacttgaatccaggaggtggaggttgcagtgagccgagattgcgtcgttgcaatccagcctgggtgacagagtgagactcttgtctcaaaaaaaacaaagccttggtacatctagaatgttgtatatcaaatttgttgtagaatatgaacttttgaaaactctggtgacccactgatcctatatagcacttgttaataaaaatatatatcaagataaaagtgttcatatacatatacaccattggataaagtggtactgggaaattaggcaaaataatttatgatgaaagtttgcatttcacttggagcgcagctctcggatataggactttagtgagacctttgtgactgttcctggtattgattgcatttgttagttgtacagtgcaaccatagacagtcacacacattaaaacagatggttcctgccgacagggtctgtatagttatcagattttctgtgcgatggctccatacatgtttgtttttgttttttaacttttaacagatgtggaagaaaatacaggttccatgtagaataccctaaagttatttataaactactttcaaacatgtaaaggaatgtgatttaggccgggcgcggtggctcacgcctgtaatcccagcactttgagaggccgaggcgggtggatcacaaggtcaggagatcgagaccatcctggctaacatggtgaaaccccgtctctactaaaaaataataaaaaaaattagccgggtgtggtggcgggcacctgtagtcccagctattcgggaggctgaggcaggagaatggtgtgaacctaggaggtggagcttgcagtgagccgagatcacgccactgcactccagcctgggcgacagcaagactccgtctcaaaaaaaaaaaggaatgtgatttaaataatccgtgatttaaatttcttggtaaaatatggtatgtat

SEQ ID NO: 9665 - DNA, 1206 bp, Homo sapiens
ttgattaacctggttcctggacctgattacattgaaaatgaggatttctactgttgtgattcagtttaaagttggtttgatttcattttagtgaatttagggtattttattttgcgtatggtaaaaacaataaaaccaacagtagtggggctttttaaactggggttttaaagcaaattaaggtggctcattctggattttagtaggttcttttgttcctctcattgacttgcagcatactgagtgagaaagacctaattttttcactttataaatgaggaaattgaagccctgagaggtaaagcatgttggtgatagtcatcccgggtggctggagtgaagtgggcagagccacagtgggagggggcctcctctctagcctcccactttgattatctgtctggccccagacctggagctttctttccatgataggagtacttctttgggttgacttctctggtgacagtattgacttgtgctccccactttggaacaggaccaacttggaggccttgcagaagaagctggaggagctagagcttgatgagcagcagcgaaagcgccttgaggcctttcttacccagaagcagaaggtgggagaactgaaggatgacgactttgagaagatcagtgagctgggggctggcaatggcggtgtggtgttcaaggtctcccacaagccttctggcctggtcatggccagaaaggtgagtttgccttgattaacaggtaattggattatttctcagggtacttagaagcctggggaccagggtagaaggaagactgattttactcaatacctttttgtgctgtttgaatttttttttttttttaagacggagtttcattcttgttgcccaggctggtgtgcaacctccatctcctgggttcaaacgattctcctgcctcagcctcctgagtagctgggattacaggcatgcgccaccatgcatggctaatttttttgtatttttagtagagacagggtttctccatgttggtcaagctgatctcgaactcctgacctcaggtgatacgcccgcctcagccccacaaagtgctgggattacaggtgtgagccactgtgcccagccgtgctgtttgaattttgaatgcttgttatctatattagattatggataaacacactaatgactgtgttagtgtattaatccccatcccatctggaaaataataagt

SEQ ID NO: 9666 - DNA, 1137 bp, Homo sapiens
tgtcagatcccatgggttcagggctcagtccccaagactgcaccaccaccagttgccagtctgggcctccaaaatgtctgactgactggctttaagttgggactcccatgatcctatctttgagttcgattaatttgctggattggcacacagaactcagggaaacacttaattttactggtttattataaaggacattgcaaaggatacagatgaagagacacataggacaaggtatgggagtggggtacgaagcttccatgccttccctgggcgcaccaccctccaggaacctccatgtgttcagctgtcctgaagttctctgaacgcagccttctggggtttttttgtgtgtgtatttttttttttttttttttttttgagacagagtctcgctgtgtcgcccaggctgagtgcagtggtgtgatctcggctcactgcaagctccgcctcccaggttcatgccattctcctgcctcagccacagccgaaagttatcacttgaaagaatagttagaacattgtcactaactggtctggtattctcgatcttaggatggaggttctctggatcaagtcctgaagaaagctggaagaattcctgaacaaattttaggaaaagttagcattgctgtgagtatgttatgaagtttttcttctaagttcctcattgataagttaatgagtcggtaagaaatggacaagagaggaagatgggaagtcaatgaggggaaagtttataagaaaagtggtattttctcactagactcttccctgtctggagtctatatacactattctctctcacattagaatgagaaaagtgactttctttatattaaaatctgtgtgtcttgaaaaacgggccaggcacagtggctcgcacctgtaatcccagcactttgcgaggccaaggcaggaggactgcttgagcccaggagttcaactccagcctgggcaacatgatgagacctcgcttctacaaaaaaataaaaataaatagctgggcgtggtggtgcacacgtgtagtcccagctacttgggaagctgaggtgggaagatcacttgagaggctgcagtaagccataatccatgattgtgccattgcactttagtctgggcgacagagtgagaccc

SEQ ID NO: 9667 - DNA, 1124 bp, Homo sapiens
cagtggttccaacatggttacccaacaggcagcactggccttctacctgtgcctttccttgactggatgagagtagtactgcctttggactgcagagaagactttaaaaaaaagtagcactggctggtgggaggggtgggatggggagaggagatggctggagcaaggagccaggcatttttcttatctcaacatgtgtttgcagcctcctccaaaactgcccagtggagtgttcagtctggaatttcaagattttgtgaataaatggtaagttggctccttgttctctggaagcgtatactctggatttgtcaggctccccaccccatttctggaagcaccagcattgcttctgcaggcagagttttgccctttaccctcccgtctgatgattcttggctgctgccataagcccttttttagagtgccaagacttatgtggcatgtctaactacatcatggatgtagtagctgctccttttggtacttgctctccagggattggcacgttgctttttgaccttagtttaactcagcaagaatgtattaacttactgtgggcatgatactgtgcttagaacaggaggatgaatcaagcccaggcaatcctcggcctctagtgtgcagagaagacaggcatgcaaacatgttatttgagctagaaccagtgccaggcaacagctcttaccttgtctttcttcctttaagcttaataaaaaaccccgcagagagagcagatttgaagcaactcatggtgagtctatttattccggattcttacagtacctgtttattcatttgttcttctctgtcagtcatctgtgcagtacttccagagcccattcattccctgcccactgtggtccagctgagcctggggctgcagaataccaaacaccagtctcctttgctctcccatcagtttaagggaaagctggggtgacccccgcagcctgagtaagcatatgccagaggaaatgcctgagggggccatgggaaagaaaaggccagcccacccccttcatggggatgcggcctttccctaatactgactgcctcatcttacattcagcctccttccagagtcactctccgcctgctgtctcgtttggtggcagtggaaa

SEQ ID NO: 9668 - DNA, 1443 bp, Homo sapiens
tgggttttgtttttttgtttctttttaacaccacgtcctctcgtttccttacatgcaggttcatgcttttatcaagagatctgatgctgaggaagtggattttgcaggttggctctgctccaccatcggccttaaccagcccagcacaccaacccatgctgctggcgtctaagtgtttgggaagcaacaaagagcgagtcccctgcccggtggtttgccatgtcgcttttgggcctccttcccatgcctgtctctgttcagatgtgcatttcacctgtgacaaaggatgaagaacacagcatgtgccaagattctactcttgtcatttttaatattactgtctttattcttattactattattgttcccctaagtggattggctttgtgcttggggctatttgtgtgtatgctgatgatcaaaacctgtgccaggctgaattacagtgaaattttggtgaatgtgggtagtcattcttacaattgcactgctgttcctgctccatgactggctgtctgcctgtattttcgggattctttgacatttggtggtactttattcttgctgggcatactttctctctaggagggagccttgtgagatccttcacaggcagtgcatgtgaagcatgctttgctgctatgaaaatgagcatcagagagtgtacatcatgttattttattattattatttgcttttcatgtagaactcagcagttgacatccaaatctagccagagcccttcactgccatgatagctggggcttcaccagtctgtctactgtggtgatctgtagacttctggttgtatttctatatttattttcagtatactgtgtgggatacttagtggtatgtctctttaagttttgattaatgtttcttaaatggaattattttgaatgtcacaaattgatcaagatattaaaatgtcggatttatctttccccatatccaagtaccaatgctgttgtaaacaacgtgtatagtgcctaaaattgtatgaaaatccttttaaccattttaacctagatgtttaacaaatctaatctcttattctaataaatatactatgaaataaaaaaaaaaggatgaaagctacttttgcttttgtggtaagcttttcagtttctttagtacacaagaaatactggtttagccaagcaacactggtgagggggaaaggtgaagatgaggaggaggctggaaggcagaaacaggacaccgagttcagtgctttggactaatggggcttcctgtaatttcaatctctggactcagtccagctcttctcacccaacacccttatctgtgactcttccaaccaccttccttgtgggacctgtgaatagatcctgtatattcctttgatctcttttatacaagggaaaagcagctgatgggggactgggagcaaatctgagaaaaatgacaaaacatttc

SEQ ID NO: 9669 - DNA, 3153 bp, Homo sapiens
acataccggtttaaaaattttttaatcaaaaatatttcgtatcagtgatacaaaatgccccactttttctttcacgtgaacctttgttaaaattgcacattcttttcattctgaagtgtctgattaaattttaatcctttactaaatactaggtctgactacttaaatctgacaaatcaatcagggaatactagcgtaactggggaactattcaagtagtagtttagtatatccttagaaaacttccaacttaaacttgcctgttgcgtacccatcgcatttttatttaactgtcaaaatgatgagattccacttaattggtccgtgtttctgaaacacatgatatttgtggaaattctgacttggcaaacggaataccattttgcttttattggttgtataaaatgtttgattttttttttttctccaaaagtttcaggataaccaagtaagtgtcattggtttttgttaggtcatcgtattgaggaagttcctgaacttcctttggtagttgaagataaagttgaaggctacaagaagaccaaggaagctgttttgctccttaagaaacttaaagcctggaatgatatcaaaaaggtccgttcaatgagcacatttacagtttggtactccttgttcacagtttgtcactttgaatttcagaagataagggcagtatagctaatccttaatgtgtgagagaacaagaacctcagagcccgattacttgggtttgaatcctaactgctgtttatggctctgtgtaaccttggcaagttattgtgcccagtttaatcatctgtaaaaaggaattaaaactctgaagatctattgcagagattctatcttaatcagaatactaaaactgctcactttgtaggtctatgcctctcagcgaatgagagctggcaaaggcaaaatgagaaaccgtcgccgtatccagcgcaggggcccgtgcatcatctataatgaggataatggtatcatcaaggccttcagaaacatccctggtaattaaactgcttacatatattgactaggtatactctgcaagtctactcagcttttgttatgatgagattccacttaaggtccgtgtttctgaaacaaatgattttgtggaagttctgatttatggctgaaagagttgcaccattgatggttgaaacttcataattaataagttctcaggtaccttttatagctcttaagccataaagatgatttgtgtttcttttgttggaatacaggctccctaatttttctttccctttaaaaggaattactctgcttaatgtaagcaagctgaacattttgaagcttgctcctggtgggcatgtgggacgtttctgcatttggactgaaagtgctttccggaagttagatgaattgtacggcacttggcgtaaagccgcttccctcaagagtaactacaagtaagtatctttcatatactaagcacagatgtttatattgtggatattaacattcagaattggcttacatgttttctaaatttattcccatttccccttatgtgcagcaacagtatgccaaaatgagactcacctggtctatatttttggttttttgttttgtttttgagacagagttgttctgtctcacccacgctggagtgtagtggtgtgatcgtggcttactgcagcctccgcctcccgggttcaagcagttctcctgtctcagcctcccaagtacctgggactacaggcttgtgccaccacacccggctaattgtagagttggggttttaccatgttggccaggctggtctggaactcctgaccttaggtgatccacccgcctcggcctccccaagtgctgggattataggggtgagccaccacacccggcctggtccatgtttatgagaagtgatagtgtagtagatattttggagagcatagtggctaaaaataaagcttcagttgagcttcctgttctttggttgattacttttacatgtacatgtcaatcttttccctttcagtcttcccatgcacaagatgattaatacagatcttagcagaatcttgaaaagcccagagatccaaagagcccttcgagcaccacggtaaagtgatacttagagtgtaattctcgccccaaccctatactattggttgtttcaaaaatttgtatgtgtataatgttaagtaaaatgttgatacagtatctgcttttttatagcaagaagatccatcgcagagtcctaaagaagaacccactgaaaaacttgagaatcatgttgaagctaaacccatatgcaaagaccatgcgccggaacaccattcttcgccaggccaggaatgtgagtggagtttttgtttgtttgtttgtttttgagtcggaatctcgctctgtcacccaggctggagtgcaatggcgtgatctcagctcactgcaacctccacctaccaagttcaagcagttcttctgtctcagcctcccaagtagctggcactacaggcgcacgccaccatgtccggctaatttttgtattttcagtagagacggggtgtcactatattgttaggctggtctcaaactcctgacctcaggtgattcacctgcctcggcctcccaaagtgctgggattacaggcgtgagccaccgtgcccggctggtttgttttgtttttgtttttctcttcctgatacattaagttcttacagggatttgattcttactgttttctgcctaatttgttgcagcacaagctccgggtggataaggcagctgctgcagcagcggcactacaagccaaatcagatgagaaggcggcggttgcaggcaagaagcctgtggtaggtaagaaaggaaagaaggctgctgttggtgttaagaagcagaagaagcctctggtgggaaaaaaggcagcagctaccaagaaaccagcccctgaaaagaagcctgcagagaagaaacctactacagaggagaagaagcctgctgcataaactcttaaatttgattattccataaaggtcaaatcattttggacagcttcttttgaataaagacctgattatacaggcagtgagaaacatgacttggtgtgctctgtaaagcttggttagaatttttttaaagtgacattttgttggccataatttagactgttacattttatat

SEQ ID NO: 9670 - DNA, 3153 bp, Homo sapiens; identical to SEQ ID NO: 9669

SEQ ID NO: 9671 - DNA, 3153 bp, Homo sapiens; identical to SEQ ID NO: 9669

SEQ ID NO: 9672 - DNA, 1167 bp, Homo sapiens
attttgagttgtgcctttacatttctttctttcatttcctatagctgataaaaattattctgtaaatcttgaaaacctaaaaaatttacacaagaaaagacatcacttgtctactgtaagtgttttgcttctactcatattattttcttcaaattgttgtcaacctgccttcctagtttacaggttttttttcactcctaagatgactagatatttttctgtagtatgaaaatgtttatgtttattttcatatcagctaatgaccaaaattaaaatgccttcatgccttttagccaatctttgtggtttcaaagaattgtcttacttttctatttgggatatatggaaagtatatatcccaaaaatatatggaaagtatatatcccaaaagtatggcgtgtgtgctcttttttcttttgggacaaggatcaaaataatttgggtaatggactcttggccatgtggaagcacagctaaatgatctgctgggtacactcttttcaggtaacatccaaaggctttgcccagtatgagctctttaagtcctctgccttggatgatacaatcacagcatcacaaactgcgatcgctttggatatttcctggagtcctgtggatgagattcttcaaatccctccactctcttcaactgcaactctggtaagagtgggccctatttccttttcgggttcatgagactcctaaatgttggcttacttggttgttgctggtgctccatgcctctagccttggcacttgctgagtgtgagcttggacaactctgaaaggcccaccttgccactaacgtctcaccagggcagccagtgaaggttttgtcaggtgatctgatctatcagttgccctcagccctataataatataacttaagaattttctagtgatgaataaagtttttgagtggtggctcaagtgaatccgtgtttttgtttgtttgtttgttttgttttgagacagagtcttactctgtcacccaggctggagtaaagtggcacgatcactgctcactgcagcctcgaactcctgtgctcaagcagtcctcccgcctcagcctcctgagtagctaggactacaggcaaacgccaccacacctaattttttaactttttttgtagggacagagtctccctatgtttcccaagctggtct

SEQ ID NO: 9673 - DNA, 1221 bp, Homo sapiens
atatttttagtagagacagggtttaaccatgttggccaggctggtctcaaacttctggcctcaagtgattcaccagcctcagcctcccaaagtgctgggattacaggtgtgagccactgtgcccagccagattgattttatctatcaggtatgggacagtgctgagatggcaatcatttgaacattaaagtaatatttctggacagattttagagtgataaacaatcaagtcacaacagtttgtatactatgatgccatttttgtaaataattcataatatacattcattatatacagcaaaatcttaacattaactttaggaggggtgagattacaagtgtttttttttttaatttctgcttatttttattttctaattcttaaatcccagcacaagccaaaaagagaaagagaaaaaaaggtaattattgtagaacctgaaaacagcaatgtatggaaaccctcaaagcagaaaagggaggaagatcctgaagattctcttatgaagctccaaaattgataatcctgtctcagctctgcctcctcaggaggagcattagtagaacagcagtgatgaggacacagagggagcagacagtgggtaccacgatctccgtaaccatttgcatgtgacttagcaagggctctgaaatgacaaagagaacgagcaccacaaatgagaacaggatcattttagtaaatacagctttatcccaaaagctttaactgtattgggaaaacttaaaaaatagcatcctcaaattttctgattcttatttgccatgaaatagaacttagtaaattaaatgttatttgaaaatgttataagagctttgtaaatatttcagaaaatatgggataaatgcctgaatttggttcttctacaggtgctataataaagtccatctctcaatacttatactttctaaattcatctcagaatattagcagccatattccacagttcctataatttttactgggggggatttgtgataggaaagtccttgggaaacatttccaatctttcaaaatattattgtgtatcttaagaagtataggaacttgtatgttgaaatgttgtatggtagttcttgtatagttaaataataatctttttaagagttaatgataagcatatgttatgtgcattattaataaaatagtggccacttaggtaatacccacttttatcttgtgtgctgggtactctggttact

SEQ ID NO: 9674 - DNA, 1196 bp, Homo sapiens
ttcaaattctggcggggtgccctcctctgtagaacgaggagaaggtggcgtccttgcagagtgatcgtgaggaccaagtgagtcctgtgtgctgtgaagagtaagaagtacagtgctccacgccgggtccgtgatggttgctccacagtcagcccctcctttgggggcgtgcaggcagttgtctgtctctcctgctagcatgaagaggcaggggcagggtgtgcatggttcatgtctgcgtccgcagcatctagcacacaacaggtgctctctggcttgcactctgtggctcataacctttgttttctcctttgtgtgagcttgtgtgtgtgaaagagatgtcccgttgtgcgccatatttcctgaggacaacctggcacacggtgcccacatgactgctgaatgctggaaaccttacccagctcccactgtgcagacagcagtgcccacctccgctcctcggtgcctcccacctccccacccagaataacgcggcggtccctgtgcttgtcccgcagacgccagcatgtctccggacgccaccaagccgagccactggtgcagcgtggcgtactgggagcaccggacgcgcgtgggccgcctctatgcggtgtacgaccaggccgtcagcatcttctacgacctacctcagggcagcggcttctgcctgggccagctcaacctggagcagcgcagcgagtcggtgcggcgaacgcgcagcaagatcggcttcggcatcctgctcagcaaggagcccgacggcgtgtgggcctacaaccgcggcgagcaccccatcttcgtcaactccccgacgctggacgcgcccggcggccgcgccctggtcgtgcgcaaggtgccccccggctactccatcaaggtgttcgacttcgagcgctcgggcctgcagcacgcgcccgagcccgacgccgccgacggcccctacgaccccaacagcgtccgcatcagcttcgccaagggctgggggccctgctactcccggcagttcatcacctcctgcccctgctggctggagatcctcctcaacaaccccagatagtggcggccccggcgggaggggcgggtgggaggccgcggccaccgccacctgccggcctcgagaggggccgatgcccagagacacagcccccacggacaaaaccccccagatatcatctacctagatttaatataaagtt

SEQ ID NO: 9675 - DNA, 1306 bp, Homo sapiens
ctgccttttcctcttccaaagtcctgctgagactttggaagcctaagacgtgtgaacgctttggatgattctgagagttcaagccaacctgccctgtggccttctcgtgactttgttaggactgaggcatcttctgcctgcctggataggactgaatacaaaagtagattttttttttcatcttttttttcagttagggaaacccagttgcttgggtggatccagacaaaatggattttcatccttggattttgtgcccacgcctctgggtcaccttgtgtcccttggcaacagctgctgctgttttggtcgtgggcagaaaactaaaggccacgtcttggggaggtggctggtttggccctgtgctggtgatatcaatgtgtctgctaagccccatagattgcagtgttgcttgtcaaattgtctgctttcaccacaactgccttttagtttggaaagtagagaaaggaaaatgtttaacttagtcattccccctgtgtgtggggggttggtcactgggtgcttaaaaacactctgcaagatctggactccggggtttaaggagccctcagtctaaggagattaagccaagtgtgttttggctaatatataatcatgagcagcaacagcaacatttggcaattagagctgtatactagggacttccagaccacaggcttgcttctctgtgacaccagctctgacttgtttcaattatcaggggagctggcgtgatacacacttatcgacataaagaaggtgaaagagattggtgccaaggaagtggtaagagcttcatttagatacaccaacaaaggggctgtcaggatactctgaggtctggcaggattggcagaatttacacaagttttataacagcctctcatgcctcacctgcttgagtacctgagtaaagctgcaggtatcttccttgccagtttataagaatggaatcaaagcatttgccgctgaatgagagttggtgtgtgagcgttatatgaggaataaggagctcggcacacttaaaacttagttttctggtagacactggtagcttgtacttccaccagggaatccatgccttggcctcgttgttgggagctagaccaagcttaaagcattgcttgtttggaagggaatttgggctttcttgtgtcagagcacccagtccagtggaaaattggagaattgaagcaaacactaggtctgacacacagcatctactccctccctgtgaatctgatgttttttttttggagacagagtcttgccttgttgcccaggctggagcgcagtggcatgatct

SEQ ID NO: 9676 - DNA, 1243 bp, Homo sapiens
tacctgaaggaagcaaaggcagctggtggttcctatcttcttgcctctggcagcacctaaaagaagcctcttgggccaatgagaggatggactgtcccccacctgcagagttctgtgaagtggtgcggacgtctttgttgatctcatttggtgcctccccctgttgatggctgaggaagccaaggctctgagaaggcacatggtttacccgaggggacacaggcaaggaatctgaacccggattgcattttctgttttagggctctttgtgtgaccacggtgcttcccaggcccacacttccagtgttccaggcccttgaccaccaatcctgtggaggggtcctcagggcaggcagtgggaccacctgaggcctgcgtggggtggcctgtggtgtgagggacccaggaagtcagcctgcacctcggcgagtcagaagatgtggccatccaccaaccatcagatgttcccctacgcttagggctgtgaccagaagtggcatcaagatgggaggcgaagcttctgggaccagagaaccagctgctcctgttcatcctgcttttgggtgaatagctgatgctctgggcccctcatcccaccatcccaccccgtggctcctcctgagcagggctgagggcatttacctggctgccttctaaagcagacttggcacgagacaatcttattcaaactctgctcaaaattgctaccctgaggagagggctgtgaccaggcaggacggggtgtgataacatggaacgcagggcctgctggagcaggccctgatgagtgtaaataactgtgttagaggcaggacctgagcttttcactccataaatatatattacttctaatgtggccagggccgagctgaagatcataattatgtgagatctgctttacaggcatttagggaaatgcgtggggctgcactgatgtaggcaaagatgtggccacatacatttaacgtgtctcagaggagcctttgctttaaccctttaatcagacccttccagggtgctcctgacttgatgttccagagcgtttggagtcaagagttgcactcttttttcttgcattaaatgcacttgagttttaacccagtctctgggcggatggcagggctgcatgagggggtctccgtggatgtggataagtccagagaagtcagctgagctgactgggcaggtcttgggtaagtcacgccacttccctgagcctcagtttctccagcagtaaaatgtt

SEQ ID NO: 9677 - DNA, 1254 bp, Homo sapiens
ggtcttgctatcatgggcaggctggtcttgaactcctggcctcaagtgatcctcccgcctcagcttcctgaagtggtaagattacaggcatatgccaccacacccagcttttttgttcctttgaaagaaggcattgctaatgattgccctgaggtgtctagatgacccggccagccatccacctctgcagtttacacagcttgttgatctccacagtgagaattaacttcacaacctgggtccaagaggctggaggattgtcagtctttagaaaaaaaaaaatctattatctttagagaagatggacttgttgaggaagaagagtagacaaatactttctggaaatattttcaaagggaattagaaaaagaaaaagattttggttgtcctttggtgaatgagaatattcatcagcagaatgcctcattaccacgtcacacagctgaccaaggcctcatctgagactgtgtttgaatagaaattaaacagggctgacagtgaagtttctgcttttaattagctttcaaaggtacacctctacctgtgatgttgaaacatcttgaaaaacctctctgctctgtgcctgaatgaggggcatctagagggcttggaagagaagatgtggcacagggcagccggggagaggctggtggccagaagatggacctgagcttggtgaatttacctggcatctgagcctggcctgaacaattcagaaacctcatttcatcagtcttggagtcagggctcctgtctcttagcaaaaagctaaagcatacatcaagcatatttattgacaagcgtaaccactgtgaggttataaccagggtgctctgtctgcttatgggcaccccacccgaccagccaaatggtcagagagctgggtgggtcggggaaagggagggagggagtcatgggaagcagttgtgttgaatggctacaggccctggtggctgggtgcatccccgtatgccatccaggcccacccactgctgggccggaccttcccctctggacagttcttgcttgggcactgactgggtttgctgctgaacctcctggcctggcagctctggttgctgatccacccgcttctttctttatagagattaagagcggctccagtgtgtgtacggagagcctctttgaagcgctgttgcctttctgtggctagatccacgatcttctctctgggatcaccccataggacatttgctttccaccttctccagtcccagtgaatgcatggacctc

SEQ ID NO: 9678 - DNA, 1429 bp, Homo sapiens
gccttttgcagaacacagtagacagaactgccaccttcaattggtactttattctttgctgctgtttttgtataaaatgacctatcccacgtttttgcatgaatttatagcaggaaaaatcaagggatttcctatggaagtcctgctttattccaggtgaagggaaggaagtgtatatacttttggcaagtcatacagctcaaatgtgatgagatttctgatgttagagggagatggagaggcttcctgatgcctcatctgcagggtcctgtgcctctgaagttctagccatgaggtttccaggtaggacagctgctccccaagcctcctgaggacacaggaagagacggaaggagcaccttgacagacttgtgtgagtcttctcgaaggagggttgactcagaacccagagacaatacaaaacccctcacttcctctgagagggccaaatgctgtgagtctgaagtatgtgcctggtgtgaaatgatctatggcctgtttcttacacaggaagccccctgaacctcctgtacatgtgttcatgttcccagccagctctgagacccaggaaccaaatattccattttggcttctgctagagcagtcatggttcctctcctaaaagccatgggcagcagtttccgagggcctgcatgatccacctgctgcacgatcctatgagggcttcctgtggcacacagccctctgggtgcttgggaactagcttcaggcacagcctgattctggtgatccagtgatctatggaagtcgtgtcttactccaggtgaagggggaaaaaaaaagcctatactttggcaggttatgaactttgaatgtgatgaaatgacacgtttggctgcatttggatggtgtcttagaaccctcattgctcagacctgaaggctacttctaggagcatgaagtttgagttttgtgtttttccaaaggatacttccttggccctttttctttattgactagaccaccagaggaggatgtgtgggattgtaggcaaacccacctgtggcatcactgaaaataaatttgatcatacctaagaggttaggaaatggtgccattcccaccttagagtgctacataggtgctttgggcgtatgtaacattagtgtccttccttgaagccacaagctagttttcttagttttaaaatcctgttgtatgaatggcatttgtatattaaaacacttttttaaaggacagttgaaaagggcaagaggaaaccagggcagttctagaggagtgctggtgactggatagcagttttaagtggcgttcacctagtcaacacgaccgcgtgtgttgcccctgccctgggctccccgccatgacatcttcaccttgcagcttgtgctgagactgacccaagtgcagctagcactgggacacagatccttgtcttcagcacctt

SEQ ID NO: 9679 - DNA, 1220 bp, Homo sapiens
tcaccaagggggataccagcagcaagagagtgcacccgtttagccctggaccctgtttcttactgtgtgacttggctagagttgggagttcccccaaaataaacgtgtccccattttaccagaaccaaacctcaacacagcgaagctgtactgtctttgtgtggcaaagatgttcccttgtaggcccctttcaggtaaccgtcttcacaatgtattttcatcacagtttaaggagcatcagccgcttctcaagtgggtagggaaagcagaaaaacgtacgcaagaggacatggatccaaaatgatgatgaagcatctcccatggggaggtgatggtggggagatgatgggctaaacaggcaacttttcaaaaacacagctatcatagaaaagaaacttgcctcatgtaaactggattgagaaattctcagtgattctgcaatggatttttttttaatgcagaagtaatgtatactctagtattctggtgtttttatatttatgtaataatttcttaaaaccattcagacagataactatttaattttttttaagaaagttggaaaggtctctcctcccaaggacagtggctggaagagttggggcacagccagttctgaatgttggtggagggtgtagtggctttttggctcagcatccagaaacaccaaaccaggctggctaaacaagtggccgcgtgtaaaaacagacagctctgagtcaaatctgggcccttccacaagggtcctctgaaccaagccccactcccttgctaggggtgaaagcattacagagagatggagccatctatccaagaagccttcactcaccttcactgctgctgttgcaactcggctgttctggactctgatgtgtgtggagggatggggaatagaacattgactgtgttgattaccttcactattcggccagcctgaccttttaataactttgtaaaaagcatgtatgtatttatagtgttttagatttttctaacttttatatcttaaaagcagagcacctgtttaagcattgtacccctattgttaaagatttgtgtcctctcattccctctcttcctcttgtaagtgcccttctaataaacttttcatggaaaagctcctgtgccaggagctcagtctgattcttgctgctgtctctgggtggagagaagatttaaaagggagccgaggcgggggtcccagggacttcagggctcag

SEQ ID NO: 9680 - DNA, 1291 bp, Homo sapiens
aggcaaaggatttctattccagtgggaagaaaacctctctactgagttgtgggggatatgttgtatgttagagagaaccttaaggagtccttgtatgggccatggagacagtatgtgataacataccgtgattttcatgaagaaattcttctgtcttagagttctcccctgctgcttgagatgccagagctgtgttgttgcacacctgcaaaacaaggcacatttccccctttctctttaaagccaaagagagatcactgccaaagtgggagcactaaggggtgggtggggaagtgaaatgttaggcgatgaattcctgagcaccttgtttttcttccaaggttcgtagctcctctctgcccttccaagcctgtaacctcggaggactatcttttgttctttatcctttgtcttgtttgagtgggtcagccccagaggaactgataagcaaatggcaagtttttaaaggaagagtggaaagtactgcaaataaaaatccttatttgtttttgtagactttgtaatgcatatcattagccctcactgtgatcattactgctgtggctctgaactggcacatagtacagtggatggaaggtgcccgcacaccagctgagaactggttctggcctaggtgggctctagaaccatttacacagcatgaaagaaacaggttgggttaggagcagaaagaaataaggctcacacccctccagacactaccttataagcactgcagaacctgaaacagatggcagaaggaatggaatgctacaggggccagcaggagtgaccacagggaggggacagctcagtgactggagcattcaggaagaggctttccagggaacactggacattgcttagtgaccttttgttcctttttttttttttttcttttactgttctgaaagactttgagtctgtggttcaccaccagcccatcagtgtttctttgaggtgattgcattagggaagttggctctgggattgcaaaaaaaaaaaaaaggtggaacatgttttccttaaaagatggaaggttttagaaaatatactaggccatctggttagaaaaaacagaccagactagaaaaagctgtgaatttgattttgtagattaaacaaagccagatgattaaaatgtgatttatttataaactgtgctaatgtctattattatgattttgtggttttttattagggggtatgagtgagggaagccctatatccttcattggattagacatatatagtgaatagtggaagagtctgtcaagctcactattttaga

SEQ ID NO: 9681 - DNA, 1264 bp, Homo sapiens
tactttgacagcacacaagtaagactttgttttctatgaaggcttgaataagaaattattgcatgccttctttttttcccattacattttgtctgactatctcttttctgtttttgtttgtttatattttttgttccctctagaaatcgggccttgatagtgtctcctcatggcttccactggcaaaagcatggttacctgaggtgatgatcttggtctgcgatagagtgtctgaagatggtaaggcctgtggatgggacagtagttggtacatgcatttgccattccttgataaacagagtacatctgtttctttaacttaggacatacatcccatgtgactttatggctttatgaaaatattttcagctatttttctttggaatcttgtaatacttactttttttttaagaatggatacttcggggctgagaagtcattttctttttattattttagatgcctttagaataacattgacattaagggaaacacattgagatttgtgaagaatattgcaggaatagtcatgttttattttctttttacttatgaagattcttttgcatattattttaggtataaaccgacaaaaagctcaagaatggtgcatcaaacatggctttgaattggtagaacttagtccagaggagttgcctgaggaggatggtaagtgtttatgtgttaggagaaaatatggcacttagatatgagagattattttaattcagggaagaagaatcacagcaaaattcaagaaacttttttccccagctgtttcaaggatttaagcaaaatccattgatgtaatcttataatcttacacttagtgtaataattcatttttttggttttaccacctgttttagaacttttgaaaatgtgtgtttttcttatggataaaggtatagggctgctttctaaaatctttgtcatttccataatcctttttcctttccctactgctgaagaaggagagttagaccttcgtagtagttaaagttgatgtttcttattttgaattcatagtaacctaaggctgaattcccaagaatcgcaggggacatttcaaatccatttgaatgtcttttggacatttgaagccaaaagatagaccccaaatttaatcccccacctccaccccaggtagctctgcaatcgctgtcctccgctattgctggaccttctatttcttcccctcttctactccccttccccatttcttttctcatcttttctcctttgaagtacacctgttttggta

SEQ ID NO: 9682 - DNA, 1190 bp, Homo sapiens
aagtattatctgaagtagcatttgccttgtaaaacatgtgaaatagcagtactacattaatttcctcatcggtttcattcaaatatgacctgttacccgtagcatatgaatgctttttccttgttgcctccctttggcattactattacttagataggaggactagcttgataattacacatatagagcaaaactcatcctttttgtgcaaattctttgcaagaagattacattttcttatctacctacttttcctgaaaaactagggataggatgatgggtgtatttactgttgttgtaagccaaggtttgatttcactgtcacttaaaataaactctttcttctgtagaaaccagaaatcgttgaacgtggaggagttaagaccttacattttaccttcggttaaaaaaaaatgcttttcattaaatttgtgatttgaatttcggattgagcagatgatgtcatttctgcaacttggtgtggtgtgcatgtgtgcttttaaagaacaaacgctgtagatacatggaattagttacatggccttttctggtccctttttagacgtgaagccctccaatatgctagtaaacacaagaggacaggttaagctgtgtgattttggagttagcactcaggtatgtctcttttcctcccagtgtactgttttctctgcaacaacccctttatattttcattctgttctctggattgaaaaatcacctagctgccagacaaacagaaactctgcatcttttcctcatctgggagtgtgttattcatttttaatctctgagcgagtttccttcatcagaatatgattgttcattgtttaatgacagtaaaaactgctgatattgtaattactacttacgaatagcaaacttcattgatatgcagctttgatatgaaagcgttttggccagacaaaagggagggcagagtgggagctgtgcctggggagcccaactggcccacaataaaaattaatattgggagcaacaatggtggagggccattacaatgtgcagcacaaattttaattaatttccattttggacctcccctgagaaacccagtgatagtgacccatgagcatgctgtgatgttgatttgaattgcagccacctttactcccagccaaacacgaagaccaaagcgaaggtcatcgttgtattatgagttgtcaaag

SEQ ID NO: 9683 - DNA, 1100 bp, Homo sapiens
atttgtttagtgcagattgttgatttgacaatgcacaagctgttagaataacgttaggatcgagcattagtaaataataattatagtctattctttctaatgttttgcataccattccctgcctttagattactacagtcagagcaaattcctaccaattttctttcaccttctttaaacaatatgcattttacagataccagtttagaggttttcgtcctttgtattccaacctaataaacagtttcagtgccccaacttctttataatatggatttcatccttgaatataaaataacagtacgtttcctttttgcatcatgaatgctttccaggaaggtactttcctccttcatgttccctggagcaaaatctcagttttcagggtagtttcaagttaaagatcacccctaaaaacctctgcaatttataactctgcaggtttcatgtctagaataaactggtctctttttttggtctctgtgatggttgggaaattcttgcagttagtcacatttgagaaaacttggaacaggttctagagatggagacccatttaccttgtgcattattatgctatggctggatagctcagctgttaaaacaaaggaatagggtttcataaaacagatatttgtttgtaaatgcatgtttcaatgctgcaatgagttggccacttataaataaaacatctgcagatcacacatacgcccataaatgtatatggatgtatatgttggtaaggaacaccactccagggtggcacatcataaagacaaggctaaagggtgagtactttcagtgccttgaaagcaagtgatgtgtgtgtatgtgtgtgtgtgtgtgtgtgtgtgtgtgtgtgtgtgagagaacataggtatttagatatatctctttacaactctataccctgttgtgtgctgtcccacattttaaattaataaatatcaataaatcaataaaatacaatgaaaaatgttgtcacaggaagcaccattccatacttaatttaacattatttctagtactgctcactgtttgattttaaatgaatgcattcccagaggtatagcagtggtgaggcaccactgctttggcag

SEQ ID NO: 9684 - DNA, 1153 bp, Homo sapiens
cactgagtccctggcaccaggctctggcgctctgctgggtgggagggtgggccatggagggcatctgaatacaggagtagggggggtgtgggtgtgtaaccagagaccgagagcatgagtggggtgtgcctcgtgtgcgtggattcgtgtgtgtgtgtgtgtgtgtcttgtatatgtgtgcgcagagtgcatcattttcagactctactatttccgtcaagtttctgtttgatttggatcatctcaggatcggattctgttttagagtgtttctgggccaggatccgggcccctgccctcctctgcacctgaccacactccctactcagggctagtctgttcttcccggacatcttctggtagccgtgcaggagagggctgggtggggcagaggccaggaggggacctggtgtgtcacctgcccaccacctggctcatccctcaggcccaccctgaccctacattacataggttacgtcagcctactgtggctgttgagcaaagcatttctcctttctgggcctcatttgcactagatgggcctgtggtcccaaagtaggtcagtaggttggggttgctgacaccccttgggtgcagctttgggacagatgagtggctctgtcctgtcactgccctctccctgcctgggggctatgtgcactccagacccctgcccaggctcaggcccatgaggtatggagacaccctggcccccaggagctggaggcaccgcccactcccctggcattccagctttgcaggtgaccctcctctacccaaagctctgtccccctgctcccactccagaagaactgcggcacgcgcttcgggcagcctagccacaggctttgagcgcctgcattcctgggggctggagggtggggtgccaaaggccctgagcaaaagccagagctcctctcatcaaagcctttacaaggtgctgggcccagaggctttgccttgacagagtggcccagggtttcaagggaggaggaacctccccctacctaggacccttcctgtggggggtctacagagtcagggacagaagggaagggacccacaggaagtcacagtggtgcccagggatgtgtcagcccccagccacggggacgcgggattcaagaatgaagtaaatacagtcacagcccca

SEQ ID NO: 9685 - DNA, 3407 bp, Homo sapiens
acagttgctatcattatactttgtcttcttgcttcagttaggaaggttttgatggtaaattctgtcatggtaatagatacctattttcctaacctgagattttacaaggaaggtttttaggttggcttaaatggaggtatttatttgagtgagccctaatttgaaaattaccagacttgatcctcctggtatgaatcaaggaaatactgtaccttgctcttagcaactctcagtggcctgaaagagaaaatgcacttcttcaaggtgagtgaatcatgctttttccacagttcagatcagaccctttatttttcaaactacaaggcctgcttattggacagtctaaggaatagctttgatacttggtattcagttggttccattattaatgtatattatttttatttaaacatcaaaacttaaaatatcagataatgttgcatgttttaaaaacacatttcatccctttggctacccaggaccagcactatttaagacactgcttatttataaaatgagaataatgattatatgtacatattcagacatcaaaatttaatgacattctattttgagaagggaagacaatgctgaagaaagtaaaactgttgattgaaatgctgacagggtggagaacgaatttgaagacagtggaataaactatgaactatgctaatggtaattagattttttgtttgtttagtatagtggtaaattgtgtagtatcttgctgagaatctaattctatcttgtaaaatcaatccaaatgtgtattgtgaaacacctgtataaaatcatttttgaaataagtgatctacatgcctgtttttttaaaatgtttttggtagaattgtttgaaaatatgtttagccagacccttccccaacttaatttttttttaaaaaaggaaaataggtaagaaaatgatagttctatatctcagccctctgtgaactctaggctgtctccattttgcagccactttggtcatttgatgtttactattggtatacttatgctttgaattgtaaatcttcattgatggtattacagattcaaccaaaacttctctgtcctgttcagtaattgttatataaatctggatgagctagggaggcccaggtggatgttttcattcgcaaatcatgagaaacttaagtgggttttatgcacttgatagagttggcaaaattgaactatgaagttaactatttaactcaaggaatgggcggcaaacccatcccctcgattgataaagaaggggaacatttttacattagaactgacactgaaaacatagctttttcagtccaccctggttgctctagtagcccacagcccaatcacgttaaggttctttgctgtgggaattttaaataaaccaaaccccaaagcagaccatctgtaagctttggtctgcttgtttctgagaagggttttatttcattatactaatagtggactaataattggtaattgtgagaacttaggtatgataacattgtttgaagtaaaatatgatttgggggcagcagctttctaaataccaactctgtttgacaaatgttttgaaaattaaaatttcaagtgagcaacaccctgttaagagttttcactatagttgaggcagctactttatgaataagaccactttgggttatttaagcagaagcgtttcttttttttttttggaatggggtgggatgaggagtgagttgccagacctttgattagtttgctggtttagaaacagccagtggctgaattagtgagtaaatgaatgaaagtataaaggacttgttttttatgatagattttctgtaagaatcttaaatgttccttttcaaattagatgtgttgatgcacacatgactattctgtttttctcactgactatataacattaaaaaggggttaaagaaaacaaaactctgccttttgtgctatgaaatatttttagtccagaggttttaagctgtgtgtccattcctactctgaaaatgcatagctttgttctggatgtcatctcttgaaagtagaaaactcctatgtgtttatcacattgcagggctttcttatgtatttctggcagacttgcccaaatctttagatgggctgggttatacagcatgccctcccccaaataagggatctgaaataaatactacactattgatagtggagatatattaatttttaaaactgtaaagtaaatgtggtctctaggtttgtggtgtgtacctttgtgttaatgtgtagggaagagacagtgacttgatggttatggggagtgtatcttgatgtgtgtataggggtaagtattgctaaattatttacagcttttattcagggtgagtcatgtgatgaatggcctaatcagaaaagtgaaggagcgaagatgcaagcttgccaaatgatgaaatgaacaagattttgtatctattttttatcaggtgttgtaaaatttgtgcatggctttttgttgttgttgcttagtaactggtagaggagaaaagatgaggaaagaaactcagctttcctcacagtcttttcaaaggtacacagttggggagtaaaatctgactggcctaatcgatggaaaagaccctgtccttttcaccccatcctgcaatcctccgtgcagaggaactacactgttgtattctagtaattcactgtgatttataacaaaccggtgatgtcattctattgtgcacttttgtcaaaccatttatgtgactttaataaacatagtaaacttgctgactgcaccagaggtccattagtgatttatatattgcatgacattttctatttgagtttgacatgtagagtcatttttagtttcatggcaattgacagtcctaataactcagctaatttgaaactaacaatcttgctgtgtaaaaggaaaaaatggtgtttgtgttcagtaaatgtttgaaaaaaactactttgaggtttgtgtctttattaattattcagtgtgccttagttgcgatgttcttttgttgagtgccttaaagttgtcaaagttatatatgtgcatgggaaaaaattcacgtagtaaagaaaaattcaaatatatattttaaaagttcccttttcatctctccccgcctcctatttggactctgcagagacaatcactattaatagttttttgagtagcttcccagaatgtttctgtgcacatatgtattatttctccttttcagtttttaaaatgcaaatgaacttctacctttgcaacgctattctgtatcttatctttttcatgtaatatatcttaggcattttccatttctatatgtataggtttttaaaacaacttcatagcaattaattctgttgatggattgaaaatgtatttaactagattttattgatggacttttagattttca

SEQ ID NO: 9686 - DNA, 1200 bp, Homo sapiens
gctgagctccagagagattgagagacttacctggggacacatagcaagtagcaggtttggggacaatgagaacaagtcccttgcctcctgtttgtaagaccctttccactgcccctggctgcttttcgtgacaagaaagtcagtcttgccaccacccataggacgggctttttaacatctaggggaggtcttaacataaagtagttgccatcctaagaggccttcctgggatttggggaggggtatgccatcctgcctgcagagaggctgagaccagctcttctccctcaggaggacctctccatgcccctgatcgaagaggaaattgatgggctctctggcctcctgttccccttctatgatgctgacacccacatgctctacctggctggaaaggtagtaggaggtgggggagggcccggggcagcctgtgggagagccctaccctcaatgcacccctgcacctgccccaccccctggagagtagccagcctaaccttccaagttcctgggcctcacctttcccatccacacctgccctcaagtctgacacccattcttactcaagtgtctgctaccaagaattccttcaaaggtgagctggagcgggcttttacattggaataaagatcagagcctgcagtgtagtcagtgatgaatgatggaatttgagatacccgccaggagatccttggtgaatacagccttgtttgtcagaaaggctgtctacacacacacactcacatcagcccatccacctccacctctccacccgcagtgagtcccctgtggtgcacccactaggagcctagaagccaggtttccttggtttttttaactgcccatgaggcacaggggagagctgtcttcagctggctcctgggaccaggccctgctctgccctccctacctgccaccttcctcaactccatctctcctgaccccagggtgatggaaacatccggtactacgagatcagcactgagaagccctacctgagttacctcatggagttccgctccccagccccgcagaaaggcctaggtaagtggccccgaggctgccacagctggtgtgctcatggcacgggaggacatctggcccatgggtcaccccctcccttaagtggaaaatcagactcagaaggccatagcacatgggcaagttggaacagaacctgcaagagctggccctgctgca

SEQ ID NO: 9687 - DNA, 1961 bp, Homo sapiens
cgcctaccacctcgagaactggaagccaacctctaacctcctgacctcatgctaataaaagtccccagcttctggagaccccctgccggcagcccctttccctgccaccccaggagccaggcttcccctcagctgggtgaagactacagactccctggggttggcaggggctccatctcagtggaccaggaagcaagaggggaagcgggatcccagctagacttagaacttggacttttcccctgtgaagggggctgccaggacatctcagcactcccgcctggagctctcagcatcactgaaggtaccacagtgtaagtgctggactgcaggctgcagtgatccctctttcgtcccaccccctcttccctcagcagccccggaagcctgcctcacccgacgaggacagcgagcggcccggctcctttctgtctcttcccttcccaccctcttgtcttcagggaattcagaggattgctctccaaggccataatgaccccttgccttccccatgattctctacaaagctcttgcacacccttttcccattcaatttgtgagccaggcagggtagggattagtgtccccctttgacaaatgacagaactgagggttgcaatggggaaatgacttataaagtcacccagcaggtcaacaatgggcccacgaccaagaccctgggtgttcagaccccaaggccagggcctttcccgctgcatcaagatgccaatccctttgtgggcttcaccagtgcccaagtctctatggagaatgagaactggaagccactgctaccgtctacccagcaccagtagtgccgatgtgccacactgcccagttgaggcccctcacgctctgtgcccctagatccttcaggtccccaccctcagctgtcaccaccaccctccccaggggactccatctgagatgaggcctcgtcctcctggaagctgaggctgagaagggtggagcttggccctggggaaggcagaccagggtctgatggcttctagggatgctctgcgtgtgtctcagcaccgctatctcagccactttcagccttatgcacgtagaatgaccacagccactcgcatccgtatagcactttaaagtttctgcagtcctttgacacataggatctcatggagcctcacgtctactcccttctgcagatgaggaaaccgagagaagtggcccaaggtcacgcaactctgagatgccacatttcatttgatcttgtacacattttcttttattccttcttttttcctcctttcatttcccactacgcacaaagagtttataaacactgttctcagaagagtcacagtttggggtgagatctggaaatcaagaaatgggtgtccactcttttctttcattagctaggatctactagatgcattatactccatacctgcttttcccatggccgccctacggaaaatcccatccacagaggccagggctacccaagcccctccaggtgagctgggcctttcctttatgaacctccatcctcccagccagctacagtagggcctcctcaccccgtaccccacagctagacagtgtcagcactcatctcctcctcccacatttctggagcttttttttttccttccccattgacctttgtggtcttctgtgattatttatgctgcctcccaaggatagaattgaaataaaatgttttcaacttatcaaacctgggcatagccatctcatttaaccccagtggttcctgttcttggtcaccatggtaccttgatggtcagctccccacccacagctcctttgcctttctggaatgacaacccacgtctgtacctacagatataatttcacaccttcatttatctcagcactattgacatttggggcgaataattctttgctgtgggggctgccctgtacattgtaagatatttagcagtatccctggctccaccaatcagatg

SEQ ID NO: 9688 - DNA, 2394 bp, Homo sapiens
ctcttgaagccaaaactagattgaggacagatgcaagaaaggatggcctactttgcacgtcagggagtctgctcgggaacttgttctcctcagagaatgtgcagactggagagctgcctgccttacagggacttcagatcagagttcttaacctgggtcctggaatccataaccccctgaaactgcttgcaaatattataaatgatacggacattttctggagaaggagttcaaagctttctgcagatttcccaatgagtccttgatctgaaataaattaagaacctctgctttacattcctcccgagatgtcaagtcttggtgggggctctgagaggctgggggtgaccccggcctttttgtgctctgtgtggcttcctcagcatgtcccaaggcagggcatttctaatgttctggtgtctgtcctttctcctaggaggatgaagaaggttataacgatggagaggtagatgacgaggaagatgaagaagagcttggtggtatggcagcctttttactctcagctggtagcagcctggccctttcactttggccttagattgcttagactcagaggcccctggcagtgggcaggacactcctgtcagaggcctcagattccccttccagctgtgcagatgtcttgcctcggtttccaaggatggcacagcttgctagtcatgggtcccctgacttctcactgggtgggttgagttaaagaggtgggattaataactaatctaaatgccgctttcttacttttccagaagaagaaaggggtcagaagcgaaaacgagaacctgaagatgagggagaagatgatgactaagtggaataacctattttgaaaaattcctattgtgatttgactgtttttacccatatcccctctcccccccccctccaatcctgccccctgaaacttatttttttctgattgtaacgttgctgtgggaacgagaggggaagagtgtactgggggttgcggggggagggatggcgggtgggggtggaataaaatactatttttactgccactctttatttttttcccctactttttctttgtgtccggtttttgtccctgtaaatgcgatagctaagtacacactaagtgagcatttgttcctgactctcaaagaggatggtttggagttctcttacgtttcctggtatttcccaagtctcttgggttggttggaaggctgtggctggtctcagtttggttactcaatgcccaggaggggctgagcaccagccatatcttttgctttggttcacatgatgatacctgcttttctcaggcctgctagaggcatccaacgccctggtttgtaaatagcaacctaaaggcgtattttggcactggtctggggacattccccatctctcatcccttttcccccttcacagatggtggtgggcttcgctctacaaagaggactctgatgttactcttgagcttatgagccagagagctgaaaaccgcaggcttgttgtgttaagttacaaggaaaatggatttggtaattaaaattagaagaaacacaccttcaaacttcaacttctttaaaagaaaaaaaaaactgtcctatcttgttctgtaaaatattagaacgctttgttttacaaaaaatgatgagagaattcttccacatgtacttctgtgcttagaacatttttacggacctaagcgctggagacgttgctgcatgtcggctgggttttttttttcatacacccgagcacggaaaaactaacgcaaaattgtattttcttacctagtggaaatctgaaatgactgcaaattcctagtgaatgtacaggtttgctttcgtgtccctcttctggttgctttagaagtgacgtgtaatttctgaacccatgtttcatctgtataaaagaacatctgcaccagtttttctcctgcccctcagaagagccaaactttgagttttatgtctgtttgtcattgataaatttcaataaatctttttatacaatttttttggggatggcttctttgagtccaacaggccattgatcttttcaagatgcattccagatgaactgctaggtgagggggaagcttcatttttgttacctgatagaatagcttttcttatgagatatatataatgtgatactatgtttggatatttttggtcttaaagcaagactcagtggtgtatcttcattaaaagcttcctttaaaaaagttacagagttactaaaaaaacaagtacccaaacaatcaagttgggccaaccttggaaccttgttttgaatatctttcattgttttgtttgtcgtattgtaaaaagaatgtatggttgaaaactcaggaatgtttataaaacaaattatttcacaaacccagaggtttacatatgg

SEQ ID NO: 9689 - DNA, 1150 bp, Homo sapiens
ttgatgagtccccagtcttcaaagaatttgtcaagaggtggaaaagctaccttaaaggcagcagggcaaagcacaactagagctcacaaccaaaactgcacttcagcctctgctgtacacagaaactacaggctctgtctcaggagagcataggcacattttaaaaggttatgtactaggtttttgtggattctatcaaagtgataagtgatccttaaaaccagccttctaaaataattgcattccatgggttgggtatttagaaatgtaggtggcatttagaacacaatgtttaatcaatgggctgaacaaagatgcttcactttgccttgcccatcaccctatacagtttcgcagatagtctagtcactctatgtgagaaagataatggtaagtagttgctactggccaactgtctagcacttacctgaaaacttagtatggagctcttttaaaatgtgattatttatatttatgttgaaagcggactttaaaaaaaataatgtgctgtaacacagtaaatatgtacttgtagcctggatagcagactgtgttcaactttttaaaaagatgtttcctttctaaagattaatttcttgggagcaaatgagtatttgttgcatttgttcaatttgttgtatatggtgaatatttaattatggttttcttgaaacgtgtaaattaaaaacacaatcagtgttcaggcttcagttatataatgtaagcacaactaaaatgaaacttgttgactgcacaagaaattacaaaaatgtttctgttttgaaacttgatctacaatcagtaaaagtttgataatcagtatatcccttcccaacccccattgtgacagtttctttttgtcactgtctagaattttgtattttatttcagactataccttggagttttgtatattttgagagagatatttttgggacattattttggaaacttattacaaatctaaatttggaaaggagctagtagctttaaggccaccaccatattttacttttttaggatttttccccctttaaataaaaatattagatcaaatactatatgcaagaaatcatagcaaagtttttttttcctaccaagatcattcttgatcatcagcttcccaaactagtaagtctgtgcatcattg

SEQ ID NO: 9690 - DNA, 1163 bp, Homo sapiens
aatctatagcagcattgtcagtacagaccagtggttctcaaactttaaaatgcctcagcatcacttgggagcttattgaaatgcagatcccagagtcagtaaatctgcctgtgaagtatgatagtctgcatttgtaatgagcattcaagtgattctgatgcaggtgagctgggggcatacagggaggaacactgccctggactatccattgcatttttgcctctaaacaactacagaattttctagggttttaaattatgtaaaatgtttacttattctgagcttagagagaatggggagggtatttttaaattttattgttttatttctttaagtttttctttgctttaagattataggtattaggtttgtttttgtttttccacttatcttgagttcactttgatgttaaatctattgctacttcagttgtaaaaccagccaaaagtttctggatgaaggtcaagtttgaccttttaggagttattgtacataaaggcttcatccacgaaccatccagcgcacagaagcaagtgcaaaaatgacacaagcacaactctccagacgtggctccttctcctttctcagtgcagactctcactgaaagctgctattttcatcctccttgtggttgcttttcttgtttctcttccattgtacatgtgggttatataccatatgttaaatatgcaataaagtgtttacaggatgcccttctgaagggtagtcctttgtaaagctgtacagactttgcagtttaagcacaatgtgcacatgttagttttatatacagcaaaacttgattttttgcagatggaaaggtattttgtttctatacaaagtaaatggattgtttgtgcttaatgtaaagccgctttataaaactgtaaaataaagtttttttcttaaaaagaatatacctggatatttctctttcttctcaaattattctaaggttatttgagcccagcaagcagatttctgaccatttcctgttcaacccgtgaccagaagtcaggcaacaaatgttgttcatcaaaggcataccaagccctgtcagacaatgtgtgggaacaaagagtatgcatgggctttaatcctaaggacccttagtcttcaagggggagcacaatgtatactaaaaactcgaagaaaaataaaat

SEQ ID NO: 9691 - DNA, 1161 bp, Homo sapiens
tctcatcctcctacatctacctatctcaaccaaggtcctgcgctaagcaggggcctccaagctgggacgcagcccttactctcagggtcagcgccggctgggaaggccgcgacctaaccaggagattacgaacaatgtcaccagggccacagcggagctcctgccaagtcaagcaactcatggaaccaacggaggcgaagtccgaatacctaggcaaccctaacctaaaagtgtttttaacgttctcaggtcctataatttacccaaataaagtgggaccgtatttgcaggcgctgagaaactttctcaacagtaagaaccaatcaggcgcagtgcgcaggcgccttcagtgggtcctgggtccgcctcttccgcccggtgcgggcgccgattggtccgcgtggacacataagaggctgcgtataggcgcgagagcccctttcctcagctgccgccaaggtgctcggtccttccgaggaagctaaggctgcgttggggtgaggccctcacttcatccggcgactagcaccgcgtccggcagcgccagccctacactcgcccgcgccatggcctctgtctccgagctcgcctgcatctactcggccctcattctgcacgacgatgaggtgacagtcacggtgagtgcgggcgcgggccggcggccgggctgcctgtgggcggtgactttcggctctccatgcggttcccggctccaggccgttcgactgagcacttccggccggggccaggccgcgaacacaggccgcatagggcgggcgctcctcggggctggggcctctctccgggcaggtcctgggcccccgggaccacgtgcgggcccagcgggcatggagtgcgcttgaggctgggcgctccggctccaagagccttcgtgtagaaaagctcttccgcagtgcttgggcaccctgacccgtgcctcgtctctctcagggacacttactcggacctctttcggtgtaattgccttgaattcccccggtcgtggaggaaggcgcccgagctcggctccacctcccaggtcttgtaacttaaaaatagccgcgtgactcaggcaagtcccagcccgtgaaacagcagtgatgggctcgcctcattgcagggcgcctggcacacatctcttttgcttgtgatagaatattt

SEQ ID NO: 9692 - DNA, 1349 bp, Homo sapiens
gagacatggaactgtggaaagaatattcatttgagtgtttcaggaagtttggattttttttttaccaacatattatttgtaaaaggagggaaatcagctgcctcaggaggttcttaacatataggaatgtaattatcagattcaaagctgaacagtagtgcgttgccctgtaacctaagtcttggctgttagcaaagaaaagccagtgtctggggtattggttccaggaccttccactaataacaaaatcccaggatgttccatctcttatataaatgtatttgcatataacctatgcacatcctcctgtatactttagaagtctacatgtttggtacacatgcttatttttccactgttgaatccatggatgtggaactcactgtatatagtgttaggggttgatcactgtaacctggaatgggggatacttttcgtttttggctgcgtgagtgcttaacaaggacagaactgggcgtttacctatgcatgcacatgtattgcaggccctggccaacgtcaacattgggagcctcatctgcaatgtaggggccggtggacctgctccagcagctggtgctgcaccagcaggaggtcctgccccctccactgctgctgctccaggtaggaaacatggagtttttagtattgggaggagtgtagagattttttaaaaaatagtattatagacaaaattgccattaatttttcacaagtatatgaagtatggaaatcctaacacctgattgactttttttttctagctgaggagaagaaagtggaagcaaagaaagaagaatccgaggagtctgatgatgacatgggctttggtctttttgactaaacctcttttataacatgttcaataaaaagctgaactttactgctgttggtcttgtccatagttttggaatgtgctctgcaaaaatggtctgttttgtaatgttggctttcagcctattctgccatgacacaggctggattttccctgccaccattgccggatgtgagatttagacaatcctgatgctaacaagaaggcacctcatggtacagtgttgaaaactgcactggggtggcaggaggaaggatcagagcagatgctttgtccaggttacctgtgtaaacttgatgattataaggtgtgtcccctacactgggggtggagggtaatacagaccagctttagaaagcctcctgggtatttaccctatacaaccctgcctaagaacgaactttgacgtatgctgaatgttgactgctacatcccaaggttgtaaaaaaacaagacttagctatgtaatgtctcaccaaatgtttgggagttttatggtaacactgaaggagtg

SEQ ID NO: 9693 - DNA, 1128 bp, Homo sapiens
aactgatgtgggtgctttttttttttttttaatttgaataaaaagaattagaagtgatgtccttttataaaatgccttctcccccttcccgcctacagtctcttcctctccccttagaggggggaaagtgtataaacctacagggttgtgagtctgaaaagaggatccccctcacccccaccctgggcagagcagtgggggttggggggtgggagagggggacacagatcctggcacactgtggatatttcttgcagattgcagtctcttgtggcccaaacaggttaggtagactatcgcctctggcaggtgccaccttttggtaccaacatgttctgaggtgttaggatttgggttgggttttttttgtttgttttttttttccttttggtctttttttttttctccttttaaagaaaagctaaaggccgctgtgagtcctggtggcaggctctccatggatgtagcatatcgaagataatttttatactgcatttttatggattattttgtaatgtgtgattccgtctgctgaggaggtgggaggggctccagggaaagccacccaccttcagtgaggttgctccccagctgagcgcaccgggcatgggatgtggaggctggcgacacaccctgtgcctctccaaggctgggcgcgtggggcgtccagagtctctctgggtctcagatgtccatctgccacctcttgttaaggctctagccagaagggagggtgagggtagaagaaagttattcccgaagaaaaaaagaatgaaaagtcattgtactgaactgtttttatatttttaaaagttactatttaaaggttggtttgattgttgcgtcttaattgcctctccccccagtttgccagtcccgccccccgccccccgggaaaacagccaggccactgttgctgtcacattctggagcctgggccagggccatttcccatcgatgtgagctcttctcatctcacagcattccctgcgctgcttccacccccttctccccttccagatacccagcatcgcagcagggatttcacaatcccatactgtgtcgcctcccatccaagcgccagggagggtggggggtaggagctaagacttcctctggacagatggg

SEQ ID NO: 9694 - DNA, 1246 bp, Homo sapiens
agtggccacggccaagagacttgggaccaacctgagccatctgggaaggcttcctggaggaagcagcagtgaaacagatggagatgaccttggggttggacacatttggcccaactgtggaaattcgattcattctctgctgctattgagcactttgtcctcggcgtcctcattcacaagatggaaataatagtagcaccctcctaggtctgatgtgggcacctgaaatgatccctctaaaaggcgtagccataaacccgactcacagaaagcattcagtaaatgccagggattattatttcttatttgcattcctcactttaatattttaatcttaaatttttaatattttagttttttttttttaactcacttttttcttaaggaaagatgaaagtctcagagacagagtaactgaatgcaaaatgtctgtgctttctcacctataaaatggggatggaaaatgacctcccatactcctgggttattgggtgggtggggagggaccctgagcctcagaggacctgagcagcacctttgggagccgccctcctcttgagggcagagaatgctgagctcagtccatctgccctcccaccacctgcagatcttctcgctgggctactgccccactggggagtggctggctgtgggcatggagagcagcaacgtggaggtgctgcaccacaccaagcctgacaagtaccagctgcacctgcacgagagctgcgtgctctccctcaagttcgcctactgcggtgagccttggatgggcccaggcctgatggagtggggtggggaacccagggcagcctggcccaacaggacagaagaggggcccaaagcttatagaataagctaggccctggaaccaggcctcctgacccctgagctggtgccccttcaacacccttaagtgatcttgttccacatccttgtttctcggatgcagatgtcaccatgagttattgaactctcaggacactaggccagagccagttcttgcaggcttggggcaaaggaacaggacagtagcagtgcaggcagttcctctccatggttacaaccacttgctttggcatctgagagccttggatgggaatgtctgctcctccactgacaagctgtgcagtcttgaacatctcaccctctctgaactctagtggatttttctctctggtcgggaatagcatggtgctcatggctttcagggagcataagggctttaacacttgtagagccctgg

SEQ ID NO: 9695 - DNA, 1122 bp, Homo sapiens
ctggttcctttcccctatttacccaactttgacctttggctttcctcctagcaggaggtttggattttccctctggccaggctttcattcctttatctactaagtacttatacaggacttactggtgccaggctacatttatggaggcacaaagagtgtctcctatctggaagaagaggccattagacaattcactgtgtgtgtgtgtgtgtgtgtgtgtgtgtgtgtgtgtgtgcgcgcgcgcgcgcgcgggtggagcgggggggtggttgggggtaggaagatgcacagaggaataaattgttgtccttgaactctggcaactaaccagaggtcagccaatagtattttatccttaattgatttatcagattaagctttaatggagcagggaggaagtaggagcaagccaggaagccattacaatggaagagattgtgctcaagaattccatttgatcttcaaacaaccccaagaaggaggggttttccccattgtccacccagggaagcaggctcagagaggccagctgactttcctaaggtcacccagctggcagtagagggtcctggcagcctgatggcattgttgggtgcactcctgaggccacgctgatcccagggcagggaagaatgccaggcacccctggtcaatgtcgcttcctgatcagccttctaaggatcgtccgggtctgcaagtcccttccacgggttgactaaagctgcctctttgctctggaaaccctctaccttccctcactggctcatcttcctggcttctctttgccttggccctgggggcggaaggggaacagctgagttgtcatctaagcttgcatcttccagggcagcagaggaaaaggacattgatttatgatcaaaaaggcgaaggaggatgccgtggggaggacgctggtcggcaggggtgggtgggcgataagagagaactagaaagaataaaaagaatccctaagccttaaaaacagagcttgccctctgattcctgggtaggcgtgggttgaaaatctttcatgtaaaactgaaatggaatcacgaatgaggagaaatcatcttggggcttgggtgtgccttacaggactgaattaaatttaaaatgtattga

SEQ ID NO: 9696 - DNA, 1180 bp, Homo sapiens
gcagctgttgtgcactagtctttttgttttttcagatggggtctcgccatgtcacccaggctggagtgcagtgccacaatcttggttcgctgcaacctctgcctcccaggttccagcgattctcctgtctcagcctcccgagtagctgggattacacccgtctaatttttatatttttaccagagatggggtttcgccatgttggccaggctggtctcgaactcctgacctcaaatgatccacccacctcagcctcccaaagtgctgggattgcaggcgtgagccaccacgcccggccgtgcactccttattaattgatcttattttcatgatagggctgtactcccttttccagtaattcctttagaaatcacaatgatgaggatttagcatttgatgaatcaatgactagttatgctctgtaaaagctttatctttagaattcttatgtaaacaaagatgacataaaataatgctcctctttcttctttctccgaagggtcacatggatgaagatgttcaggaggctctgctccagatcatacaaatgcggcaggggcttgtgtgctagccgttagcactgactgccagtatctgttttatcttgctggtgctgaacattctttgtgcaactccatggtctttctgggccttactgtgctggtataattaaaataaaatatattttgttctattggtaggtttttttttaaaattagatgaatatgttagtctttttcaatatcagtttgaatcttattttctgtatgtgttaattttacaaataggcaaacaacataactttgccctggattgactacatatttttaaaccttcaagtccctaataaaacatgagccatctgagtgagtccatatgaagcgaggttaggctgaaataattgcttaaagatgtctttcagagaaattaatttggttggtggccacttttaggtggatcaaaagacctttcagatcctcagaaccttgagacataatacagttgtgaggaatgtgttgtaacttggctggccaagttacatgttacagtatctttactgaggtaacttcattagtgtctttggccttttttgtaggtatagatattttttctttttacactaataacttttatgccttttaaaataaatttattttcataaatggtttgcagtgctaaa

SEQ ID NO: 9697 - DNA, 1147 bp, Homo sapiens
catagaaataataaatatgttttgataaagttgatgatattcatgtgtgggtaggtgttaatgaatgggggaagaaagacaaaatagcacccagtagccatggccattgtccgttgttctgccagaaatagacttacgtgaacagaactctcaaaatgttgtgaatgtattaaggaaatcatatccagaactgtttccttaccacaaaaatcagcattgtgattttttttccatcttactgcctaatctgaaaaccctttgattcctgatgatgtgctaactttctctaagtttggcaaataagtatagtaaatgtctcatttaggcttttgtgattgatgtctttttttttttcttttcagtgtacttccccaggtataccagcccatatgcaaagcagatctatgttaagacctctggaactatctttacccagtcaaacgtcatactctgaaaatgaaattttaaagaaagagttagaagcaatgcgaactttctgtgagtcagcaaaacaagaccgactgaagctccaaaatgaactggcacacaaagtggcagaatgcaaagctttagcattagaatgtgaaagggtcaaggaggattcagatgaacagataaagcaattagaagatgcattaaaagatgtgcagaagaggatgtatgagtcagaaggtaaagttaaacaaatgcagacccattttcttgcccttaaagaacacttaacaagtgaagcagcctcagggaatcacagactaaccgaggaactgaaggatcagttgaaagacttgaaagtaaaatatgaaggtgcttcagcagaagtggggaaattaagaaaccaaatcaaacaaaatgagatgatagtagaagagtttaagagggatgaaggcaagctgatagaagaaaataagcgattacagaaggaacttagtatgtgtgaaatggagcgagagaagaaaggaagaaaggtcacagagatggaaggccaggcaaaagaattgtcagcgaagttggccctttccattccagctgaaaaatttgaaaacatgaagagctcattatcaaatgaagtgaatgagaaagcaaaaaaattagtagaaatggaaagagaacatgaaaaatcacttagtgaaattagacagttaaagag

SEQ ID NO: 9698 - DNA, 1182 bp, Homo sapiens
agaaaaaaaaatcgttagagcattaaggtcattattctagatgaaatataataaaaacctagtaggtggaaataaaccaaatgaaaggaaaggaaggaaggaagaaaagagggttgtgagggaggtaggagaaaaaaggaagaaaagggagagagctcttttcctaagcagcctgaggtaatctgtgaaaatggttcgctattcacttgacccggagaaccccacgaaatcaggcaaatcaagaggttccaatcttcgtgttcactttaagaacactcgtgaaactgctcaggccatcaagggtatgcatatacgaaaagccacgaagtatctgaaagatgtcactttacagaaacagtgtgtaccattccgacattacaacggtggagttggcaggtgtgcgcaggccaagcagtggggctggacacaaggtcggtggcccaaaaagagtgctgaattcttgctgcacatgcttaaaaacgcagagagtaatgctgaacttaagggtttagatgtagattctctggtcattgagcatatccaagtgaacaaagcacctaagatgcaccgccggacctacagagctcatggtcggattaacccatacatgagctctccctgccacattgagatgatccttacggaaaaggaacagattgttcctaaaccagaagaggaggttgcccagaagaaaaagatatcccagaagaaactgaagaaacaaaaacttatggcacgggagtaaattcagcattaaaataaatgtaattaaaaggaaaaaaaaaagggagagagagggaagacagaagagacaatagaaaagaaaaggcaaggcaacaaaagaaaaaagaaatgggagagagaggaaatgcaagacactgggaaacaatggggagaccattacctgcacatctaccccaggaactgtagggaccagtgtagaccctcccaacccgttttcataagtgaactcccagggaaagcttatgaaaataatctctggggctgggcacggtggctcacgcctgtaatcctaggactttgggaggcagaggtgggtggaccacctgagctcaagagttcaagactaccctggtcaacatgacgaaactctgtctctactaaaaatattagccaggtgtggtggtgggcacctgtaatctcagctactcaggaggttga

SEQ ID NO: 9699 - DNA, 1100 bp, Homo sapiens
cttgagctcaggtggtccacccacctctgcctcccaaagtcctaggattacaggcgtgagccaccgtgcccagccccagagattattttcataagctttccctgggagttcacttatgaaaacgggttgggagggtctacactggtccctacagttcctggggtagatgtgcaggtaatggtctccccattgtttcccagtgtcttgcatttcctctctctcccatttcttttttcttttgttgccttgccttttcttttctattgtctcttctgtcttccctctctctcccttttttttttccttttaattacatttattttaatgctgaatttactcccgtgccataagtttttgtttcttcagtttcttctgggatatctttttcttctgggcaacctcctcttctggtttaggaacaatctgttccttttccgtaaggatcatctcaatgtggcagggagagctcatgtatgggttaatccgaccatgagctctgtaggtccggcggtgcatcttaggtgctttgttcacttggatatgctcaatgaccagagaatctacatctaaacccttaagttcagcattactctctgcgtttttaagcatgtgcagcaagaattcagcactctttttgggccaccgaccttgtgtccagccccactgcttggcctgcgcacacctgccaactccaccgttgtaatgtcggaatggtacacactgtttctgtaaagtgacatctttcagatacttcgtggcttttcgtatatgcatacccttgatggcctgagcagtttcacgagtgttcttaaagtgaacacgaagattggaacctcttgatttgcctgatttcgtggggttctccgggtcaagtgaatagcgaaccattttcacagattacctcaggctgcttaggaaaagagctctctcccttttcttccttttttctcctacctccctcacaaccctcttttcttccttccttcctttcctttcatttggtttatttccacctactaggtttttattatatttcatctagaataatgaccttaatgctctaacgatttttttttctaaaagtagcttgtgttcaacat

SEQ ID NO: 9700 - DNA, 1396 bp, Homo sapiens
ctcttttctaagcatatggctaagactgtatgtgctgaattcctgggcctcctgcagaagcagaaagcctgctggggatggtgccagctgtgccttggctgttgtatttgaattgagatttttactatacaaagccacctagggcctggggatttgggtcagttgtagttgcctctcccccaccctcttttcccttcccaaaggtgggtgttgaactaggggggatattgctgtcctgagggaccctctcatttctgacatttgaagaaaacgtataaatctttcttaaccgtgaaagcaaaagcctttgggtttattttgggatagttaggagctagggtagaatataatttttttccaaaaacttacttacaaacaaaaagcctaatccctctattttaagatttctgaaaaaacactccatgttatattctggggaaagcaaaaacaaaaaaaaaaaacaaaaaaaaaaaaacaaaaaaaaaccgtgattgtttccattaagccatcagagcgtgtctcagatatcttgttatacagtgaagaagagaatacctattttttttgatgatgtttgatgtcatagtaatcagtgctggtttaactcctgtttagttcctgccaaatacattgcatgggctgaagtgtcagtagccatactgttctcatgtttcttggtcctaggatcagattcttctacattattttttagtttcccagagacatggtgatccctaaacttatgaaggtttcatcctaagccattcaggcttttctctttgtatagattaaaccgaaaaccgcatatgagcctgttcatctgctggtggattcccaccacagactcagactcaaacaaacaaacaaataatgtgaccgtttagttagtttccaaaaacattcacatacaatattgcatgaataagtaagtaagtgttacagaaagctgccaaaaaataaaaaggtttttaatatgacctatctaactaactaacttttatcttccttttctcagactatcagtattaaatagatggaaaaaaatcaaggactacttgaagctatttttgttaatattctggttactgaagtttattgtaaatatgtatgtatagtaggcatatttctttttaaccttgtgcttccctccttcccatggaatttcttcccacagatgaggggccactggacagggggatgagagccattcgtccctgggttgagggaattagtaagacatcattttcaccactgggtggtcttcatacacatgagttataatagcattttaagtatcttagcatttgtgggattagaaatctgtttttgctatttataatatataaaaaatgaaacatgatagcctttcttgagataagtatgtgaaatgtttatt

SEQ ID NO: 9701 - DNA, 1183 bp, Homo sapiens
taataaaatcaaggagcttcggcagggtctagatacaggtaagatagtgccctctaaatcataatgaaatacttttatttaaatagttcctttcatgctcttaaagttttcattacatgtcaatcctttacttagcagccagaagaatgcattcttttctgtgatgctttgttatcattttttggctttctaaagagtctttggtttcatttggtcaactcagcagacatatattgagcatataatttgcacttgggacagatctcatttaatttttgtaataatttagtaagattgtgatacctctgattgacaaagagaaaaactaaggtatagggaaattaaataatgagctgctgatgatgatgcaaggtgctgtactaatgtttttataatattcacaacaatcctatgaattagggatattattatccccatttacagaaaaaggaactgaggcttacagaagatcttgcccaaagactgatcgccaataagtgaccaaattggagttaaccccagatcttctgaattcataatctatttcccctttctctttattattctgactccaaggggtactctttcctgtgtatcatcttcttgcctgcctacactgatgacagttactcaaactgataattagtgagttgagcatgtatctttgtagagctgtagttttagtactggaattcatgcaggggactgactctggtttcattctcaacttctacattttaccactgttgggaaggaatagatctttttgaactaaacagagtaaagcatgtccttgtgtgggcaagaacctgtgttcagtgctgtttcttatgaacaaatcaatgagaaatgaattgagtatgaaaataataacaatgactggtaagactcaggcaggaggttccgtctacaagagacttggtctactttggtttacaggcagttactgactttgtctctgataccttgaaatagcacaagtgaaaatcaatcatcctgaatcttccccagtcatctaatctgtatatccttagggagtttataagtgaaacgggtgaaggtgtttcctttacattttctaagctcagttatcactgtccttttatctctaagaatgacttaaaattagccttactttcagaaagtgtcctgtatgcgttttttcatttgtcatgtaaaccat

SEQ ID NO: 9702 - DNA, 2556 bp, Homo sapiens
agatgtcaagagtcaggtgctagtcacgtgctgcttggcttgtcactgtcattggcagcgagaggaatgggtgctggtgacattgggccagggctgcctctctgtgtcagagttcagggtgtaggaggggttctgccaaccatgggctgtgtggggtaagtgggtgaggctgatcttgctgggtcaaggtgatcctgagcccttggcctgtggaatgggggtagagggcaaatggtaacctagcatgctgtgggggatataggatgaggggctgcccgagcctcgggaggggtcctagggagcagatgttgaagaggccagagccctcagtgagctggatgagagggtgagctgtttgaacgccctgagggtacttcctggggcctcgtgtaatggtctcttctgtatgtcccccatcccatctcaggtctgctcaccaggtggccagataccgcccacgtgcccccatcattgctgtgacccggaatccccagacagctcgtcaggcccacctgtaccgtggcatcttccctgtgctgtgcaaggacccagtccaggaggcctgggctgaggacgtggacctccgggtgaactttgccatgaatgttggtacgtggctggagcaggggctagagcctagaggagcttggggatgcttgagcattggcttctgtgggaccccgaaagtttggggaatagaaaggggaacacacagaccttagtggggcaaaaggcccagcgactgttcctctcccttattgggaatgttcattctgaatctctcattctccgaagtcctaagctgagccaggagggaaaagggtcctttgagttgtagggctgagcaattcagttcctcttctcttctagtctggggctcaaagcaaaattgtccattttttggcatctgctcattactgagagttttttttgttttttgttttttttttaaataaaattggccacagctcctgtgctgtggggtggcatacacagattacgtactgatgtggccattgtccctgtataaggtagggtatcatcagatgacaggaagcagctagctctgaccctgggcaaggctttgcaccctctccaggatagtgaatgatgtccaaaggtccctgccaaccctgccatctgagtgataaggacatttcagggccttcctcctgtttgcctgggctgtgagtttggtgccaccttgtggtgtgaggaagtagtggtcagccagcctagttcagtactcaggctatggggcagctgcccaggtgcaaacctgcctggcttggcttttactcaccaacctcccttctcttcctccaggcaaggcccgaggcttcttcaagaagggagatgtggtcattgtgctgaccggatggcgccctggctccggcttcaccaacaccatgcgtgttgttcctgtgccgtgatggaccccagagcccctcctccagcccctgtcccacccccttcccccagcccatccattaggccagcaacgcttgtagaactcactctgggctgtaacgtggcactggtaggttgggacaccagggaagaagatcaacgcctcactgaaacatggctgtgtttgcagcctgctctagtgggacagcccagagcctggctgcccatcatgtggccccacccaatcaagggaagaaggaggaatgctggactggaggcccctggagccagatggcaagagggtgacagcttcctttcctgtgtgtactctgtccagttcctttagaaaaaatggatgcccagaggactcccaaccctggcttggggtcaagaaacagccagcaagagttaggggccttagggcactgggctgttgttccattgaagccgactctggccctggcccttacttgcttctctagctctctaggcctctccagtttgcacctgtccccaccctccactcagctgtcctgcagcaaacactccaccctccaccttccattttcccccactactgcagcacctccaggcctgttgctatagagcctacctgtatgtcaataaacaacagctgaagcacctgtttcctctcttttctgctggggagggggaggtggttgaaccctgccctctgagcaggctgggaatggctgcagcctcgtgccccgcagtgggagctatggtggtgtcacctgccatcctgcccacctcctggtgcagaggcgctgggaaagcagtagcttactatcttagggttacaggttgcccccttcagtgctgcggggagactttaatggcttacgtgaaccgaagatgggaaagagcagggacaaggcctccctcccactctggtagataaacccaaattgcaaagtggccttggccatggttcttccactttggtcttcctgcattagcgtatcccttatgggggctgtaggaggagtcagctctgggcgcctgagactgggtttggctcccaggtcctcagttgtggacctaggctccccttgggacccctcctgtttgctggtgccctcccaccatgatgctgtagtgccaaagggctgggggagagagttg

SEQ ID NO: 9703 - DNA, 1100 bp, Homo sapiens
gaggaacagaggctgatcttgacttagatatactgaaccatgaaatcactgcatagaatgtggggacttgaatgtgtctttgggcaagtcatttaacctcttaagacctcatctgtaaaatggattagatatgtttaattatagccttagcattaaatattcattgctgttattattaagtgtctgataagtctctgtgtacatggatgtaatcttcctaactcccattacctccatttatagatgagggttatatggccaataaagcctgggtttgaatctaggtctactgcctccaaagccagtcttctctcctgcaacatcatgctctgtctagcaggagatgagaacaggtctccatttggagcctgtcagtggggtcagagactaagattcaggctcagggtctaaattccatatcctttcttccataccctggtgtttcctatgaacagatagatactttagggctgcaaggtttggattgcatggcactgctcagaagataagttacaggtctgggctaggctgtagctgcccctccaggtggctagacctttcctttctgtgtcaccagttaacactggccaacagttccttccattaactgttcactgctttctcctgtgtctaactgatgcagtttatgacccataactaagagcagtaccaggtatggctctgtttcctgttcatgtcccctgtcctctgggctgcatgcattccgttcttacagaaagaatacctttaacctagtacatcctgccacacatctgcttctactgtgaaattgatgagggggtattaccgattcttccctcacccatcatttactgagatgctggtgattgcattataatcctctaaagcttacattgtctttctgattcttggtcttatctgagcaagtgatctataaataactcagtggctttctcatgactgttttaattattagattttaatcaagtgtcttattaaatatatctgcatgcttccacaggcatctgtctcttcacatggctgttcagtgtgcctctcacaagttagcccacgttttctgttctcctgcttcaaactcagttgagctgccttgcttt

SEQ ID NO: 9704 - DNA, 1027 bp, Homo sapiens
gtttgatgaaatcctggaggccagtgatgggatcatggtggctcgtggtgatctaggcattgagattcctgcagagaaggtcttccttgctcagaagatgatgattggacggtgcaaccgagctgggaagcctgtcatctgtgctactcaggcatgtgcccacccttccccacattctcatgtgcacactcgcatgtttgtatgggaaagctctggaggctgtctgatctcttcccatggaattgtcgcacgtaacacacagataatccccttcccccatgtacctacacaaagccatactctgtgtacctactcactatccagaggatcagcttgctgtcatttgtctctgaagacagctcaagctacatctcactaatgctctgtcccctcccagatgctggagagcatgatcaagaagccccgccccactcgggctgaaggcagtgatgtggccaatgcagtcctggatggagccgactgcatcatgctgtctggagaaacagccaaaggggactatcctctggaggctgtgcgcatgcagcacctggtgagttctggggcctgccccatcccccagggcttcggactgggcctgggatggatgcaagctctggtgcagagctttttaggtttctccatcctcttatgcacagcctttcattatcctccaagttacagcagcaagagggtgggggtggaagtggaggtggcttttttttttctcctgttctgcattcctgcccacacccccacccctccatttccttctgctctggaggcatcctccttcattggacaccacacagtttatttcacttctgacttcaaggttgtgaattcttcccatggcttaagtcctgggatacttctgcagtgaaaggaggtcttgtacctcttcctcagagtcagaagttctgagtacctttgccctattctgaaaagggctaggggctcctgctcccagctgccctcttcctttggcttccaattcagttccctctgccccgcatcctgcagacaggcg

SEQ ID NO: 9705 - DNA, 2262 bp, Homo sapiens
catcaagggcgtgagtattctgcggagagcgaggggaaggctcagtaggcaatatgccccagagacatgtcctccaaagcgctgggttgccatgtttcttcccagtactatgaaggactgcagaggagttgaggtctacaaatgaggatttattcatcactgtaaacaatgttgatttgatctactttgctaggaaatggtaccacaaaggaaccttttttttttaccctaaaaacctaaactttaggctttctaacttggagaaccatctctttgtatctttttccccatcattaagtagcataactgaaacatattcttttcttggattatttccgtgaagtatacagagttagagaataagagcaaaaaactgtattacttttagcagtgacttgagcattgttcccgggaggaaagagcttttccattccttctgaggtgatgctgctactggtgtctccagtttggactcttgcttactctcttgtccctagagcggcactgcagaggtggagctgaagaagggagccactctcaaaatcacgctggataacgcctacatggaaaagtgtgacgagaacatcctgtggctggactacaagaacatctgcaaggtggtggaagtgggcagcaagatctacgtggatgatgggcttatttctctccaggtgaagcagaaaggtacgtatgggagctggagtccagttgtctaaaacagtcttttgtctctaaacttccttgacacaaggaagatgggaaggttggttgcctggcagtgagattgagtctgtgtgttctcaggaatcccttttataactcatttatcctcaaagataggctttaatccagcatagttacattcttctggttctggagaacacaggaacatacatacatatatatatatatatacatatatatatatatatatatatatatatatatatatatatatatttgtttcgctgtgttttgttttgttttcaagacagagtctcgctctgttgcccaggctggagtgcagtggcatgatcttggctcactgcaacctctgcctccagagttctagctattctcctacctcagcctcctgagtagctgggattacaggcacccgccaccacacccggctaatttttttgtatttttagtagagatggcgttttgccatgttggccaggctggtctcaaactcctgacctcaggtgatctgcctgccttggcctcccaaagtcagaacagtcttaattatccttatttatgggtgaggaaagtgaggtacagagaggttaaatggcttgcccaggattacacagtgtagtaggttttcaactctggtaaaacagctccagcacccataatgcaccacttcccagctcactgtccttgcgggaaaggtgcctgcttcctgttgacctgtgccctcgtgctctgcctcccctacttaccctttttcatacaggtgccgacttcctggtgacggaggtggaaaatggtggctccttgggcagcaagaagggtgtgaaccttcctggggctgctgtggacttgcctgctgtgtcggagaaggacatccaggatctgaagtttggggtcgagcaggatgttgatatggtgtttgcgtcattcatccgcaaggcatctgatgtccatgaagttaggaaggtcctgggagagaagggaaagaacatcaagattatcagcaaaatcgagaatcatgagggggttcggaggcaagtccccgttgtccctgctccagtcccagcgcagctctccgaagggcatggtccatcctgtgaatgtctgattcccagcccctagcccatcagaatgtagactcccaagccagttccaaacctgctgaatcagaatatcttaggagagtagaaggcattatgtttttttgtttttgtttttttgttttttttaaaaaaaagcttcccaggtaattgagatgctggcagcttgacattgttccctgggcctggggaccaacatttgagagaacagggtcactgctcacaggaccaggggccatgatgttctgttcctgatcagaaacactaccagtgtttgctggaatggggggaccagggggaaagatgacagcagacacttaagaaagggctctttttggcccttcctggggagccatgtggaatttcagggcctggtgtccatgttaaagcttatggcctcctggtcttcacttagaatgcagctggctcagtgatcatgctaactctggtatggtccatt

SEQ ID NO: 9706 - DNA, 1169 bp, Homo sapiens
cagctatttgtagctttgtgacagcttgacatgcagagatctaggcttatcaaggcactaagctaggagtcagttgtttgtatcactggaagattggttacaacttccttcattggaagctccttcagtgcatgttaaatgatgttatttatagatagggtggtgagaaagctgtctaggtagatgtcagtcagcccagtgtaagagagacctgcttactgtgggtgcttgggactatgtggagtgggtgggaggttttaacttgttcagtaaggtcctttccattgttcacaatctggtgaaccctttttctaacatgaggagcacccacataaccagatcatgtctggcttccctgtggcttgtgtacaaagcgtgcttattgagttaatgtgtaagcaggagacagccttctgtgctaaatggtatattaaccacttctcagtcttaccactctctttcaatttgtctcgacccaggacctcagcagccatgtcgaagccccatagtgaagccgggactgccttcattcagacccagcagctgcacgcagccatggctgacacattcctggagcacatgtgccgcctggacattgattcaccacccatcacagcccggaacactggcatcatctgtaccattggtgagtgggtgtgccccttcccccaaaaaagggcttcatgggcagtgacctttctctcctgaaaagagtaactaaatgtcctaacaaacctaggtgctacatgggatactacacagattcttatgaaaggactcaggtcataggaagttgcagtaaagaattagtatgtgcataggatggcaaatacagttaataagagagtattagacatttcaaaattgctaagatggcgaggtatggtggctcccagcactttgggaggccaacgtgggaggattgcctgagcctcgaaatttgagaccagcctgagcaacttagaccctgtctctccaaaaagtgaaaaaaaaaaaaaaaaaattagctgggcatggtggcatgcacctgtagttctggctacatgggaggctgagacaaagatcacttgagtccaggagattgaagttgcagtgagccatgatcacaccactgcactccagtctaggcaacagagcgagatcctgtcttaagaaaaaaaaattgtccg

SEQ ID NO: 9707 - DNA, 1202 bp, Homo sapiens
ccaactttccgttcagctcagtctccgagggtgcgccagagcagacacccggaggagtggggagtggcagggcggggccgggagaatgctgccccggaacccataaatctgggccctgcccaggtaggccgggacagctggggtggcctgggccgagagccaagaaaagacaccccatctggcagcccaacttggcggcaacaggtggcccggcgcccgggggtctgggaggaaagtcgctccgggggcgggccccgttgccccgccgcgtccccattggtcatcaggtttcttaaaatgtgactctgaatctgtgtccttccgccgcagaatttagtcccaccgaaagggcaacctgcccgcgcgttccgccgccgccgccgcgcttcctcctgaaggtgactgcgcccgcggggacgcagggggcggggcccgggtcgcccggagccgggattgggcagagggcggggcggcggagggattgcggcggcccgcagcgggataaccttgaggctgaggcagtggctccttgcacagcagctgcacgcgccgtggctccggatctcttcgtctttgcagcgtagcccgagtcggtcagcgccggaggtgagcggtgcaggaggctacgccatcagtccccaccaagggccagtcgcccggctagtgcggaatcccggcgcgccggccggccccgggcacgcaggcagggcggcgcaggatccagggcgtctgggatgcagtggagctcagagagaggagaacggctcctcacgcctggggcctgctcttcagaagtccccagcgccgttccttccagatcaggcgggtccgccggctcctttcccgccccagccctaccccctcattctggtcccatcctcttcctcctgccccaatcctcaatgcgcctccatcctcgcctgccttctctcggtccctcgtgattgattccacccttgcttcccctttctccgcgccgcctgttccgtgctcgttttcccctcttcctccttaagtctggtccttccaccccctcctcttcaagctgtgcgtgtcccctgattctaatgctttctgtgtaactcattgaaactgcgttctggttcccctcccgcgtccattctccattcatgcgcgaccgcccttcccgcgccccagttccctctcgccgcccctccccctgcttgctggtcacgtccgct

SEQ ID NO: 9708 - DNA, 1223 bp, Homo sapiens
tcatctgacaaatggaaataggaatagcaccactataagaattatgagttgatgcatataaaacactgagaacggtacatgggatatgggaagtactcaattatttctagatgacactagagagtatagtatatttatatgaatagaatgcttttatctcctatagtactgttattactatatatatgactaaaagtacttaaaatgatttgtctctcagccctacttaaaaagaaatcctaggaaggctgaagtggaaagatcacttgactccagaagtttaaggctttagtgacctatgattgggcctctgaatagccactgcactacagcctaggcaatgtagtgagactctgtttctaagtttaaaaaaacaagtccttaaattgttgtatgtcttaaaagccagtggtaataatggtaacagctcattttaaatagtgcttaagtgttcaacactgttctaagtgctttatatgtattaaccacaataaataaaatgtttaaaaacaaaccaaatctagaactggcttttccttaatgttagtaatgcaacctagtgtagcattgacaccaactttatagtttctcttcataggaatgtcccaaatgccatgtcacaattgagaaggatggtggttgtaatcacatggtctgtcgtaaccagaattgtaaagcagagttttgctgggtgtgtcttggcccatgggaaccacatggatctgcctggtaggttggggaaattaagggaagaatgtgtttacataagtatgtgccatgtattatgaataacatttctacctcatagatatcaccatctaacttgcaagctaaataaatacatagtgtgtgattaatgttataagtctatgcaagacatagagggattagttagatatatttcataaaggaggtaacaatttagatgaactttaaggggaccaagagttcattagttataaaagtagtaggaaaaacatttagggcaaaagttgcaacatgagcaaaggtagaatgttgtgaaaatacatgactttttcagagaataactgtattatcaaatgtgcctctctaggccaaaattgaaaactcagatgctgttggcaaaacccaacctgcaggtggttttactctgcatatcattagacattgtggaatgctttaaagccttgctaaaaggctttgtcatattttttctttaaataagcatatatatgttgctt

SEQ ID NO: 9709 - DNA, 1294 bp, Homo sapiens
tttttaatctaaggagatacttgtcctaggagtcgatttttcaagatgtgccgcctcttaagctagagatgcaaaatgttttatttctcaacatgaagctctttctcccaaagtgacaaatgctagtgtcttttgaaagttgtaggaaacttggggagtttggaagacttggagatttagtcctaaccaatatcttcccttcccttagccaattttagctaccatattttgtttacagtacttttacagttgacagagattttaaggacgtgaataaagaacccatgaaattatttctgaacctgtttatctgcagaactgtgggattgaattatgatttctaaggtccatcagaacttgtaacactttattgctttaaaattaattcccatggaatcatggctttcagaaaataccattttaatattagaagcagtttgatgtgtctgtacatctagacctgaacatgtgcctattaaaataaaaaataggtgcttggttccgagtctggataaactatagggatgccttaaaaataagtaaatgcctctttttttattattagaggctgacaacaagtttttttttttttctctttgattacagatactgtgagagtcgacgaagggttttgttacagcatgtgcatgaaggctatgaaaaagatctgtgggagtacattgaggactgagaatggccctgcataaaatgaactctgaaaactttaccatctagagtgctcatgcaattaaaacaaaacaaacacaaacaaggaggcactaagcctattctgacaccactggtctgtagtaccagaattgttttgttaatggaaagtttaagtaaattatattgtaataaaaaggtagataaaccattgtacaacagtattctaggccaccaacaaaagtgtgacagacacactaaaagccctccaactttaacttgtaacgtagcttcattctcaaagctgactccttttttttctttttccttttcctgagtgtagtacagttaaaatttcaaacagctccttgacactgcttttcatgttcaaaccagccattttgttgtactttggtaaaggacctcttccccttcctcccctacacatacagatacacccacacacagactgactctctttctctcataccccaaggtcatgagtgaatgatgcttagttccttgtaaagaaaatcttgggatggggaaaggggtaggcagcaagaggattcaacaaacgaaaaacataaaaactttgtatatgacttttaaaacaagaggacaacac

SEQ ID NO: 9710 - DNA, 1934 bp, Homo sapiens
agatttactggcaactgttcttttcccatcaaaaatcagtgaatgtttgctgagtataaatgctgcttccttaaaccacttgtcgctttaggatcaactttacctgtaccttttctcctttcctcccttgccacctcaggtgcaaatctgaactcagtgtctgcttcttccattttctcgtctctctcccctcttcccccattatccatatgacattattttacttcaaatgacagcatcaatcttaaaaagatatacattaaaactaaggagtttttttaaagaaagcctgaataagttcctttccctggtaactttgaaaagcagtcagagttgctatatagatatatgtggctcctttaaaatgctttgtgtatgtgtggtgtttaaaaaaaaaaaatcttaccagttaactttgcagtgtctaggtttgagtgtcataaatccacgtgttcctgttgcaacaaatacccaaaaattgtgtgtgcacttcctaataccagtcttcacccatggaggaacagtgctttttagagatgctttctatttcaatgttggcatactgcctgagggtattgcagttgtgggtgcattccctaatttgtatgatcaagatgaactggcccttttctacttccaagcttttaacagataccaccatatttgacagaattcccagagtgaattgcttgtgttattagtagattcagtgcccccagctgggataggcaagccatgacagcttccctgtttcacctacagaagtcttatctgagggatctattcacagtaagcaccaaggtctccatgtcttgaggtcagtttcattgtcttttgaaaagtgcatgcttcatttgaacaattcattcagcagcagatggactttcagtgatttaaaataaaattttgatccaaagctcaggacacaaaccacagtggtaaaattgagtagcatataatatcagactaaattatctgtaattttccacaacccagattgtatgtgttttatgtgtgtttaaataaatatgttagatacacgtgtatacatacacccatatacaacagatccaagactggctgacttcatttgaaatggttgaatctgctgtgtaataaagtggttcaaccatgattaggaactgaaatttagtagaagagggaaaaggagttaatgtaacaaattattttagctacaaaccccggtaatagagcacttgggggatgggatggggtgggttggtgagacaatcagaatggtaaattgattaaatgctcctaaccctgtaattttgtgcatagagcaccctatgctgtggaaataactgttcttagatttcattgtaactggactgttcaggttgcccagagggaaagaacattcctaattctaataaaataaacttttattttgttattccattagttacttatgtttatttttatagttaaaaaatgactaaaggtggctaatagccacccgtattatgtgccttattcactgttcccacttaatataaaatgtcaaaaattggttgtttctttgcagggaactgtgaatgagcccattcccccaacatttaacttggttaatgaagctttcagagcattttctgaaagatttccaatttctgcatctcagatattgaatttaaattgtttgtgttgtaacagtgatacaaaaatgttcaatagctctttgaatgccactttttttaaagaaaatactttaaaagtcattcttagctaacctcaaaactcctttacattactttcattttagctcactcttaaagctgatactgttatatagggatgaagggagagttttcttaaagaaggtcccaaagttgaagatcgtttgtcattgatactctggccaagtccaggttttaggacaatttaatttactcttatttggatctgtaattatg

SEQ ID NO: 9711 - DNA, 1294 bp, Homo sapiens
aactagccaacttaagaattacaggaagaaagtggtttggaagacagccaaagaaataaaagcagattaaactgtatcaggtacattccagcctgttggcaactccataaaaacatttcagattttaatccgaatttagctaatgagactggatttttgttttttatgttgtgtgtcacagagctaaaaactcagttcccaaatccccagtttatgcagcgccatcaggtattttaagctaaacttcttcacccctgagagcatgtcagctggagaaaagcagttcttccttgcccacttgagaagtgcacgcccactcacccaacatcctggtctctaggaaagcctcatgtgaggttcctctttctttcagctcagtgcccatgggcaaggatcatgatttccattccgtgttacaatgacaatatttaatgagcataaccttctcagtctcctgctctcaaatttaggacagagccgctaaggacaaaacaatccctcccgtgctttatgatggcagcaggggctggggagcctctgagggactctttcattctgcagttgtctggaagcctgggtggcgtcatgagctgaaggatcatgctttcctgtcctggctccataggttataggctggctggtgaaaggttcacgtggcccaggctgaacttcattgcctagctttggatgtgctttctgccataaagactgatttttgttcgttctgagccttcaaggaatttgttttttacaactggaatatgctcctgtgtgtgttaacagatcatggatgttttatgttttcactgatcatttaaagagtttgacctcagagctccaggatcatcagtaaatttgtcatgttatatatttatttttttataaatcaagacttctgtgtgctcttaaatatattaaaaacaatttacatttcaggaattctgtctgtaattgatttttgtctccatcaccactctggaaccagataagataaaaatcattctgatcttcatttgtgatgtgcatgttactttgctcttgaggtgcttgcagtccctcatgctgagcctgagctataggcttgtcctgtggggttgaaagtgacacaaagtactagtatgaagtagcccagttaaagctgaattggagcatagcagtttgagagcatggtgagccttttcagcttgttgggagggcagtatgaacatggcagctggtggtgggcctgcctagttcaggggtcttcatttcccctgggcccacagcagcttctggaatctcaaagctacctcaa

SEQ ID NO: 9712 - DNA, 1482 bp, Homo sapiens
tcaccgagtcttctcacattgatttatttgcccaagatcttgtagctatcaagtgccagaggagcaattgaagcctggtctttcccatttctggttccttgttgatgccatgttgttgccattaagagagatttaagaaaaacaagtttcagaagataaattggatttcagaggaggagaaatgtacatacattgttatgggatttcagatgaagcttctctgtcagctactgaaaatgagaagctggtttttaggaatatattgagaaacaggattgcaaattttggagacactggcacttaggttgaagccagagactggataggatcacccaggaagagaagaggagaaggtaaaaatggtaaaggtggaattctgggaggcactagcccttaaatgctagtgcattaaggggctggtgaaaaggggtcaaagaagtaaaggataggaggagttttaaggcgtttctaggaaacttcccctgcttctaaatcagactctggtacctattcattggtttaaaaatgatgaaacccggcaggcatggtggctcacgcctgtaatcccagcactttgggaggctgaggtgggtggatcacctgaggtcaggagttcgagaccagcttgaccaacatggagaaaccccatctctactaaaaataaaaaaattaggcgtggtgatgcatttctgtaatcccagcttctcaggaggctgaggcaggagaatcgcttcaacccaggaggcagaggttgcggtgagccgagatcgcgccgttgcattccagcctgggcaacaagagtgagactctatctcaaaaaaaaaaaaaaaaaaaaaccctcatgctaatatttattgcccctggaactggcttcaccctgaaccttgaaacatatcttggtcttctcccctgtatgaattctccattctagctagataattctttattgtatccaaacacaaggttaatcccttcatgtacaactttgcttgtgtatacttcctacgtgggtttcagtatcatcagataaatctgggtttgaatttcagctctgcctgtctgtgggctttggaatgttagttaatccatggcctcactcttctcagctgaaagcagtgatgactaattagcgatcttaccgcattttgcaaataggtttaatctatctgaaaatgcctgcctagcgtggggtgcttcttaaagatcagccgcctttcttctatctagatgcaggagctagggttcagcacagggaccactgccctagccatttttcccccgcctctttacagttctatgtcttaacaattacgattagctcttataacagctgatgcacataatgtaaagctagagaaaaccttagaaaacattttacaggtgatgaaacagaagggaggagataggaaacatcgtctttgccttagaggcacttatggtctagaagggagaactgtgccctctttgccagccccccaaccc

SEQ ID NO: 9713 - DNA, 1171 bp, Homo sapiens
ggggtctcggcagcgccgctattctgtgagcctattcctctcagaagcgccgagcactaggcctggaagaggacaagtctagcaaatgaggggacacgggcggagggagggattaaaagatgggggtgtgatccgtgccaatggggacacccactggttcgaatattaacgcgaggtttgtccgcttcttcacaatctgtccgtttcgttttactgcgaaagcaaatgtgttcccatccctctatttggggatacgattagagttccgggaagggggtgcagcgcccggactggcacaaccgccgttgtcccacctcctccggggcggcaacaccgcagtgccaggcctgggactgaggcgtggggtcccccctcgctccgtcctggcgccgcccgtcgccccgccccttggggggccccgtggcgcacccttgtgacgtagcgcttgtgtcgacatcggcgcgcgccgagcccggaagaggcgcgggctaggaaaggagttggttcgcgcaggtgcggcgcctgggtccccatggcgctgtggcgcggctccgcgtacgcgggcttcctggcgctggccgtgggctgcgtcttcctgctggagccagagctgccaggctcggcgctgcgctctctctggagctcgctgtgtctggggcccgcgcctgcgcccccgggacccgtctcccccgagggccggttggcggcagcctgggacgcgcttatcgtgcggccagtccggcgctggcgccgcgtggcagtggggtgagtgccaacggggcctgggtctctgagcctccgaggtcggccttggaggtcgggcggagccgcgcagaaacagggcttctcagaggtccccgggaggcgctgctgtccgcgctggccccttggcgagaagtgtcggacgtctgagtggaacccggttcgtcaccgctgctctttccactcggctggcctctgcgcctttctctcatcccggtaggaccagccctaacagcttcttgctaatcccgctttgtctgacacctttctccgagccttcttcctcgttccaacttttagccccttctcttctggcgactgttgttttgcaatcaaagatacttgaccttacccactatgacaacactcttcctctttcttctgaacttcttgaagacgcgtgatgtct

SEQ ID NO: 9714 - DNA, 2391 bp, Homo sapiens
cagtgtgggtcgttcctggggttggcttgttttttggtttcatttttattttttaattctgagtcattgcatcctctaccagctgttaatccatcactctgagggggaggaaatgttgcattgctgtttgtaagctttttttattatttttttattataattattaaaggcctgactctttcctctcatcactgtgagattacagatctatttgaattgaatgaaatgtaacattgaaaagacttgtttgttgctttctgtgcagtttcagtattggggcgggtggggggctgggggttggtaataggaaatggaggggctgctgaggtcctgtgaatgtttctgtcattgtactttcttccagaagcctgcagagaatggaagcatcttctttattgtcctttcctggcatgtccatccttattgtcactacgttgcaactggagtttgatttggatctggttttaaaattcttctgtgcaatagatgggtttgaggatttagcggccctgatgtcttggtcatagcctggtaagaatgtccatgctgaggagccagatgttgtatttctaactgcctgagtcacacagaatagggtaagagcctgaccccattctgtaaatcagaaagcaaggatggagaccctttcctgctgctattattggctctctttgaggaagttggaggttaaggaaggaacttgtttgtttccgtatacgactccttcttctctctagttcagtcttcagccagtccagcgctctcttccacacttcagagccccttcagagaaagcattagcaggaatgagacaaggcagagctgcagtgccccctgaggcttccacacatctttctgaatattatttttcaagtaacaagggcagggacagcggaaacagctgcccaccccccccatcccagcagctcagctaagccctgatgagaatgaagccacaggagttgtctgaggtgaacccagccgctcagccacacatggaagccattgcctttgcacatagttcttgggttctttttcctaaaaaggtaaggagctgaggtgtgtggttttttaatattaagaatatataatggaaaacacacgactgacgctcaggcatcttcccctactccccaacagatccccagaagacagcgtggaaggcagtgtagacagtaaatcgggcttcagttctatagccaagaagagatcagctgctgaaaccaccagtgggtaccccaggccacctgcctttgaacttggggatttgccatgtttgatcttgtcacatacttgcttttttacaagatgaactctttgtatttatgatttggggggcaatgaaaggtgcaatgcaggaactgctgctgccgagctcgctggtcacatgggggtgccaggcgggattctggaaaaccagtgcacttaaactgatcctgaagagagctgtcccagcactctggccaccaggagggccagattccccagaaactaccttttgcccaaagaacatgctcagtatttggggcatttcctcccacaaaccctgactgcttctgttacctcagggccttggtacctggatactgccacagaattggggcgggtgggggaggggcctatttttaaataaaataactgttcaaagttgggggttttttaaaaaattaagaaaaaggaaagctattctgtattgcaccttttcacaatttaatacattttcttacattttcctgtgattttcgaaactaaaccattgtgtgtcctgtagtgtcctggttgagctgccgctcagcagcttcctcggggggatttggaacacctgtgtctgtcgccgcactgcctgtgggaggggcccagagggctgctgggactggcgtctgtacacacttgtttggccttttctgtagttgatgctgtaaactctatggctttttaaaaacgatttcatgtttttatttagtattggaaatccaatacacttttttaatccaatcaaactctggtctggtcaaagagttattttcctttgtccttaaaaaaaaaaaataacaacaactttggggccccctgcttcccagcctctaactgacttcacggttgccttcacaactgtaaagccagtagtctatgaggagactcagggaagggtggcaggtgagccaggaggctgcaggaggtgtttggaccgtccaccagtaccaaaaatgagtcttgtccctgttcccatccccctgttgctgccctgcagggactgagcagcctgaggaatcagagggggcccctggcagccgtccctgaatggagtgcaggccatgtccctgccgcggcagcgcattctgttagggcagactgactgtccacgtggggcctggcctccccactcccagc

SEQ ID NO: 9715 - DNA, 1138 bp, Homo sapiens
cacctgaggctagcgggctctaggattagatggtccacctctgcaacagcatagagatggaagagtctgtgcacacagtagctggagtcccctagctactttcttctggactttttgtgctaacaggaaagagtccacataggaactgcgatcctcttaactgtctttcccatccccctccctggggtgggctggttgcctttgaagtgctaaggttgagaaatgcctggttaagccacaattaacaaaattacaaggctgaggaaaagcaaaaactaaaatatgagccagtaaatgactcaagaacttgaaatagaattatctctatttgcaaagaaggaaataactattttatactaaaaaatatataggtactacaaaaatgacacacctgaatgtaagagagcagcaaaatgaccagaaccttggccatggcttgtgccgcttaagacggattctgagaaagagcacatgctaccaaaatttgtacaacagagttaagggcaaaccttatgttttgccattaggaaaactagaatgttctaggtggtgcctcacaaggtctgtaccctggtggaatttaatccaatggctttaacttatcatctgctctgcagcttcagacactgtcttatcatgccctctcttggctctggaggttctgatccttgctaattgactaggatgctgatttgttcatttgcaagggaaggcacatctgaaagggtaacattggtggcaataatagtaatgatggattttgtgattatatttgccaggcattgtattgggtactttctatacagcattttaatctcaccattttacagatggggctaattggcttccgtgagatcacacagctactaagaaatagggccaggattctaacctagatccattttgataccaaagcctgtagtctttgcacaacatcatgctatcttagtcaaatcacccaattacagttcagaagagtccctgaaaatagaatcaagaaaggcatgaaagtttcctaaccacttctcaggtattcctacctagacatttgggaccagtctttaacatcagagagctggagccttcatctggggctgtagctcacaactcagcctgcatttgttactgcatgttacaa

SEQ ID NO: 9716 - DNA, 1220 bp, Homo sapiens
tttcttacattcagaatgcagctagcacatagtaggctgctcacatccactctgccacctatgctgtggcgaagatgaactgagctagtggagctcattcattgatagcattgataggtttgttttcaatccacaggttatcagcacagtattcttcattaaagtagaatctcaactttgcaaacatttcatcagtacatttgaaattctttccttagggcaacaagattatctcacatgctatgtgtattcagaatacatattaatatacaaaattgtaaatgtaacagtaaaactatgtaaaggaagcctgtaaagctaattaacactaatttttttggtgtgtatttcgctaatctttccttaaagcactatttgcctgtgttctattagccaggtattgcttttacctgtaatctgtaacgacttttctggtatccctgcagactcttctggcatcggaggagctgccccatgtctatgaacaatctgcatggggtgcagaagagttaggccccttcctacgtttgtgccttatggatcagaatttcccagcatttgtggaagaggtagaaaaggaactgaaaaagctggcgggtttgagaaattaatgctctatatacatatataactaaggaacttcaaagtattgaaaaatgcttcctcctaaaattaaagaagatattagaataaagagtattatccaaacaccttttatcaatgttttatttttaaaaacaggtgaatccacttttttatacatcattgcacttcaataattacacaaaacacacaagtacatgcatctacaattacgcaccgcatgagaaccgttaggttataaaatctatcatcaaccagtaaatcaatgtgaaaaaatacagtgtcaaaccaaaaagtataactatagttgcatagaatattaccatgctataacatttcaaggtcattggaaacaaaagaaaaattataaaagtttgccttgattgaatgaatgtacaagaataaggttcaacacatcagtgcaaaaggatttatgaatttacatgacttaacagaagaaaagataatcacttaaaaagcaatcatacgtatatactgcaattcattatacccattcagtggactgttccagcttattaaagtcacaggttaagcccttaaaattatagatttcagtttatattactcatctttatgtaccagaactgcacaatttc

SEQ ID NO: 9717 - DNA, 1849 bp, Homo sapiens
ttgtgtcacatgtttatataaatgccatttcagaagacatattttaaaatcaacacttttcactactattatatctttacaaagaggtgaaaattgtcaccttcttaggtggcttattcccagaggcctactagtcttacctcacgtctgggggcaagacaagaatggccaggtagcagcagggccagaatgtcatcttgttaggcatatggagatcagaatttcacaccacatccctgagcgtgctgtttgaaccaaagttttgtgtggcacacggtgtagttgtgagtgacagtgcataatccctttataatttccaaatacatatttctttacagatctttaggttcctgaaactggtggcaacatgacctgctaaaattttctgcttggacctctttggttctctcccctttcaagtgagcaacaccacaatgactgtctaaagcatgccttatttagcctctcctgtaagggtgatctagccaggtacattttaaacaatgcttcagtgtagaaggtgtaaactattttgggcttgatgtgctgtgaatgttgcttttttttttcctttgttaaaatatttaaatagaagtgaaaaggtcctctgaggatcagatcatgcatgcgccattttttacttaatgcagctgttaaattggcaaagctctaaaatgcactgctgccatctagtgatacacttttgtaaagtacagcaaaacctacagatatatacagtatataaatatatatatatatatatttatatttttgggggtgggagaaatccaaaataaagtaaatgcttgtttcatttttaagctgctgatattcattccttattgtatgttgtcagatgaggaaattgtgcagttctggtacataaagatgagtaatataaactgaaatctataattttaagggcttaacctgtgactttaataagctggaacagtccactgaatgggtataatgaattgcagtatatacgtatgattgctttttaagtgattatcttttcttctgttaagtcatgtaaattcataaatccttttgcactgatgtgttgaaccttattcttgtacattcattcaatcaaggcaaacttttataatttttcttttgtttccaatgaccttgaaatgttatagcatggtaatattctatgcaactatagttatactttttggtttgacactgtattttttcacattgatttactggttgatgatagattttataacctaacggttctcatgcggtgcgtaattgtagatgcatgtacttgtgtgttttgtgtaattattgaagtgcaatgatgtataaaaaagtggattcacctgtttttaaaaataaaacattgataaaaggtgtttggataatactctttattctaatatcttctttaattttaggaggaagcatttttcaatactttgaagttccttagttatatatgtatatagagcattaatttctcaaacccgccagctttttcagttccttttctacctcttccacaaatgctgggaaattctgatccataaggcacaaacgtaggaaggggcctaactcttctgcaccccatgcagattgttcatagacatggggcagctcctccgatgccagaagagtctgcagggataccagaaaagtcgttacagattacaggtaaaagcaatacctggctaatagaacacaggcaaatagtgctttaaggaaagattagcgaaatacacaccaaaaaaattagtgttaattagctttacaggcttcctttacatagttttactgttacatttacaattttgtatattaatatgtattctgaatacacatagcatgtgag

SEQ ID NO: 9718 - DNA, 1073 bp, Homo sapiens
caggttcccagctggctccccatccccaccctataacatgaccggcgtacagaaattaattggccgactgttaccaccactagtctgtccctggctagactagacagatgggtgtgcccctgggctcagtggtagcctacccggggtgatggtggggttgccagctgtagtccagctgttctggggcctgtgtttgtgcacctgtggtgctgtatcctgccccacagagctggctgtccagtggagaatacaaagtgacatctggtgctccctcagaaagaatgtggccccagaggcatgccagtggctttagactctctgggaggacatgtttgagagcaacagccccttccccatcttttcctttcttctcagcagttataaatctctctgcctgcagtaagtagagtgagtggctggtgaggaggtttgttgatgacactgacaatatctggtgactccctccagatgtgcactcagcagtgagctgggcagaggcgtgggaaggacgttggctgggagcagacggcctctgcaaatgaatctctagtttcctgcaacctgggagtgtccccatgagttttactttcctactttatgaagtgaacctgctttctttgggatttcatgtactcctaatgctttttctctccaggtatttctttcctgctacatattaggactcccaaggcaagagtgcacctttatttagacctgggagtaaagggaaagagttgcctgtctttcgtgtgttttcagctttggctctgtgggatcagttatgcctcattcctgaaaagggcctttttatccccccagaatgcttttgctttgccaataccaccttcctcagcctgccttttggaaaggttgagaagctaaaaagtcaggtaagagaaggcagagatggacttcagaacctgatttttaaattttaaggcaaggctggctgccactggtgagagtgatgcagcagcctagcgtgttcccagcagaggtctagtctttgccctaagaagtcaccgcgcttatgaggttgctatcacagtgcatgtggtaggttagatttgaga

SEQ ID NO: 9719 - DNA, 1228 bp, Homo sapiens
aaggtctcgcgaggcctgggcgctgcggcggcaggaggaggacggggaaggacggagccgagccgcggctgcctccctcgctcactccctcgcgcactcgcccgccccctccctccctcccctcccttccccggccccggctctggccccggcccattcgctgttgggtcttctgctagggaggatgtcgggttcgtcgctgcccagcgccctggccctctcgctgttgctggtctctggctccctcctcccagggccaggcgccgctcagaacggtaagcggggcgccgggggcgggccgggcgggggttgaggggcgccggggccggagggggcccggctctggcctgaggagacgctggagctcggggaagggggccgagtgggcgtctgaggggctgcgggtccgagaggaggtaccggctgcgggtttgaggaggcgcgggtgtgaggaccggaggctcctatccgagcggcgggggcgtccggggtgagcccgaggtgttgcccactcggaggctccacgtcgtggggctcgtcgtgccgggtcggcgaggggacacggaggaagccgacgtggggagctggagtagcgggggcggatgaggagggggcgcagctcttagggagggtggcacaagaccggcgtttgtgttccgggcgacggggatggtggtgtccgtcaggccccccgggagctggggtcgtccaggattctactgaggccccgtaggactggtgacatccttaaaaataagggggaaattggggggaagagagtcctgaggaacactaatggtgagctgagtactagagaccaaaggagggggtaaagaatcagggaaccttggatctagggatagagggaaggtgggtgggaagatgagggagtgggttgactgcagtaggggacctggagagagaagcagcagtgtctccaaatgagctgggggaagagggctgggtttgctaaagagggtggagtgctgggcattctagggtagtggttgggagagcaaaaaggagtttctaaataaggagaggaaaatgagcagaggatggagggaaagggttggaactgaggtgggggaatatttattagagaagtaaggaggcctgggtatagagatgggggtgggggaagacgaaaaataagggaagggagtaaaatgcaggaagtcgggggtgtaatgttggtttgcagtgtggaggataaattagggaaggg

SEQ ID NO: 9720 - DNA, 1333 bp, Homo sapiens
atgcacagctgtgcatggagacctgcaggtgcacgtgctggaacacgtgtggttcccccctggcccagcctcctctgcagtgcccctctcccctgcccatcctccccacggaagcatgtgctggtcacactggttctccaggggtctgtgatggggcccctgggggtcagcttctgtccctctgccttctcacctctttgttcctttcttttcatgtatccattcagttgatgtttattgagcaactacagatgtcagcactgtgttaggtgctgggggccctgcgtgggaagataaagttcctccctcaaggactccccatccagctgggagacagacaactaactacactgcaccctgcggtttgcagggggctcctgcctggctccctgctccacacctcctctgtggctcaaggcttcctggatacctcacccccatcccacccataattcttacccagagcatggggttggggcggaaacctggagagagggacatagcccctcgccacggctagagaatctggtggtgtccaaaatgtctgtccaggtgtgggcaggtgggcaggcaccaaggccctctggacctttcatagcagcagaaaaggcagagcctggggcagggcagggccaggaatgctttggggacaccgaggggactgccccccacccccaccatggtgctattctggggctggggcagtcttttcctggcttgcctctggccagctcctggcctctggtagagtgagacttcagacgttctgatgccttccggatgtcatctctccctgccccaggaatggaagatgtgaggacttctaatttaaatgtgggactcggagggattttgtaaactgggggtatattttggggaaaataaatgtctttgtaaaaagctttttctctgtgaagtgtttggaagcagggtgggccccaggactcaaccagcaggattctctcctggatgttgcaggctggggtagggaagcctggccctccttatctcaccgtccttaaatcactggatccccaaggccatttggctccctccttggcttcagtttccctctgggtaaagtgaagttggttgtccagaaagccaggccctttggtcactgtatggggctcctcccactggaagcatcactcaatttctttgcctcagaaaactcaaacctaggcttgtttagggcctctactaatgaacccattttagagactgtgaagctgagacccagtaagaagctggcaccaggaaaagagttctgaatgctgtttctggctgactcaattggatgggcaccaggccagggatcagaggtccattc

SEQ ID NO: 9721 - DNA, 2062 bp, Homo sapiens
tccaggagctagaaccagggaggtcctgagtgaggaaggcatgacctctgggctctctaggtggccctggtcttgccccatccatcccacctgccactaccttgggtgtccttacagctctgccctgaccccagcccctgcccctggacacctgctgacagctcccacacagaacagtctgaggtgatgctggctacagccctggcagcccatggcaactcaaagtgccttccaaaccaaactgcccctcatgaggttagggtcccccaccctccacctgcccagaggccaactctgttcccttctcctttcatcccagaggggcctcatcagcaaagacagaaactgatgttccatgcatgtccctgcttccaaagcctgaccttccaaagcttgcttccttcctcctggctgcacagacacctctgcttggccacagctttgctctttggtcctcaggccaccagacccctcacagcatggcccttggctcttcctgcactgccctcaccctcagccgtcccaaggagtgcccagcactactcagcatgtagtccaggacctgcggcatcagcatcccctgggagcttcttagaaatgcagacctgtgggctctaccacaggcctctggaatcagaatcttcagggtggggcccagcagtctgtgttttaacaggttctcccggtgatgctggtgcatgctcaagtttgagaaccgctgctctcatagactgctcctccaaggggaagcagtgtggaacagcagagaaagtcccgtccctatctctgactgtgcagtgagtgtggcctaggaacaggtcccttcctaagctctagtgtccccatctgtaaaatgggctgattggcctccacggtcagagcggccatctggctgtgccatcctgcatttttaggaatggaaagcaggcctctgaggcagtggacaggaagacttctcatccttgaattctagctcccattccaaactgttagtccccaaccttgtggtcacatcagaggtcaacagcagaacagaggcaggtcagggttgtccgctctgattagcagaacgacagccccttcctcctcctccctccttcccatccctactcattagctccctgctcctgggatgcttcccaagcagcccaggcctctagcctccatggctgatgacctcagctttcacactggtgaagtctgtgtacccatactgcagccccatcccatggggcccctgaagacccactgaggaattccgtagggtcttgttcccacgaccggagtgctggctctcacagtgaattttgatgcatttaaaataagattctgatgccagactgttaaaacaggcgctggttctgaagcaccgatggaaacagattgatgcagatggaaggaggaagggagactgggcccactgatttccagccccaccatgtgtgctgttttcagatgtgattgaggggtgttctgccctgcctccactgtcacagcctttaataaagatgtgaatcttgaaagcctgatgctccaatcacagactctgctcagcatccccagaggaaccactgagaagccttttgcctggataggagggggctctcccaggcataggcttgtggccacttgcccagcacaactgtgttttgtggggcgtcttttaggacttagcagagctgagagccctttgttgctcaatgctgtgagccttaagcatgtgaatccccccacatgacaagtggggagacccagggtaggctttcctttggatcatctccaaatgggagtgccatgtggcaggaaagaagcaccgatttcaagaattacttcctagagaaagtcaggaactagagaccagagtctgcaggaactttgccactgcccttcactggctaatcctgtacttctctctgtgttccttgagtgacaggtggtaaaacccttaaaaagggaggtgtgggaggcccaggactttggtaacaggtgatgaatgtgttgtcttggccatcacaggtggagcttcagttagtacccgagggattcccctggcacaagcatt

SEQ ID NO: 9722 - DNA, 1166 bp, Homo sapiens
tttgtaaaagcgaaaaatttaaaacatctcttacagtccacaaatagatatacctactatataccacaaaaatttaagacatttaaaaaaaggtgaaaatttctgcgtggcaaaccaaaccaaacaaaaaaccgaagcaaagtccaaaggctaacaaactgggaaaaaaatctgtaacactcatcacataaagagcaaaatcttgctgttgtgtgtgtacacatagcaagagaaagaaagtaatttagcctcttggaattcagacagtgaataatttgtacattctcttttgatccttatgccaagaatttcctttttttattgtaaaactttggatttgttctcttaaccctcaagcctatcttttagtcttcctagaagcaccgtgttctgtggaactcagcatcagcagctttgctgaggactcccccatcttcctttccttccccggaaagcacagacctaagtgagtcttcactggatcccagctaacagcttctgcccattcctatctttccacagagccagtggcagccccagctgcagcagctacgtgacatgggcatccaggacgatgagctgagcctgcgggccctgcaggccaccggtggggacatccaagcagccctggagctcatctttgctggaggagccccatgaactccctgcttcccctgaacccccagcaagttgcagaggctactgcccttgggaggcactcatgaaggtgcctccatctctcccttccccaatatacctgatggtcaactctcctgctttgtccagttcttgacctttctggctgatctgagttggtggaggcagtggggcaaacaaggtgtgctggtcttgatgctgtggcatcaaagcagggctggcccctagttctgggccctggatggaggatgttagaccctacatcatgggatgctgtgagatacccatgttaacttctgggagaagtttccagccgtagcccccagactctctggggctttggagtttgggagcctcaggatgtgccgaagtctaggcagagctatcacccaatcttcagggtggctgctggattacagctgtgcccagaagaggcttatgcttccgagatgtccagtctatggagtggctgggtggactttcaggggaagcacatggaggcagcttgc

SEQ ID NO: 9723 - DNA, 1095 bp, Homo sapiens
tgaaatgtatttaattggctaggcatggtggttcacgcctgtcatcccagcactttgtgaggctaaggcaggaggatcccttgagcccaggagttaagagactagtctaggcaacatggcaaaaccccgtctctacaaaaaactacaaaaattagctgggtgtggtggcatgtgcctgtagtcccagctactcaggaggctaaggtgggagaattgcttgaccccaggaggttgaggctgcagtgaaccgtgatggtgccattgcactcaagcctgggcaacagagtaagaccctgttttccaaaaaaaaaaaagtatttgttaagttattgaataagagtatcttttaaaacatgtatcattctccagctatctaatcaaaataaggttctcgggacaaaaaccatgtaaatttgttttgaggagcaaaatataagtggacagttctttttttagatctgatctactgtggtcggaagctaaaagatgaccagacacttgacttctatggcattcaacctgggtccactgtccatgttctgcgaaagtcctggcctgaacctgatcagaaaccgggtgagtgaggggcagcccttaggcaggcagagtttctgtaatatccgcaagggaaggatctgtgtgttcttgaggcacaagcctgggtggaacaaagggatgatttactgagctgatgataaatgatatctttattacttattggattagaccatgctgataaacagagtccaattttgaccttcttactgccggcatcactaatggaagatttgtttctccattttgttttttgttttttggtttttttgagacagtctcactctgttgcccaggctggagtgcagtggcacaatcttgatcttggatcactgcaacctccgcctcccaggttcaagtgattctcatgcctcagcctcccgagtagctgggattacaggcatgagtcaccatgcccagctaattttttttttttttttttttctgagacggagtctcactctgtctcacaggctggagtgcagtggtgtgatcttggctcactgcaagctccgcctcccgggttcacaccattctcct

SEQ ID NO: 9724 - DNA, 1647 bp, Homo sapiens
ttcttcagccttcttcagctcagccctcttctatttcttatggggccatcttggcctcaccatccccacacgtgccgatgtcaggttcattgaaatacctcagatttgtaattgttgatgtttgagtcttcaggaagtatttgcatctctgaaatcttttttatatgtgttttgctgacttttgttttttttttattttaaaatttttatcgtagcaccaaagaaatgaaaacagatcacccccaaagccaagcaagtgattgggtaacccggcccctctggcccttccctcaagcccagtgaggaggtgggtggaggcatgcaggggagacgactcagggatcgcgggggcggggaggtggagtggagaggcccgctctcacaccgggtcgggccctgaaactgtaccagttctgaagaccgttttctgccacacccccacccccagctgaccagggaggcagaggacacctccccatcactcagcattcccagctcagggcacaggcaggctggggtcctcgctggccttgccagaggttgagccgccccagggtatgaggagatgaataactccacagctcctcctggaccctgcgcgggagcaggcagctcctgtgctgtaaagaaaattgattcgcttgcggctcacctcagtcgaggaagccctggaatgttcagcagaacaccaccactgtgacatggggctgtggcagtgggagacaccgcgcgtggcgtgggtgtgtgtggcagcgtggctcgcattcagtcctgtgtaggagaggaaagggaatcaaaagcttgagcacaaacagatacctcagcccggtaagctgcagctctgctcaactgcgtcttctctcagccctccacacacactcacccccactcccacacacatacacacacacacacacataccccatctcccgagggctgacctcctctggcctcagcctgcagggtgtgggcagagaagggcatctgggacgtggtgccagtgaggagcccagttggctggcactgggcccatttgaaggtgtctcagacatttggccagtatgtctttctcaggggtttggtcacaaaggatggactcttcccacccagaggatgcagggaaagcacactgtgtctttccggtcattggatcctctccctttccccaggcagctcgcctggccacaccgttggagtgaaccctcactgccctcaaggacaacagcagggtgtcacccagagcccgatgaggggtgccagcaggtgcccccacgagtggggccttggcccaagcagagcttcccctgaaggtgccatcagccagggcagctctgtcccctcctgctctccatcttatatgtattctaaccaggaaaaatgtgatagcacatgggtagcctaggcagtgagtaaatacctcagatgtcctcctgcagcaagtgtctatatgttgtggttattttctatcttacatgttctcgaatgtttatatttcaataaacctctacctcttcacacaagcaggtctctctcagttgctttgagtggcctttccactggacagtactggggagaggtgagctccttcagagtgaaaggggactgagtgaactactcctgaccccttgatttctcctgaaccttctc

SEQ ID NO: 9725 - DNA, 3161 bp, Homo sapiens
cctgtcacttgctcttagccagggaagtctttcccactgggttccgggctgggtggcaggctgagcgtgcagcaactccaggcatctctaccctcagccccctgcacggccaggtgggcctttgtttacagccgtaggcagctctcaagactgtgtttcaggtttacagccactgggcctgggcacacacattgaagagtgggccaggtcctgtctgggggcctgtacctgctctatttcagagcttgtggctttgtgtctcccctgctttccccacgcagacagcccttcctctgtagaaccagctgcacggcagctgtccaccagagggcagacctgcactctccattcatgtccagggctgtgacagaccaggccttcccctagccccacaagttgatttggggggttttgacccttactcctgagctgatccaagttttatgctgatttttccaaggatctctccctccttttccctccatcactcagaggtagggaagggggcggcattaggatggtgttactgtattgggattttatgttgttctgtcgtcttcagcacaggtagtataaggttatattactgtagaaccacagtgcccatcttgccagcagtgcccgcccccaccctcaaagctgagcaggttgagcctttgcctagtctggggccagacccctcagatggggatatccctgggggagcctggtgctgaaccagaagaggcttcctggtgcttctgtcctaggccaccactcctccagccctttgcccgcacatacatgccccacctactctttcatcccctctgcccttcccctgaaacggtcctttgcagctgtcatcccagagcaggcagatgggctcccgtgcttgagctccaccccagctcttacatcatctgggctttgaaccttttacatttgtccagtctagatgagtaggcttggggccagcaccctgtctcaaagatggcaaaatgaggctagttctggatgagctagctggtgtgggttccaaccataggaacacactgatgctcaaatcctaaggtgccaagctctaggccctggaggctggtagaacaggatctatgcctggaatcctggcagggattcctgtcaaggacttgtgtttaagcctgcttcagggcttcaggctgcttctgctctgtgtctgcccaggctggctgagcgggtggatgggtggacagaagggctcaccaaggattgtggacatagggtaggccctggtaccacgggtttcaggctgttatcacttcccttgtaggaacatagccagaagcagatgagccagggtagagggctggcccctcctctcatcttcccttcagtcttaaattgtctccagcgatgggaagaggccagggactgtaacccttgtgctgtgtattctctgagcctctgctcactctcagggccaagcagctcccaagccggggccctctcttggccaaaatctgaggagcagtctaggttacaggctttttggtaggtaggttctggctgcctgttaatgcagttaggccccctgattaggtacagtgagaaacaagctagaacaaccctggcccagaagactgtccactccagcaagatccagggatgatagccttgcagggccactgggagtttgtgcccaagcttctccctcttctctccccagggggcactgggactggtccctgccctcatccttagcctgggccttccccagaggtattaaagagaagtatgattcctctgtcttcagttcttttcaggggcatcctgcccatagtacccagttcccaaggggcccccagtcacgtggtgaagcctagcactcatgcagctcttagggaaccaaaaaccagcactgaaataaagctgaatgactgactgagtcctgtgccgtgtgacttgctctgtaggctgtcatgaggtgctgtctgtcccagcctaggaacccgccccactcgtctcctgccctcagcaggccatagttgttgggcacatacagcctaaagtcctggccagtaatgggactggcaggctgtggaaaaccagaccccacctggctagccacggtgggctgattcccttaggttctctggggctgagaggtacagaagccagcagggcagaggtgccatctaggactgctcagcagcctgggcccagaggatgtccccaattctggtcttacccctgcctagctcttctgtgcctggcccagttcacacttagctctccacaagctgaactgctaagaaagactttattaataaggtcaggtaaggggaaggcaaggagcctggagatggacacactggtaccaggggttacaaacagtaagaaacactttattataactttataacatataaatagcttgggtcaaatctgtgctttctggcagctgggcaccaagtctgctcccctgcaggctcctgccttccttcacattgcactgttcattgggtggctctggcctggggcctggcggtcgaggctggagtcaaggggctgggcggcccagtcccgccctccatctcctcatgcggtggcctgtgcctgtcatctgcttgggttgcggctggtgtggaaggaccgctcctcaggggtcaggccagcaaagaaggggtgcagcagggcctcggccagtgtgatgcgctgggcagggtcaaattctaacatcctcctcatcaggtcaaacagctgcacgtgctccagggagtcttggagcatgtaactctgctcagggacacaaggtgcctcagtgtgacggcagggtcgtgggaagccacagcaggtccccttgcctctgggacgccttgctggactggatcgaggaggcagtgatgcctccttggaggactctacttccgccctcctggacaatgagcagctcctttcctttcatgcctgtttaacgttttgctcggaacttgccaggctactaggtgtcttgctgggttgatgcctctgcccccacatgcaaagtcctgacaggtgggtagagatcacctctgcgaaattcacttgtccgagcaccaaatgcagttgacagaggcttcctggccatgtctaggtcttccctccccctcacctcagtcctgcctagttcttcccaaaatttcgaggagagagagggacag

SEQ ID NO: 9726 - DNA, 1185 bp, Homo sapiens
cacgggttcgaattctcccaggagccactgtcagaacccaaattggaagggagtgcatgagggaggtactgccctgcagctccacggactcgtcttctcgggtcatcccgagtccccccctctgtggagctcagagtaggaggtggctggagtctggaggaagaggatccgtatgggccaggtccctagagagagtgctggactcccctgcccttccctgtacagggcctccccgcaggtgccctggcttgcttggttctgacccctccctcattaccccaccatgaccctgcgggctgcaagcaagcccagggcccagccacctcgggtgagcagttagaagcccaggtcctaggactgagcctgtcacccttggcctctcagaagaccaggcctaagccaagggatctttgggtgggaaactgggcaggccttctgcccggggggaggtaacggagcattagcaccatgcccccaccttctggcaccctgggcagcccattctcctaggctctttgtggcccagaccaggtgtcaggaaggggtgtgtccagccagcagattttttggagcttaactaccagttcacttccccgcccattttgtacacccgggaaccgaggctcaaagggagaagttgctaccccaggcctctagtggagttaggctggctgtcctttcatccccagctatacagggctggatggctgtgggtggaaggaaaccaggcaggcaccttcacccactggggacacaggcccccagcccggccccagagggaccttgttggttgagcacgtgcttccctgcagagggctggagggagtgaaagggcttccggctccagctgtggctgggtcagctagcaggagatgtggggaatgtgtggtgtatggccatctgtgtggtgtggcaggaaggtccggtcctggccccggctctgagttgaaacaacctggtggtcagtcctgacccagcactcgccacacctatggcccagctggcacaggagcagccaagttcaggatataaatggggtcacatgggaaccgtggaagctctgtctccactggcagcaggctacagactggggacatgggagcattgtgagagtggggacacccagggggcctgtttcaagctcctagtaccctggcggttccagtgtctttcttggttgtggcc

SEQ ID NO: 9727 - DNA, 1250 bp, Homo sapiens
catgcggccctccttcctacagctccgagagcagcttgagcacatcaaaacccacgagctgcacctgtgacggctggcctccgcctgggtcatgggcctgtggggactgaacctggaagatcatggacctggtgcccctgctcactgggcccgagcctgaactgagccccagcgggctggcgggcctttttcctgcgtcccagcctgcacccctccggccccgtctctcttggacccacctgtggggcctggggagcccactgaggggccagggaggaaggaggccacggagcgggaggcagcgccccaccacgtcgggcttccctggcctcccgccactcgccttcttagagttttattcctttccttttttgagattttttttccgtgtgtttattttttattatttttcaagataaggagaaagaaagtacccagcaaatgggcattttacaagaagtacgaatcttatttttcctgtcctgcccgtgagggtgggggggaccgggcccctctctagggacccctcgccccagcctcattccccattctgtgtcccatgtcccgtgtctcctcggtcgccccgtgtttgcgcttgaccatgttgcactgtttgcatgcgcccgaggcagacgtctgtcaggggcttggatttcgtgtgccgctgccacccgcccacccgccttgtgagatggaattgtaataaaccacgccatgaggacaccgccgcccgcctcggcgcttcctccaccgagcctgcttgtcctgcccggtcgtccctcccatgccatcttgtccatccccctgtgtctgtgagtggggctgggtggggagcatggctgggagatgtagccgccgctttgtgtcagctgcacgagtgagtgtccttgtgtctgccctccgggaagtgctcaccagttgccctgctgccgccaggcccagctccggggccccatctacaggatgctgcctgggggttccagctgcctcccctgctgttttcaagcctgccgcacaaggagggctacagctagggatgggagggagcccaggcctgcacagatgggaacggggttctagtcaagccccctgtgcaagagagagaaaaagcaatggtgggcccagtgggcttcctctggcaggaggagaagtgtctcatgcctgagaagatgctgacccggagagggacgggaaagctcctggtggttctccagtttcacccacgatgtcacagctttgccctgtcccca

SEQ ID NO: 9728 - DNA, 1157 bp, Homo sapiens
tgaatggaggcagaaaatagcactttatggtttattatagctggcaatccaaaaaagaaactgtttgagaccagttcgagaaattccgtttgctctattcttcctagctctaagatggtttgcaggcttgaccttcaagacagcataaagtgagtccttttgtccctcttcaggttgcacctgtctaactatgacagggatcatagcaggttgcttaatgatacagcaggatcctggcttccagaatccctggacctggggcatccccaactggtccaaccgtccgggtgagtttagtgattctggtttgcccttccctagttagagaaaaactgctctgacatgttcatatttatttatttgtatttccttggtctgggtgagtttcttcacccagtctttgagctaaagattaggtcgaaggtactggggctggccccagaagcctgcagtttttattattaccagcagagggagctacagggagcagtccggtgccttcctattgtttactttttaaacttttgagaagtagcaatggactcgtgagagtgggtatacagctgtgtgggctttgtcctagactgaggcttacagacaggaagggtaagagagacctaagccagctcctagacccttgcctgaggaaatcagtccaccagtgtagagggcctcccttcactccagcatggaccattctattgccagattcttctggtcacagcatgggccttactggatactcaggattgggctttaagcagacctctgggtgtgacacagcctctttcagcccccagcccaaacagcagaaataggcataatttctgctgtgacaccccctacccacaaattggagagtatatcttgctatactctataccaagcctctttctagaatttttccaacaggttttgttttgttttttggcttaactcagaaccatggtgagcgttctgctttgttttgttggagacagggtctctgtcacccaggctggagtgcagtggtgtaatcacagctcactgcagcctcaacctcccaggcccaagcagtcctcccacatggtgagctttgaatgggcatagacagggttcccagcccaatagtcgggattggggtataggttctacatgggaaagtatccagtctcttg

SEQ ID NO: 9729 - DNA, 1162 bp, Homo sapiens
gaagtgcaatgaagcgatctcggcccactccaacctccgcctcccggttgaagagattctcgtgccttagcctcccgagtagctgggactgcaggcatgggccaccacaccaggctaattttttgtattttagtggagacggggtttcaccgtgttgcccagggtggtcttgaacttctatgctcaggcaatccattcgcctcggctttccaaagggctagcgttacaggcatgagtcaccgtgtccggcccaaaaaaaatttcttttgttaaatggcagctactggacacttttctgattgggaaggaagtaccagtgtataaacaacaaaaaagccacaaagctagtcgcttgtgggttgacagtaggcaggattaagtaagagcagtaaagggtacagagagacagtgatttccctggttgtagcactaagggttatttttaaaagatttctactttttctttattctttcctggctaattctttgtgttttctcttacagatgggcttccccaaggatttattgacattgctacttgagtgtgaacagttacctggaaatactgatgataacatattaccttatttgaacaagttttcctttattgagtaccaagccatgtaatggtaacttggactttaataaaagggaaatgagtttgaactgaaattaggtatttgtttcatgtgtttgcattaataagcagaaaattaagtgctgtattggtttcatggttttgctgccctcttacatgctgagagaactgtgttaattctctggaaaccatctgacatgaaaatcagcttcattaatatgtttgggtgccctagcttgtaaattagctgaaggctagaagtcatttatatagaattttcttgttgacaccctaggcttaggggactggttgtctgtggggatagatcaaattgtgtacctttccaaaacaggttttaatgatgtttaaaagtggtcactgagatagtcttgaggatgtgctatgcagtagccaagccctcttacggtgtgttcctctcttagtgcccctttcctttcctacctgttcttcccttgcagtggtgtattagccttggacattaaaacatttgctttgtaaatttggaggcattctgattaaacagctgagtaaaacaaatcctgc

SEQ ID NO: 9730 - DNA, 2090 bp, Homo sapiens
ccttcagttgcaaatgggaagggctcggataccggatttgaagcagtgtttgcacggcaagcgcagcttttatttagactgccggtttgtgagggttggctctcagagcgctgatggcgattatagtggaacttcaccttcacctgctcatgcgccccgcagcgcgcccgctcccacgcccgcgtagctgaggacccagactcgccaggaaaggctagtgaggctggggcccgggcgggcccggccgggccgggtcaggggaggggcctggcggcaggggcggggcctcagctaaaggcgcggagcacccggcgccgagagcgctgagtagagcggcgcccgctcgagagaagtggggccgagatcgcgccgtcccagcccgcccgccggcgtctgcgctgctccggcgcccttacccctgctggcccttgcaaggcgcgaccggcggccatgcagccccggggctgaggccgccccatggcaaagccggcggtcccggcgacgacggcgcatggagaacttccgtaaggtgcgctccgaagaggcgccagcggggtgcggggccgagggaggcggcccgggctccggccccttcgcagacctggcgccgggcgcggtgcacatgcgggtcaaggaaggcagcaagatccggaacctgatggccttcgccaccgccagcatggcgcagccagccacgcgcgccatcgtcttcagcggctgcggccgggccaccaccaaaaccgtcacgtgcgccgagatcctcaagcgccgcctggcgggcctgcaccaggtcacgcggctgcgctaccggagcgtacgcgaggtgtggcagagcctcccgcctgggcccacgcagggtcagacgcctggcgagccggccgctagtctcagcgtacttaagaacgtgcccggcctcgccatcctactttccaaggacgcgctggatccgcgacagcccggctaccagcccccgaatccccatcctggtccctcgtccccgccagccgcgccagcgtccaagaggagcctaggggaacccgcagctggagaaggctccgcgaagcgatcgcaacccgagccaggggttgcggacgaggatcagacggcctgaaactccggactgtgggccacctagtccggcaggatcttccgccagcgcctccaccttcagatgtacctccagcctttcactcctcggtcctccggagcccacaacctggacacagctcctcaagacaggtagcatggaccttaaggcgacaagagaggggccccaggagtggcaggagaggatccccgaccaccctagggaaacttcgtgcgataattgctgcttatgcccgtgttgcgtgaagacacggaacttcaccttttctgggaccttctttgggggagaatggtggacagtgggattctggaaacttgtttgggacccccaagggttaaagccacccagcattcacgaagagcacctgaagtatggaagctgagaagagttattggaatcacccccaccgttgacagaggaaggcagggggtgagaattaactgcttgagggtaggagagtctgagatgtgggggccctattccgctccccgccctgggacagttttcctttctagttttctttcccctgcttcagaggagcatctctgagggttctagctcttttaacaccccttttccccctgctggcccagagggagacccaggactgaactctccaggcctcctcccctgagccctgcagctggctggagtcttgcttccaataaaacaagcacaaaaatggctgtgtcccccattttttttctaaccacccgcctgtgcagagacagctctcgcctggccccttgtgtctcccctcccctccagccttgcgtcctgagtctttggagtcttcagggtcaggcacagagactgaacagcttcaaaatggtgcaaggcactgcccagtccctggcttcttcctctctcctcccccactccgccctcccgggctggccctggcctcagaggctgttgcaaatgggggcccgtgtacccctgtacatcgccactaagggaaagggagcggcacattgttttt

SEQ ID NO: 9731 - DNA, 2941 bp, Homo sapiens
tcctacagaggcattcatggggagggagcactgttttttttttacagatgggtcccatctatttcctggatgggctgccttttctctttgattaacccttctttacgctctttttcctacaggttcataaattttaccggggaagtggggggagtttcagcaaagctcaggaggagtggaccacaggggcctggaagaatccacatgtgcagcaggcagcccagaacgcagccatgggggcagcccagggtgccatgaatcagcctcagactcagtattccgccacccccaattacacgtactccaatgagatgtgaaccagccacgcctaccaggtggcagagctggggccattgggacagggggctcaagccacatcgtcatttgtggttaccaagcagggttcccccttcccttttctccttccctactttgtacaaaggaccagagttatatatatatatatatgtatatgtctgtaccccagcccccacctttcagattctgctcttggcactcagctgtgggctgcacgtggagctgtcccgtgcggtagtagctgtgtctgtgtcccctcgtgaaatagtgtgcagtggaggtctcttgtggtgctagatgtgtgtttagagctaaaccagcccccacccccaccctccacctgcccctcttgcctctggcccctctgaccctggcccagggacccctcacggggccaggggaggcatagcagaaagactggccccttcctagggttatgagctggaactgtttctactttcagtcttcctgggaagtaacagtacttagcactcttggtggtgggtgggagggtgggtacaggccagggatattcccttgctcttttgatccctccaggcctcgcctccttcagcctcctcctccctcatctgttccctgatgtcacattccctgtgcaatcttcccttgcccatggtctgtctatctctttcctatgtggcttttctttgtcttccccaaggctgagtgtcccagttttatctgctcctgagactgagcccagatccccaaatctaatctgatttacagttcaaggaagctgatggggagctgggccttacccctgatgtaggaggggcacacagctgggggtgcagagcccacctgggtacctgacccccaggggatgaaaatgcaaggatgagtctgcttgggcctgagagtttgatctgcaggggcaggctcatcttttctctcccctgccttctcctccttctctccccagagcccccttgagcccctctgcctatgtccctctgcctcctccccatgcccccagttgctgtggcttgattctgctaccctgaccccaccatgtgccaggtggcatctgccttactgccttccctgaggagctgggacatgctgggcagttgtcagatgtaaaggcacagctggagcagagggcatgtcagtaatgattggtccctggggaaggtctggctggctccagcacagtgaggcatttaggtatctctcggtgaccgttggattcctggaagcagtagctgttctgtttggatctggtaggacagggctcagagggctaggcacggagggaaggtcagaggagaaggcaggcagggcccagtgagaggggagcatgccttcccccaccctggcttgctcttggtcacagggcggttctgggcacttgaactcagggcccaagcagaagcacaggcccagtcctggctgcaagcacaatagcctgaatgggatttcaggttaggcagggtgggaggggaggctctctggctttagttttgttttgttttccaaatcaaggtaacttgctcccttctgcctacaggccttggtcttggcttgtcctcacccagtcggaactccctaccactttcaggagagtggttttaggcccgtggggctgttctgttccaagcagtgtgagaacatggctggtagaggctctagctgtgtgcggggcctgaaggggagtgggttctcgcccaaagagcatctgcccatttcccaccttcccttctcccaccagaagcttgcctgagctgtttggacaaaaatccaaaccccacttggctactctggcctggcttcagcttggaacccaatacctaggcttacaggccatcctgagccaggggcctctggaaattctcttcctgatggtcctttaggtttgggcacaaaatataattgcctctcccctctcccattttctctcttgggagcaatggtcacagtccctggtacctgaaaaggtacctaggtctaggcccttcttccctttcccttcctctcccctaccccagaactttggctccctttcccttctctctctggtagctccaggaggcctgtgatccagctccctgcctagcatccatgacctgttggatgttacctccaatcagtttcctgtcctacctgcctctttggcttggacctatatggccatgctctggctctacccttgggaagcctgatcccggtgtgtggcccagcttgttcaggccctgggatgctgcatctccaggcaactatgcactttcccggggagagaaccagtatgagaagtgggggcagggcacacattcatctttgtaggaaggtctggcctggggtcgggtgaaggagggcccaggtcagttctggggtcccagtgacctgctttgccattctcctggtgccgctgctgctccctgtttctggagctggatgttccccagctggcagttgagctgcctgagccaatgtgtctgtctttggtaactgagtgaaccataataaaggggaacatttggccctgtgtgttctgctgtgtcatgtgtcttcctgtggacttgcgtggagcctcacagcgggctgtggggcaggggcatgaaagtatggggggtgggtggatctgtggtctgtcattccc

SEQ ID NO: 9732 - DNA, 1408 bp, Homo sapiens
acagtccagttccctgtacccccccagcactgcccccctgtgcccgggagtgccagtctcttccacagaaggagggcgcaaggccacccagctctccaccaatgcctgtcattgacaatgtcttcagcctggccccctaccgtgactatctggatgtgccggcacccgaggccacaactgagcctgactctgccacagctgagcctgactcagccccagccaccagtgaaggtcaggacaaaggctgcagggggaccctgcctgcccaggagggcccctcagggagtaaacccctaaggggctcacttaaggaggaggtagccctggatttgagtgtgaggaagcccacagcagaggcctcccctgtcaaggcttcccgttctgtggagcatgccaagcctactgcagccatggatgtgccagatgtgggcaacatggtgtcagatctgccaggcctgaaaaagatagacacagaagcaccaggcttgcctggggtgccagtgaccacagatgccatgccaaggaccaacttccacagctctgtggccttcatgttccgaaagttcaagatcctccgtccggcacctttgcctgcagccgtggtcccgtccacgcccacctcagctcctgctcccacacagcctgcacccacccccacatctgggcccattggactgcggattctcgctcaacagcccttgtctgtgacctgcttcagcctggcactgcccagccctccagccgtagctgtggcctcccctgcccctgctccagctccatcccctgctccggctcgagctcaggctccagcttcagcccgggatccagctccagctccagctccagttgcaggccctgctccagcatctacttcagccccaggggactccctggagcagcattttacaggactacatgcgtccctgtgtgatgctatttctggctccgtcgcccactctcctccagagaagcttcgcgagtggctagagacggctgggccctggggccaggctgcgtggcaggactgccagggtgtgcaggggctgctggccaagctgctgtctcagctgcagcgcttcgatcgcacccaccggtgccccttcccccatgtggtgcgagctggcgccatcttcgtgcccattcacctggtgaaggagcggctcttccctcggctgccacccgcttctgtggaccatgtgctgcaggagcatcgtgtggagctgcggcccaccacgctgtcggaggagcgggcactgcgggagctcgccctgccaggctgcacctcacgcatgctgaagttactggcgctgcgccagctgccggacatttaccccgaccttctcggcctgcagtggcgcgactgtgtacgccgccagctgggtgagcatggggcagccccagtggccac

SEQ ID NO: 9733 - DNA, 1260 bp, Homo sapiens
gtatagcagtcactctccacccttcccttctgcctgcccagctgccccggggccacgagtggatgctggggctgtggctgctcccctggaggggttccatctctgaccctgtggcccattcagggtgggctgaagagcccctgagcttttaacgtgagggtctttattggataggactactccctatttcttgcctagagaacacacatgggctttggagcccgacagacctgggcttgaatcccggctcgtgttcttgctgcaggacctgggcaagaaacttcacctctgctgagccctcattccccatgtgtaaaatgggacaacgcaacctacctcacagggttgttgtggggatgctgcctgatacataccctgtcaccatttggtctctgcttcctctctgggacagggcctagaattggaggcagagaaccttcctatagaaagtcttcgtgtgtcctaggacttggctatcgtagagtggtaccttaggcagtggatgtgactcacactttcaggagtcaccccccagcatttggggttgggttggccctactccagcctggagctccctgagggagcctgcactccctgctcccaatccccgctactggtgcagggatgcagcctggagctggcgtccttgttctgggcctgctgctgccgccaccccaggaggccccaggcctgtcctgaattgacatcagtgcttccctgaactgcctcccccacccctggcattatcccaggaaacttatgttttctagaagctaagcagctgctgggactcagggactggtgcaggtaggctgagtggcagctcagtcctagaaggtctctgaagatctggactgaggaccctgctgctccccaagccagagcccatcagccaggcctgctgtgagccacctgcctgtggagtgctgagctcaaccaaaggctggcaagctctgggcctcatttaagggattctgatgagccgatgggccctggaggcagcccattaaagcatctggctcgtttttggaagtggggcctgtccgtgtgtttggggatggtcggtttcatgttccgtcactgtgtgcttagccctttgctcgcaggctgctctccctgctcccagtccagaaggtgcttctgcaccctcgtgcagatggctgtggctctgtggacccctctcacacacatacttgcttgctctgggaaagccctctctcctgagaccccgtgggtcctcgtggttgttggtctgtgggc

SEQ ID NO: 9734 - DNA, 1339 bp, Homo sapiens
cagagcaagactcgtctcaaaaaaaaaaaaaaaaaaaaaaaaaaaaaaaaaaaattaaataaaaataatgtcctctacgctcctgtgagtaacttggctccgggggctccgctcgcctgcccccacgccgcccgccacccaggaccgcgccgccggcctctgccgcgaacaaacccttctgacggccctcgctgtgcaggccaggatgcctctcccccatccgcccccgctgcggaaagttaagtttgaagaggggggaagaggggaacatggacatgaagaggaggatccacctggagctgaggaactggaccccgtcagctgttcgagaacttgtcttggacaattgcaaatcaaatgatggaaaaattgagggcttaacagctgaatttgtgaacttagagttccttagtttaataaatgtaggcttgatctcagtttcaaatcttcccaagctgcctaaattgaaaaagcttgaactcagtgaaaatagaatctttggaggtctggacatgttagctgaaaagcttccaaatctcacacgtctaaacttaagtggaaataaactgaaagatatcagcaccttggaacctttgaaaaagttagaatgtctgaaaagcctggacctctttaactgtgaggttactaacatgaatgactactgagagtgtcttcaagctcctgccccagcttacctacatggatggctatgaccaagaggaccaggaggaacctgactcagatgctgaggtggatggtgtggatgaagagtaggagggcgaagaagaagacgaagaagacgaggaggatgaagatggtgaagaagaggagtttgatgaagaagatgaaaatgtagaaggagatgacgaagatgaagtcagtgaggaggaagaagaatttggacttgaagaagatgaagatgaggatgaggatgaaggaggaggaagaaggcaggaaaggtaaaaagaggaagagagaaacggatgatgaaggagaagatgattaagaccccagatgacctgcagaaacagaactgtttagtatcggttggactgctcatggatttggtagctgttaaaaaaaaaaaaaaaaaggtagctgatacaaaccccaggacacccacccacccaaagagccaaagaatagttcctgtgacattccgtcttcctccatgtagtccctcttggtaatctaccaatctaccatcgagcttagggacttcaccccaacaaaattgtaagtgttgttaggtttttgtgtgagactcttgctgtagcgtagatagctgtgattggtgagtcaaccatctgtggctaccagttacactgggactgtaaca

SEQ ID NO: 9735 - DNA, 1071 bp, Homo sapiens
ccggagagacttccctaccaggaggcagtccagcgggacttccgccccgcgcaggtcggcgacagcttcggacccacgtaggtaacgcccagcgggtgggcggggccacaggcctaggggaagtcccaacccagctcccagccacaccttcgttgtctgccctctgccgtagacaactacgtgggatcgagcagcaccctctgctgggagcagcaccctctgctgggaacagctctctggtccctgggtcttcaggggatggttttcattcccacgtggccgcctctggacatcccttaggaagggcaccctagggatcacgaacctttgacgcctctgcctgtttccctcatcttgcttctcaccttgttgctcctttcttgtgactcaaagctgagtaccttgtgacactgcagatgcttggagagtttcaagcccctgccgacactttatccaaggaaggatatcaggataggacttctacctctaggcctatcacaacagctctcttgcagatggtggacctgctggttccgggtggagctgaccatcccagaggcatgggtgggccaggaagttcacctttgctgggaaagtgatggagaaggtctggtgtggcgtgatggagaacctgtccaggtgaggaaccctgtcctagggccaggtatggccacatttcagccctgaaatgactacagcccttcttctgtggactctggagaagccacagctgagttgctctgcccacagggtggtatcaggatttcaggactagggaagttgccacttgggcatctgtgcaattggtccttagtttttattgtgtataatacaaacttataggaaaacatttcaaacagttctagataaagtaatggatctctccttatcacccatcccattccccagctataaccactgttaagtgtcttattcatgctccacccttatcaggtttagtccttatactcctatctagtaggtctttatacccatttacaaattaagaaacagatgtgtagttgactcactcaggttcacacagcttctatttcaaattggactgactct

SEQ ID NO: 9736 - DNA, 1208 bp, Homo sapiens
tgtgtgggcctatgcactcacacactgaagaaacaaggaagatgcctttcaagcctcactgggcctctctgggacatggccacctgacctgtgtgtggctggtgcagcctggcaccaagtgggctacctgttaggaacatgaataccttacaaagctgaagctggaacttttcccaaagggttttgggtatagcctgccctggaggggaaggaagtccatgcaagcaaagacatgcagtttgcttgcacacaccagcagagctaagactggagtctcctgtggcctaactttcaatgagggaaccggatgctgttcacactttgactggatggagatgcatttacaaaacagactggagaaggacttaatactcagatggattggaactatcatggtcactgctcctctcccctccccacaaaaggaaaaaaaagctggatttgattttttttttctggtcactcgagcacatctaagatcacccattaggttttatctgggacctgcagtttggctttgggattgatcatcttgtggattttattcctgacgattcccttgctgcctacccttttctctcctctggttctcaacctcaacgagttcaaatcagttgtcctttttagctcccgtggaactgttttgtatctgcctctttactagtctaccttagtgccatccaccagctttactctctgacacacacacgcacacacacacacaattttaacttgtttttttgtacataatgtacatactgtcaattttttattaaaagaaatatgctttgatgtgctagcataactgctctagcttcttgtgtaccatagtactgtggcttcagatttagtacctatgaacagatgtacaagacatttattacactttttaccaaagggagttaccattgtagtacttttgtgtaaaacttgtcttcccctttgcccccaacttttttttttttttttttgtaaataaataaagcttggttcttacttaaggaataaactctcaacccacgtcccttgtcctcaccagaaaatactgtgaagcagggattttgacttcagttccttatccagggtagaaacaggattttgcttaaaatacttgttacttgtcccaaatcaaaatattccaaaatcttagaatacttaagtcttttagtacgtgtttttttcccttgttcaaataatctgaaaatatt

SEQ ID NO: 9737 - DNA, 1106 bp, Homo sapiens
agtatttgaatatatttaaatatttcaagttaaaccaaaaaactctcaagacaaagcggtcttttgggattgttttgattgttattgtttgttcataatggatcttagcaattcaggaaagttcagggaaacgtttcagtaaagtcatctcctgtttggttcctctggtctaaaatcagtagtcctaagcaaagcacacggtggtggtggcggcagcagcgacggtggtggtaataactaccatttatccaacttcatcctgtggttcttatgtgccaggtattgtgctaaatactttatgtggattgtatcatttaatccagacacagggttgtgagagtaataggtgctgttatccctattttgctgataaagaaacagtcttatgtagctagtagggcagaaccaggattcaaatccaaggagtttgactccctaccttattcttctaaacactactctattctattttgatttgggtcctgagcatacccttctttgtcttcctcttcagcttgatgtagttttagagaccaatctggcaacaatccgggttctggaagcaatacagaagaagctttcccgcttgtctgctgaagaacaagccaaatttcgcttggacaacacccttgggggcacatcagaagtcatccatagaaaagcactccagaggatatatgctgataaagcagctgacatcattgatggtctgagaaagaatccctccattgctgttccaattgtccttaaaaggtacatgagcaaatgtgcccttagtgctttagtgtacttcactaccggttcagtgtctcattaaataaggctctcattttcaacctggttgtcccatgagacctctctttctccccaaccctggttgttggaattcaggtgcagaatggaacttcttttgggggtcctgtgtaaccaacattagagaacaaatcttgtaagttcatggtggaaggctctgtgtgtatgtttgggggagtattttaaaatacagaaaagaaaagaagataattaccacccatgttcctgccacactcaggactaactgttgttaacatctttgtggtttgtttgtttttgttttgttttgtttt

SEQ ID NO: 9738 - DNA, 1132 bp, Homo sapiens
gctcactgtaacctccacctcccgggttcacgcaatcctcctgcctcagcctcccgagtagctgggattacaggcgcccaccaccacacccagctaatttttgtatgtttagtagagacagggtttcactatgttggccaggctgtctcgaactcctgacctcaggtgatccgcctgccttggcctcccaaagtgttgggattacaagcgtgagccactgcacccagtcctgtaatggcattttcttagtactttttcttaaacatatatactatatctagatgaaatgtctggaatttgctttaaaatgcagtggtaggagaagtaagtatagatgaaacaaaatttactatagatcattgaggttggggtgagtacataggttcgttatacttctgtctacttttgtgtatgtttaaaagctaataaaaagtaaaggtaaatagggtatacagtataaaaggtacagtgttcttttatctttagctttaaaagtctagattctatatagtgtctactgatgaatagttaagaaaagcatacggaagtctggagcaggggttgctgataagccacttggtttggtggcagtctgtggtcttcaccaaaggatcacagtgctaaatacttattttggaactgaaactccagattggtaatctagctagactagttttactttgtctatgccattgatcatttttgggtttttggtattaagatgctcaatattgtaaatagaggaagaaaaaagaccagatcagaggacagaactatcttaagagagcgttattccagattaccagagtttaaaacagccttggcaaagattcttgctgtaaacatgttaagagaggcaacaggccggacgcagtggctcacgcctgtaatcccagcactttgagaggccgaggtgggtggatcacctgaagtcaggagttcaagaccagcctggccaacatggtgaaaccccgtctctactaaaaatacaaaaaaaacattagctgggcgttgtggcaggtgcctataatcccagctactcgggaggccgaggcaggagaatcgcttgaacccgggaggcagaggttgcagtgagctgagatcgcgccattgcactccagccaggacaaca

SEQ ID NO: 9739 - DNA, 1115 bp, Homo sapiens
ctccaatgagacaggaagagcttccctgcttcctccaatagtgttggggctcgggggtgggcttcagcagtccgtctccaataggcggggttgagttagggaagctccccgccaataggggcgtggagaaggagagcggctccccctcccctaccagtcgagggggaaggggcgggaaaatcataagacaggcctcggtggttggctgagtctttgacgggcgggtattgcgtcctgtattggaacgaagctgagtcttccctctgcggggcggggtcgggggagtgggcgggatttcccgggtaacagagaagcggccgcggcggtagaggcggcggagacggtttctccatcttcccccctccccttcccccctcggagtttccctccctccctccctccctccttcccagtctgggcaccggagcctgtgaccgcttcgttagtggagaggtagctggcagtccgcttcggcgggcctgtgccccgcgccgttctcggggcctccctgctgagctcgcggctcacgctgagagggacacgcagtgacgagcggccgaagcagctttgcggtgagagcacgctgggccgggggccgggcgggagcctggtggcgggtaacgccggactcgagggtgtgtattttggggggggggggctgacctcctcggcttcccgtagagcagacgggcgggaggtgtgtggttgtgtgaggggggtggggggcggagcggggtagctctccgcgcgggagggggaggagagcgtagtcccggtgcgcgcggaggggggcgggctctcgcgccgccgctcagaggcggggccggcgcgcgcgtgcgattgtggagaaaggggcggggccggcttcgcgctgagtgcagtttgcggccgaccaccccctcccctcctcctggggtgggcggggcctcgggctggcggccgcgctctggcctgctggggtcggggaggggtaggggggggtctcccgcgtgtagattcagggcgcggcagggagggggcgtgaagtctgagttcctccgccttcttgggatccggttggccggaggggccgtactgatccgtgatgccactccccttggccgtccccccctgca

SEQ ID NO: 9740 - DNA, 1507 bp, Homo sapiens
cgtggagagtcagtaactctcctacgaacctcctacctgttggccagccttccttaaactaccctggacaccgctgagcctataggttgccatcagttacgctgaagccatggatcaacttctttcttgtgtctcccagcacacgtgtgcacgcaaggcagcctttccctttggctagataaatgtggtgaaattgccactagaaagggccagtagcaatgtgttcttaattcctagcatctgctatcaaactgtgccttattaaaaccaaattgtggctattgatttttgctagggtccccgaggtaagtggggaaggaacctccctcctcctttctcccgccattctttttctgaggtctcctgtctcccactccttccctttcctaggattttatggggaggtttgatgagcatttgcctttctccccagagagcttgaccaagttacatattctagagatcgtcctgagtgccaagcacgtttataagtagggcgtgtattccagtcctttctgtcattctgtgtgtgtgtgtgtgtgcacttatgtgtatgggtccatatgtacgtgtgtatataatatatattgtatgtgataatatgatcgtattctataaatacatatacacacgatactcctttccagaagttcctggggctccgtgttgcagttcaggactccttgcttcttggaccctactatttatcctggactagcttgggttggtgatcatgtctcctcttgtcaggctacagagtggtggaagaggacacacacacatctcctccatgttcctgccacagggccccttccttaagtaatgacttatctccttccagttgccacctgttggagccaagaatgtattagtttgtggtgacactgggttagctcagcatggatttcccttatccgatgatttttctacatttacttggccaatttggggaacagacctccactgtgattccatactctctctttgctttcactatcccagggatgggaggcggagggtagagatgaactcactgagcagccagagccaaatgcaatcggtacgaatcttagaaggaaggagggggagcccaggtatgagaaagaaaaaaccactaagaaaatacctccctgggaggatgagctggggccctttttcttttgctggatggttcctttatgcagcttggccctgtctaccgagatgcccatctcttcctgcctgctagcctgctagaccctcaaactgggtgggttctgtgtcaataaaaagcttcaccccctggctgagtgaggtggtcccctgcaatcactgtttgtcccctacccacccaacctgtccctgcctgctcccagcccactcatccttatgtgctagggataaatcaagagtcctcagcactccacattcccaaaaaatcccaggaactcctaaaccttcccctgtgacagaagatgaggttggcagctgatcagacctcaataattttatactgtaataagctctt

SEQ ID NO: 9741 - DNA, 1706 bp, Homo sapiens
cctgcccgaacgcgaccagttccgcgtgcgcgcttcggccgcgctgctggacaagctgtatgctctcggcttggtgcccacgcgcggttcgctggagctctgcgacttcgtcacggcctcgtccttctgccgccgccgcctccccaccgtgctcctcaagctgcgcatggcgcagcaccttcaggctgccgtggcctttgtggagcaagggcacgtacgcgtgggccctgacgtggttaccgaccccgccttccttgtcacgcgcagcatggaggactttgtcacttgggtggactcgtccaagatcaagcggcacgtgctagagtacaatgaggagcgcgatgacttcgatctggaagcctagcggatctcccactttgcatggctgtcttttacagatgggaaaactgaggcctgatgctggagattctatgagggtgctctcctcaagggtatcagacggtcgtaggttcttaagaatttgattcatcagtggcaggccatgcatagagccacgggaggtgcgtccttgttttccagggaatgttcttagaacttggactactgattattaattgactgtgccttgggaaacagtgggaagtaacttggtgcagcactggggtattgttggcttcttgtgttggaaactttgtaatgtaaaaggaaaaactggaaatccccacgccctgtttccctttatcgtcttgtggttggactggttcaattcgtttaactcgaattcttgctcctggccgtggttaagctgtgtacagatgatggagagtttggcctcaagtttttataaactgagcgagactagtgttcaggatctcctcccttgtttaaatgtcaataaatgccccaactgctttgtaagtgcaactttttaatctgtctggttttctttttttctctagagacggagtcttgctctgtcacccaggctggagtgcagtggcgcgatctcggctcactgcaacctccgcctcccgggttcaagcaattttcctgcctcagcctcccgagtagctaggagtataggcgcccgccaccgcgcccggctaatttttgtggttttagtagagtcagggtttcaccatgttggccaggctggtctggaactcctgaactcgtgatccgcccgcctcggcctcccaaagtgctgggattacaggcatgagcaaactgcgcccagcctctggttttcttacatagagtcatatttatacgtcccaggagcccagagaagaatagagtcagcagcgagtgacctgcctgtggattagatgtgcaacagggccacatgtggaggatgcaggatgttgtacaggattgggcaaatttgtcactttaccagtcccttccttggaatgagtgttttggcagagctcttcctcacataacttcctgttgatattccagccccaggaaataccgtattagagggctgggatgtttgcttgcctaaggaaataatcactctgtagcttggccatctagcggttagaagtggcccaggaggttcctggaaatttagatgatagcagtgatagagaataagaagggagactaccaagttttactcaagatttctttattcttttttctttttgttttttttttcacacaaggcccaagctggagtgcagtggagctgtcacagctcactgcagcctcgatctcctgggctcaagcagtcctcc

SEQ ID NO: 9742 - DNA, 1184 bp, Homo sapiens
cccatgggttacaaggatttgcaatatattgttccatttacagccaatacaggtttaatcgatgttcaatattggtttaggaaatttaaggccttctaaatcataatagctctttcatgtctaaaaccattttatgatattgccaaaatgtgataggaaacctactcattaaattgttaaactttttaatgactatgtgaagatatgaattgtttcctgaagataatactcttaattgagttgtattgtacttcttaggcaaagcagtgtaaaactgtatcaattaaggcttgtgagtagtgatttccactggggcatcagagtcttggctgggctgaatctgctgcttgttggttcagtgtttcttatgaacaagagccacagtacagagcttcaagttatttaaaatactaagtcatcttacgtttccattttattaacgggatgttgcaatcgtttgtaaactaataaacttataaagtgattggcacaaagactccttgagcaaaagctgtgcagttaagtacaaaaagatacttaatttggagactcttacagtaatttttgccatgtcaaaacaatggcttttacattgaaagattaatagaaactctacatatgttaatttttttatagaacctgactcaaatcaaggtactctccattttattgccttacctgaatcagtcctttttggttggtaatagatttttttatacacccacgtttgatttaaaagtaaattctagttcttaagcacttttaacaaatccagaagcacatttttctgcacaaacaagttacaaagttcaaaagtgtttcttgtgcattagctttgagattcagtttttaactttgtaaaccacatctgagagacttgtcatttctacattgtgtgtgtttaatttcttttgattccattttggttaagagagcagtaaatagattttctggtattcttgttcacttgattacatttgtataaagttctgattgccagttgctcagataacaagtgacaaggcagaattctttaaatcagtaaagttccttaagcctaaggctaaatcttgaatacattgttgaattctttaatatcctgatggcaagcagactgatagctgcacatttggcatgctttgtttaatggattttatttttaattgcagatttatttggcaatg

SEQ ID NO: 9743 - DNA, 1206 bp, Homo sapiens
tgctgcggcgagtgccgcggctcctccgtagacccgcggagcaccttcgtgttgagtaacctggcggaggtggtggagcgtgtgctcaccttcctgcccgccaaggcgttgctgcgggtggcctggtgaggagaggaggcggaggcgggaagcttgcctggggacacgccgtgggcatgtcccaggctggcggggtggggggagagacccttgggacccaccagggccgtccccggctcgctcgccctacctgaggtgaccccctacccgcgaggtatctcccagccgtggtgccccggggggacttccctgaggggcgaagttccccttaaggttttctccatatctggctcttcttccgaactagcgccctgactgacacctacctaccccggggactttggatcccgcagggatctcctgctgctgcgccagcgggtgggggtttgtgagctgtgggagagacgaaaatgaacgtccgttcgcaatcctttgtgcgtttgcgtcctcagcgtgtgccgcttatggagggagtgtgtgcgcagagtattgcggacccatcggagcgtaacctggatctccgcaggcctggcggaggccggccacctggaggggcattgcttggttcgcgtggtagcagaggagcttgaggcaagtagcaaggggtgtcatgcacagtcatttgcaggttggtggttcagtctttgagaactatttttttttaaatcccagttttgttaattaaaggaacatctcgttccgtgaaaagattttgtaaacatcagttttagtgactacacggtaaggatgtgtcatgatttatttgaccgttcatcaaatgttgggcctttttttttttttttgagacgtagtctcgctctgtggcccaggctggagtgcagtggcgcgatctcggctcaccgcaagctccgcctcccgggttcacgccattctcctgcctcagcctcccgagtagctgggactacaggcgcccgccaccatgcccagctaattttttgtatttttagtagagatggggtttcaccgtgttagccagaatggtctcgatctcctgacctcgtgatccgcccgcctcggcctcccaaagtgctgggattacaggcgtgagccaccgcgcccggcatgttgggccttttaagtatccacattttcactattaacaacaacgctgtgcagaaccttccc

SEQ ID NO: 9744 - DNA, 1198 bp, Homo sapiens
aggaccagacttttaatacttgttcaggagtaagaaacctgaggcctaaaagcttgctgagggttattctgctggtttgtggcagagttgccactaagacctaaatctgttttttgttttgtttggttttttttttttttgagacagagtctcgcctgtcgcccaggctggattgcagtggcccgatcttggctcagtgcaacctccaccttcctagttcaagtgattgtcctgcctcagcctcctgagtagttgggactacaggcgcatgcagccatacccggttactttttgtatttttagtagagatggggtttcaccatgttggacaggctggtctcaccctggcctcaggcaatccacccaccgtggcctcccaaagtgctgatattacaggcgtgagccactgtgccttgcccgtaaatctctttttctgtctcctttactcactataccaggcatcacagattcagatgactcgaaggtcaggcaggtagctgaagagggtcaggtagctcaatagtcgtagcaccatggcagtctggaaaggcttgcctccgtttagccttagttaagaggcacgtagtctaagtgttgccaaaatgtccagtttttaaaaagaatctggaaatccacattttatgtaaaaattcggtggaattttgaacattggcattcagtttacattttctgaaaatgctgtgtggaccaaggaaactatatccgtaggtcttgggcagccctgggccccacaggccatcatgctatctgtctcttttattagtttatctatgtagaatgtattctgaaacatcttggcattccctcaaattataatggaccaactttttttttccatttaactaacaatgaggctttgctatatcctaagtacttcattttattctggtagtaaaaaatatttgaaaatagctagcttggaaaaatatatcatccttttcatttaattcagctgctttgccgcttgtcttcaattggaaagtttagttgaaaacaggtgagtctgaataagcccagctcataggggagataggggacaaataagattaactaggggtaagggatgttgcatctgaggtccagagtactgagggagtttaggaaaaggttttggagaggaggtggcacttaaggtgtctctagagggaaacagtcttaagttccacaagaacagagc

SEQ ID NO: 9745 - DNA, 1100 bp, Homo sapiens
cacactataagtggttagcgccttttctctcctttaaaaaataaaaaatctgtaaattctcactgctgctagcacagctctgtgtaaaccagtgtttttttttttttgttccctactgagagccagcttgcaccttggtctaccaagagttgctgctcagtacatagctgcttcattatttgtgttgattgcattatttattaacacaaatagccatttagtttttttaatagaaaaaataattaagattttgcataatgtttgtaaaaaatggaaaacttgatacagagatcgaagaggatataaaataagataaaaaataaaaaatggaaaatttgatagcttaagccactaaattgcccttaaggtggagtgcaagtcagtaacatttcattttgcagcatgtataaaataatttctgttttaaggctgtctttaactgttgctcttcatttctctgcaggtcttttagataaccctgaacttcgtgtggtccttgtctttggttataattgctgtaaggtgggagccagtaattatctgcagcaagtagtcagcactttcagtgatatgaatatcatcttggctggaggccaggtggacaacctgtcatcactgacttctgaaaagtatgtcttgtgtgcttctgatttcgtctgtgaatgaagggaaatggtctcaggttttgtcactttggggttaacaatttaaaaaacgtgtttaaagaattattaagataatagttcattccattttgtagtagacattggctaaggggcttactgaacataattctgcttacggttgaataattacatttttatatatattgtccttcaagaacttccttgagtcacattctccttaaaatttgacattgcctgttgatctttcctttgacagatgtggtactctgtgtgacctcaatgtgtcacctcctttctagtttcctcctttaaaggaaacacatggttagagtgtatctttatggcaaaacttctcagagcttctaatatgcccagtgctgtggaaatctggaaggagaatagcattacctgtgacagttcccaaatgtgtttggtcacaaaacttttttccac

SEQ ID NO: 9746 - DNA, 1189 bp, Homo sapiens
ttcatgagatattgccacttttctaaattttccaggaaccctctggatattgatgcctcgggtgtggttggactgtcatttagtggacaccgaatccagagtgccactgtgctcctcaacgaggacgtcagtgatgagaagactgctgaggctgcgatgcagcgcctcaaagcggccaacattccagagcataacaccattggcttcatgtttgcatgcgttggcaggggctttcagtattacagagccaaggggaatgttgaggctgatgcatttagaaagttttttcctagtgttcccttattcggcttctttggaaatggagaaattggatgtgatcggatagtcactgggaactttatattgaggaaatgtaatgaggtaaaagatgatgatctgtttcatagctatacaacaataatggcactcatacatctggggtcatctaaataataattaaagtggctttcataatatgtaacttttgggttctgcctttttcagaaaatggaaacttgggccatgtgtatttcaaacaaaaataactttagatatatcttttttgtagctttgattgatgctctaagatcacatgagggtagtatttaatatattagatgaaggacaactttggacataacactgactaggagttgagagcttttgcatcaggcagaagcaaactgattatagttgtgttgcaccagatcatgtagctgctgtgtaacatgaccttaaatagtcttcctgcataggaagagcaaaagggtattcatcaataggatatagatttaagacattccctgactaccccttgcgttgttaggtgatgtcttttagcagaatcatgaagaccttttttctcccttaataaaggagaaaaatatactgatggctggagaaatttttctctgcctttcagttttatgaattttttcagaagtaacaatattattattgactttttacttatttgataaaaattaaagaactatttttgttttggtcagataaattgacaagactaatcagtattttattataagtaaaagatttttcttctttccttaaaaatatttttttttcacctaggtctaaatagctaactaactggtagaccagagtattacatcatcttattttggttttataccaataaaacatagcgtggaactcattcaggtaatgt

SEQ ID NO: 9747 - DNA, 1196 bp, Homo sapiens
ctcctggcctcaggtgatcctcagcctcccaaagtgctgggattacaggtgtcagccactgtacctggccttactcttttttttatacaatatcaatttaaacaaaaggtgaaatgtctgctgtgaatttttttcttttatatacattaagtaaatgtatacaagcataatctttttcagtatttgagaattttaccacccttctaaatttgttctatcttttcttatctaaattcaataatccacaactgtcacacttggtaattgatgtttattaaatttcatatctcatagttcaatatattgcattaaggtggcttaatactgtaaaactcatgaaactcttaatgtagttagagtaatggtaagtactcaatctcaaaggctatttaaaaagctgtgcttgaagttgtgtatccaaaggtgcacacgaaatataaaatatttgaattaaaatttctacagaatatgcatttagaatatgtcattactgatcatttatagtcttccatcactatgtatgtgtgttaactcactgcttattttgcttttagaaccttttgcccagagtagcagccaaacttgaggttgccccgatttctgacatcattgcaatcaagtcacctgacacatttgtgagaactatttatgcaggtgagtactcaaggaagataattaatcaacatgttaaattttagtgaaaagcataaattaatcttgaagatagaattttaaatcaaaccatacaattgctttaagtggaccatcttaaaggtttctgaggaaaattttagtctagaattgctggtggcccttgacatggcattctctctgatggatcgcaaacacagagatttcctgcctgtttattcagtttgcagggtgatattttcctagtgatcaataaaaattagattcacaatttaatatattttgtaagtggtacctggaaaagcaaaacttaaaaaaaaatagtattctcaatctttgctgcttctacttcatttccataggcattaagaaattcattttagccagctgcagtggctcgtgcctataatcccagcactttggcaggctgaggtgggaggattacttgaactcaggagtttgaggctatcctgggcaacataataagaccctatctcaaaaataaataaataaaataaattagctaggcatgttggcatatgcct

SEQ ID NO: 9748 - DNA, 1268 bp, Homo sapiens
gtaacatttttagatacttaaacaataatgagtacttgtacacctggatgattttgacaagtcaaatcacattaaattgtgaacatcttgctgaaaatacttattacacttgacacttttttgttttattttgaaggcgcttcatctaattgatgaaatggatttgaatggtgacaaaaagctctctgaagaagagattctggaaaacccggacttgtttctcaccagtgaagccacagattatggcagacagctccatgatgactatttctatcatgatgagctttaatctctgagcctgtctcagtagagtactggctccttttataatttgttaccagctttacttttgtgataaaatattgatgttgtattttacactcttaagtcttaaccacagtcagaattatcttaatgtagattataattttggtcttttaggaaaaaaaaacaaaaatctgatatttatttcaaaatgtattgaagcaacaaaatattaatattgtgccatatgacaacaaagtctttcctaaatactccatctgtttagtactgtattgtggaatatttgagttctatttccatacttgaaaacatggaggattttagagatgcctgaacaatattatttaagtagtatgtgaccgagctataaatttttgtttttgttctaagtagatttaatttgggaactgacaggacaatgtttttaggtttagcattttgtttaaaaacctttaaagaaacctttagaaggacttagacctcacatattaatgttgagaagttctgcttaattttaaaatggtttctataaagggttttattgtatgaaatagaactttatatttttgcatatgtatagatagtaattatatttaatgtataactatagcattatggtgagtggaatttgacattgtccaaacctttttcatttttgagtgattaaaaatgaaatgtcctttgtatatgtttgtttgcttttctttaactttcagataaatattgaatttagcataggttttgtggtattgtacattatcttgcctcatccattcctttatgtggatagttcccaaaactgtcaaattattcttgctgcattttcttattttttttttaaataagagaatcatgttataatataattgaatgtgcacctgacacattttaataattggtgttgtagcaaatgtggttttgctctttggggctataaataatcttgagtaacgcaggttggaattaccaatagagctggtcag

SEQ ID NO: 9749 - DNA, 1659 bp, Homo sapiens
catcgctgcagaaagttctttcggacagcactcgctagactagtagtggggatgccaaataagagagacttgattccctgctggctttacgaagagttcctgggagggaagctgaagcttaggacttagttccttaaaaaataatgtactcataagaaattccttctatcactgttgttactgcctttttgatgatttgaagtcattgaactttgaaacagctcttttaccaacaaagaaatacacacctgccatgagagggttttcagccttttttccccattgttgttttctttcaacagctgctgggcatgctgtgtgcttgcatcgtgttgtgcagaaggagtagagatcctgcttacgagctcctcatcactggcggaacctatgcatagttgacaactcaagcctgagctttttggtcttgttctgatttggaaggtgaattgagcaggtctgctgctgttggcctctggagttcatttagttaaagcacatgtacactggtgttggacagagcagcttggcttttcatgtgcccacctacttacctactacctgcgactttctttttccttgttctagctgactcttcatgcccctaagattttaagtacgatggtgaacgttctaatttcagaaccaattgcgagtcatgtagtgtggtagaattaaaggaggacacgagcctgcttctgttacctccaagtggtaacaggactgatgccgaaatgtcaccaggtcctttcagtcttcacagtggagaactcttggccaaaggtttttgcggggaggaggaggaaaccagctttctggttaaggttaacaccagatggtgcccctcattggtgtccttttaaaaaatatttactgtagtccaataagatagcagctgtacaaaatgactaaaatagattgtaggatcatatggcgtatatcttggttcatcttcaaaatcagagactgagctttgaaactagtggtttttaatcaaagttggctttataggaggagtataatgtatgcactactgttttaaaagaattagtgtgagtgtgtttttgtatgaatgagcccattcatggtaagtcttaagcttgttggaaataatgtacccatgtagactagcaaaatagtatgtagatgtgatctcagttgtaaatagaaaaatctaattcaataaactctgtatcagcccccaacatattatttttcattatttgggggatatttcagttccagagcagcagtatcatgttttctttgttggtgctgtctatagttcatcatggtttacgtgtgttttcgttatagctgttgccagattctaaagggcttgatattcaaaaaaccacagatgctttcagtccagtatatcctagaaatatagagctctactttgtgcaatgcactggggatacagtggcgatactgtccttgtcttcaaggagttcggagtcctagtataggagacatacataggagaagataattttcacactgcagtggttgtagtaatagaatgggagtccaaaggggagttccggagaggtcaggggtgacttcctggaggagatgcccaagcttggaggctggataggctttgttgaaagatggtacacaagagtgtgaaacaaaattgtgtgtgcagggagctta

SEQ ID NO: 9750 - DNA, 1168 bp, Homo sapiens
gtattttcttttccttgaggtggggtagatagagattagaagtgtagattctggagtcagattgcctgagttcaaatccaagctctgtcatttctaccaaatttccccacttattgagggcaactgtagtgagcaaagatccccctaccaccatactgatccgtattggatgtggaattgagctacagtaagcctttagggatgtgtaggtgtgtgtcatcatcattgttattatttggttatggtttcttggtcctagctgaaccatcaattcgtgaaaagtaggtgaagtgtggataactttttaattttatctagtatagaaatgctcttaacaaggaatcatagaattttcagctttactgaaaaaagtctataacagttacggtaactctcattaaattataccatactaagcaataataggaaatttttaccagcagtgcttagagaccagtactgactttgttttctacagggggcagctggcattttatgctatgtgggagcctatgtcttcatcacttatgatgactatgaccacttctttgaagatgtgtacacgctcatccctgctgtagtgatcatagctgtaggagccctgcttttcatcattgggctaattggctgctgtgccacaatccgggaaagtcgctgtggacttgccacggtaagatgtgttgtgagaacatgcaggagtatttagtctatgctactctccttgaacatgagactccttggctcttatagttggaacagagttaacatttaaacttctagcaattatctctgataactttttttaaatcaagagtgtatttaaagttattttttcatttgtatataattttaaaccatgttttcttacagtttgtcatcatcctgctcttggtttttgtcacagaagttgttgtagtggttttgggatatgtttacagagcaaaggtatgttgtctactgtaattcacataatgccttaaaaggtggtttaagtgtttcaagtaaaatagaacacattcattttatcagagtaaacattttcttttgccttacttgtttaatctgtatttcaaatatctaaagttaattggcaaatatttacatgtcaagactccttacctcatttaatatagcagagtgttatatatgtattgttcttgattatagg

SEQ ID NO: 9751 - DNA, 1145 bp, Homo sapiens
ttatgaatactttggttcagggaagtaacctgacatttggttttgctggaattagggttttcgctagatttgactgcaattaggatttcttctagattttaccagcagtgatctgaaaaagtacaggctagtcacagaaatagagatggatttaggatactacactatatttcaaatgattctagatgtgtaaatatagtatgaacattcttggagaggggtgagacaaactggacttgctgggccaaccctggcatgtttttcattctcctcactagttgacaaggattgaaaattccgctccagcctaatgagtgaacaggatggctgcccacaaaaccaagttattagctttatgtcatcgaagctcatattctcaaaggcccaaagtgctgtgccgagacaaatccaagtgctgctcttgctgaagtgcgcactgaagtccagctgtccgtgcttacagcagtgccaaaagtggggattccatggaccaaaaacggtgccataagggaagccagaagagttgcagtgcaagatcctgggagagattataccaaagaaatcaagcctttttatcctgatgcttctaagatgatgagggtgagctgtgacagatgctgtgggaggggagttcacatacattccatgtcaaggcatttagctgataaatccatcctcagaaaagcacctttttaaaaagaagtccattttgtatattagaagatgatgatgatgatgaagatgaagaaagccctggcagatacaaagttcctcagtatttaaggagaaggatctcttccatgtccccttgacatgactgtggctattgcccaaacctcagcttgagaacatcatataatactgagagcggaagatttttttaaagagatatggtagtttaaataggtttgtttaaagaactcttgggaaatttcttaacaaattgtaattgtttttataaaccttcctacagagttgtgtaccattcatcatcaccatcatttaatatctgtaagtgcccagaaggtacaaggtgctatacagccgttaaacaccccctccctgcaactgtttaaaattagaatagatttttgcatcaaccactgctagaagctttccccacctaggtgggctgcaagggcctg

SEQ ID NO: 9752 - DNA, 1120 bp, Homo sapiens
ttcttgaagggacagcttctttggtatgaactcagccagtgagctgtgtccatttcctccataattctggatatcacctatctttttagcaccaagtatttattctcactagcagtagacagacttaaccagtctctaccacgacccagtagactctgacaacagactcttcctttaaggtgtcaacaactgacttactaggcaggactgccatccttagcatcagcccagttttggttaccagggactatatcttttgttccaggagagagtagaaagaaaaggagagatcccatccttgggtcatagacccattttcattgccattatctgtaagtatgtgcactgcatggaggacagccctaatagtctcccctctgctgccactgcctgattctccactctgtccccacttgccagtgaagtttggatttatcagccacttgtggcccattacagagctgacccaaggtggtgtcaccaatgcctcagcagggtggagtgcagttcagagcttataaatagctggcagggcatgaggagatgattttcttgcatgtgcaattctctaggggccatcaggaaacagagtttaaagtaccctttgattactgtcagaactgtcagcatttgcagttttccccgagcagtaattggccagctcccttctatcagtagccagtgttaactagtttaccaaatgctgtaaacaattgccctgaatgaaatagctgtcagtggagctctaagatctcctttagagggcacagtgaggtgggctgttgggatggccgtaggcaggggagaggaagaaggccactgatgagactgctgacctcctcagaaggttgacctcttctagagagactgcctcccagtgtttaagtggctcattgctccttctgactctgtaaaatggctctggaggacagctcacaggaattctgattgctgaggtgggtgattgagagctgttcaccatgtgtgcagcctgtgctccccttctatggatatgtgtgcaatttttgtatgtatttttttagctgtatattacagtgtttatgttgcaacttcacctgaagcgagtctacagaaaccctcccccttcttcccttggcac

SEQ ID NO: 9753 - DNA, 1114 bp, Homo sapiens
aactatattatttgttttctgatgagtctttgaaaacttagaatattactattatccttgattttaacctacaaatattttgcccctgaaaaaatagctaaaagtgtgaactgttatattactacagattcttacagtctagccatgcaaacataactaacaatagatggttccccacacccccaaaactgtcaaaggaaacaattacaaagactgtgattaatactggtttggcctcattatacaaatatgtacagacagcgaggctgatgtccccagcactcatgatgcaattaattactctgacaagagtttggcaaagttttcatccactgtcaggagccagtgagtgaagggaagctaatggtctacaagtttcagaggagcatattagggacctttagaaatctaacattttatatatgaagaaactgaatcccagagaggagaaacatcttgcttgaaaatatctgcgtagatgagtacagaatccaagactagaaccacagatatctaaactctctcattcactgggtttctaaaacattgctctaaggaagaggtggatgggggaaggggaaagcactaaaaaatcctgaaatagagcattaagatacataggaagtaaacagataaaaattgtaatccaggaattataatgttatagaattttagctcattttaaaattattttgataaatatacagtggaagaattaccctacctgtctgtcacctttcttgtagctgagtagtacctagagacaagtggagctaggaggaggccatgagggtgattttaagttgaaaggtgactaccttatataaactattaaaatgcatatgttgcctgatttcaatgataatatttggctgtttgagtttagggaaaaaaaatcttatgtgactgtatttttattaatatgagaaatgttcttgattatatgcacataatacatctctatacatgcagatatccttagttaacacttgaagaaaattggttttgattgaccatacattcttcagactaaagtagggtactcattttccctcctcaggtttgtccctgatagttgcttttctgtgtttagctgatgattttcctacctccc

SEQ ID NO: 9754 - DNA, 1385 bp, Homo sapiens
ttccttccccctccttagtgattttttctttaacagcataagtaaagaggactttctggttcatttttgtttgttttgttttgttttgttttgtttacagatgaggtcttcctgtgttgcccaggctggagtgcggtggctattcacagatgctatcatagcacactacagcctacaactcttgggctcaagcatcacgcctagcagtttctggttcctttaacagcaaaaggaaagagaggttctgattcttacctcagggttttttggttgttcattgtttttgtttttgtttttgttttgacactgcagagcacaaggctaaaggttacagctgagatctttggaaccaaaggcagagcaagcagagcccgttgtctgggccccacaccactgcaggcaggtggatagaagtgcggcccctctcatagtatgcccataagtcagggcatagggcagaactacctgtcatgttgctacaccatcctgtcttctcagcatctccttgcctgttttctttattagtccaaaggaaaacaacagcaacaaaatctgtttttaaaatgtcttatatgaacatatatcaaatatccatgcgctgaaacccacataccatcacttggcaattttttagaataagaccccattattatctattgctataaacctagccagttctcttgctcttctgtattttcctatttccctgccatcatctgctatttctgccacttctcttagactccttgtctgcaaagcccaagctagaactcactgtctatggcagaaggacatccagagcccattctggagttttgttttttccttctgccagatgctttgtgtcctgtcttccttcctcctcatatttctgtttctcatttgtgttcagttttgtgcagcattgctagcactgcttttgtgaccagaaaaggccataacatggtccaggatcatcattcttctgactctagatgggacacttgacagtgacttgaaacatttgcatattcaggaatgcatgagatttcaagagagcctacagtatgaaatcattttcacaaaataagcagcttgcttctgaaatgctgtctttcccagtagctactcacctgcctctggtggctgggattcagatgccacaaaactgtcagtatctatagaccaggtctgtgccacctcctctctcctctgtgctcagtgaggaggcagtaaatgaagttacaggctagcacaatacctaactcatgtttcccagtacacctgtagatattactgtacttttatgttctcaagaaataagttgttgcctattcagtgttacagatttctttgtttctttttaattaaaatacaagaagcagctgaggaaagggagacaaggt

SEQ ID NO: 9755 - DNA, 1219 bp, Homo sapiens
ctgactagacctggcttggggtacccgggcctgaggagctgcccaggctctgctacccctgtgtcctaggctggcaccactatgttctgtcctgtcctccaggatcaacaaccagtgggagatgcacccagggccagctggcaacaggggcctagtttggggctggtgaaccgtggggctgagcaggtctctcttcactggtctgggctgctttgtggctctgttgtcaggattggaaagccaaagtgggccctggagcctgctcagcacccacttctctgcctccttggagaagtctgcagcccataatatatgaagaccctggccccaaagcatctcctacatcttcacctaccacgcggctagaaattccaacatttgcatcttagatttgatagaatgttgattctgggagggaccctgagggcttttccatcttctgcccacattatagctgtcaccttggagccccatccacccatccttccatctatcccatctggaaggccttgtgaatgcccctggggtcctaggcctgtgctggacggcacccaacagggaatcgagcagaaaggaggggctggtctggccctccagggaaggcggaagctgcttgccctctcaagggctgctgggagccaggtgctggttcgatgccagcttcctgagcttccctttcaccatcacggttgaagccacccctgggcaccacctgcacttgtgttttcttaatccttgtcttcgtgtggactttcgtttgaaggtggattaccacaatgctccccaagcacacatccggaaatcacacctgtgatgtgcctgtcatgtttttttttccaatacacagaaagagaaacacgtagctatgaaaatgaaaacatttgtctgcacaccacgaaatccccttgtgcacccccagaagcatgtgtctcctactttgggaaacacagatctgattgaaacctttctgcagcagctcagaaagatatttgggacttggtctgagaggttgaagaaactgaggtacagaggaagaagctttccccagggccacctggccagaaggagggagagctaggagttaacccacttccttggactttgaactgaggttatgtcctgcaccatggacgcctcagagccttgccaaggaaccagaacttcctagcgccctcccctactcacagaggatggagggtctggtctagaggaacccttg

SEQ ID NO: 9756 - DNA, 1640 bp, Homo sapiens
aaattttggtaaagctccctgcctccctttgcatcaagagcaccttattctttgcagagtgctgttgtatacactatgagattggatcccgatcctcctgggctgggtagatggtggtggagtggttcctcactttgaaatgaggaactaaatgaaagagcagccgagtaacttgcccaggtggcatctcactgagggctttaaaatctccttggtttagtttagtttgcggatacatcttttatttttgctttttccttttctcagagcttgacaaaagatttgggaggcaatgcaaaatgctcagacttcacagaggaaatctgtcgccgagtaaaagatttagattaacacttctacaactggcatttacatcagtcactctaaatggacaccacatgaacctctgtttagaatacctacgtatgtatgcattggtttgcttgtttcttgacagtacatttttagatctggccttttcttaacaaaatctgtgcaaaagatgcaggtggatgtccctaggtctgttttcaaagaactttttccaagtgcttgttttatttattaagtgtctacctggtaaatgttttttttgtaaactctgagtggactgtatcatttgctattctaaaccattttacacttaagttaaaatagtttctcttcagctgtaaataacaggatacagaattaacaagagaaaatgtctaactttttaagaaaaaccttattttcttcggtttttgaaaaacataatggaaataaaacaggatattgacataatagcacaaaatgacactcttctaaaactaaatgggcacaagagaattttcctgggaaagttcacatcaaaaagagtgaatgtggtatatttctaaatgatatggaaaatagagacagatttgtcctttacagaaattactgagtgtgaataaaaacttcagatccaagaaatatataatgagagatataatttttgttaataagacaaaggtaatatattggatacaaagacacaaatgtattgtgtgttcaattattttgttgtcttgagatttaatattctttccaagagcttttaatgaagcagagagctagtacttcattttcactggatacattttcagcatcatgagttgtcacagcctctgagcccctgatctgaagccagaagggctgagtgtattgtaaacttattcttgcatgttgctgtctgggaatggaccacactacagcaggtagttctgggggcgatactgccgaaaggcccgaacacatgtattttggctgcaattgaggaacttgggatgctattaattttgtatttcagcaactgccccttctcctatcccaaagcaccaattactgccctctgcctcagcagtaccagtataagatgacattccaaagactggaggcaactcagcctgagttaattcacaaaattatgccatgctggggcttgagcttgagcttgggcttaggcttgggctcagcttttgaccctcaggcatctcctttcccttcctgtcttcctctcccttctcctctgctgcagcatgattttcttaatcttcagacactcactattttcatgaacagttaccctctgtccccacaaccaaagacaactcatggcc

SEQ ID NO: 9757 - DNA, 1148 bp, Homo sapiens
ggtccacaatatcatgttgtctagctcctggggacaggcaggctccataggccactaataacagagtgagaattactgactgtggggggcggacacaaggggtcagctgaggagcgcagtttgtgactttccctataggcagtgacctcggggtagttgtggggctctttcttcctggaagcataaatgttggtctcttatggcttccgtcttcctggcattaggttacacttcaggattctgactctttgaaagggttgtagatagtcttgattagtactgtatttaaaaatgatttttttttttttttttggagtatgggaaggggcaggaattctaattaaatagcaataatggaaggtgctcggttaaagcctccattctcactgatttagaaagtacaagaacatcctcatctcagttttggtagattcagaataacgagaaaataaggatgttcatttcataaatattataaagaataaaggcatttgtagaactatctttttttaaatttacaggtctggggagtaaaatacaatggaaatggttcaaaaattgtgtctgttggagatgaccaggaaattcacatctatgattgtccaatttaaacatcaaagtctccaggcttatgctgcaaagagaatgtacggattgatcatgacattccttaccttcttaggcttgtttaaaagaaatatagcatttattgtagcaaagacttaaattttgtagatacaatatgaatcttttcatgttttattggaaatgctgttcatactttaacataaagctttcttaatgcaaacactggtgtccttgaacatgcttcttttttcagttaccctattaccagtgaaacagtgagagggattggcattaagagcaaatctctgccttagccatcaagagatccaggtatttctttaactttccagcttagaaatacaggctgactcttccagggagttgacttatgcagtgagatacagcagcgagctccccggagctgtgataaagaagctaatctattttagaatggagtcctgaaggaaagagtatatttgactgcataggaacattatgtactcctgtctatctgggcatccttccacttgatgtattaaagatgtcccctgccaagccct

SEQ ID NO: 9758 - DNA, 2220 bp, Homo sapiens
atgaattttactcactcaggcattccaatttacttttaaactttaatcatttttgatggaaaattttaaatttattacagacatttatacagtttaatcattttctttttgccataccaggggatgtctgcattattgaattgaattctgatattctgtgcttttttttagtttttctgtgaattccttgaatatgaagtatttgtcatagttgcagtatgatattcctaaattaatgcagctcttgtatgaaggtttttatctctgcttttttcaaggctttgaggttatgtacaggaaagtcagttacaaaacacctgatgttaacacgaatggtgttacactctagtttgtcagactaaaaatgaattgtttaaattgagaaaacagtgcatttttgtctttgtctaactttttgctatggcattttaaaaataatatataggtatgactgtttgcttattaatagtaatattttcttgaatcagatgttctgccttactcaatacgggtcttgttggaagctgctgtacgaaattgtgatggctttttaatgaagaaggaagatgttatgaacattttagactggaaaaccaaacaaagcaatgttgaagtgccctttttccctgcccgtgttcttcttcaagattttacgtgagtaatgggtttattttttgtgaatgaactcttagagtgtgtttcctttttaaaatacagactcttgggtaggtgtggttgttcatacctctaatcccagtactttgggaggccaaggcaggaagatcacttgagcctgggagtttgcagtcagtctgggcaacatagtgagacgctgtctgtacaaaaaaatttttttaattagccgaatgtaatggtgcatgcctgtagtcccagctactctggaggctgaggtgggaggattacttaagcccaggaggttgaggctgcagtgagctgtgatcacaccactgcactccagcctgggtgacaatgcaagaccctgtctctaaaaataaaaaataaaataaaaaatcagacttcctaatggatggctctgtgtttttttgttttgttttgtttttgtttgtttttttaaggttagtttataaacttaaaaattttgccctttctaaactgaagcaattcattaaaaattaggcactgttttgtaccatttattcaaaaactgcttttgtttaactaccttcttatgatctctcaataggtttctcaaacttaacatattgaaaacttgattttattttgaggtagtctcactctgtcacctaggcgagagtgcagtaatgcagtcatagttcactgcagcctcaacctcctgggctcaagcgatcctcctgcctctgcctcccaaagctctgggattataggcatgagccaccgtacccagccatcaaaacttgagtttttgattgtctatctcaactcacctatttctttctaagtcttttctgttatagtaaatggcaccatacactcccatttgtttaggcttcaaatctaggagttagccttgatttttctctttctttaataccctctaacccagtctatcagcaagctctgtcagtgctaccttttaaatatatcttgtgtccaattatttctttccatctctatcactgtcattgtggttctagtcccattctctcttaacctggactataactgcaatagtctcttaactggtatccttgctgtcacacttgcaatcaatagtctgttctttacacagtagatggagtgacttggttacaaatgttaagtcgtattatccctccatataccagttggcttccatcacacttaaaatccagagcctttaccatactctgaaagattttgcctgatctaggtgtccaaggattatttattggaagagttaaccttgagctgagttttgaaagaggcgtagaggttagctggaacatcctcttcacccacccactcaaatctggtttgtgtgccacagctctttgtaccctatgtatgctgctattatggtacttacgatacatagccgcataagaaataaatgatatttcttacaccatttattcagaaactgcttttcttaactacctgcttatgatttccacataaccaataggtttctcaaacttaacatgttgaaaacttgatcttattttgagatacagtcacactctgtcacctaggctggagtgtagtgatgtgatcata

SEQ ID NO: 9759 - DNA, 1197 bp, Homo sapiens
taagtttcttgtatttataaggcccctttgaccaagaccaaactagagaagacatatttctgttgccataaagtaactttttaaaaacgttccctggagtagtagaataagactgcaatttattatagcccatgagagaggttttgccctcgagataaactgtagctctaaatttcttttaagttgttagggggaaaaaatctatttcagtacttgctaaaagttatttaaattagtagagtatttgaaagtgattttactggacgcttagaattctgttttcatttctgtaaatttaaatgacctgtttctttttttatatatatataatctgagatttgcctttgaaacctgagttaaatgatacattagcctttaaacatcattcagttacttccagatagcgttgctaatgtgcgtttttttttaagagctaaatttgtgtcccttttaaatggctttattttgttttctttttggaatgacagtgcaatacagaatgcaccaaatcctggaggtggtgacctgcagaaagcaggaaagctctctccagttaaagtgcagcctaagaagcttccctgcagaggccagactacctgccgaggatcttgtgattctggagaactaggccgaaactcaggaacattttcttcgcagattgagaatacacccatcctgtgtccttttcatttgcaaccagtgcctgagtatgagattgtttttcttaaagtttattaataccaggttattttccagttaagaaaatcaaatttattctcttcccacccaattactattatgttaccttcacacttaagtactgaattgaatttttatatgtatttcctgttatactaaaagaagtaaatttagtgaaaatggtgatctctaagtaccattctctcttaccattactaagaaagcaaacttttcttaagatttatctgtaaatagaattcatctttttgacgactgtaagcagaaaaatgggatctcattttaaactaaaatttttattttagtatatttgtaccattcatatactcgttagtcattcatatttcttatgttaattccctgtatatatttttaacatttttttcctactagggggtttcttatcttttcctattgcattaagagctctatgttggctgggcgtagtggctcatgactgtaatcctagcactttgggag

SEQ ID NO: 9760 - DNA, 3502 bp, Homo sapiens
agtgtgttgtggaagagacctgtaagtatggggggggggcgatattttatcagaccattttgtaaataaaggcagaatttgtgttgaagattcttatatgaataaccttcctggatttgtttagttttgcaccaataaaactgtgtactactgtttgttggtttaagagtagcagattgaaatataagaagccagattagactctaaaattgtggccattggaatctcatttataaatggaccttttaagtatattaattcctcttcagaattgagctggacacatttggcattcttagtttgtcatataaccaggtttatccttagtctaactgcaagggatggaacctgccccaggtcacaatcattctgtccaatccagccaaggttccctccacatatgaagatggaccatggcaggatacaactgattgtgtggcaccatgtattagcagtgggaatatgtatcacatatgatgcagcctttcatatttcagcagtttgccactgtgactgtctggcaagcccccagatggcgttatattaattggattagattattttgctcaccttatgtaatactgtaacttcctataacctaatattttcggtatcattaaccaaaatttcacactcatagttgctaaagagaatgttattcaatcattaaactctgaactgatttcttctatacatttaaattatccaccctcaataatacgggtgctcaaccctatgcattttttaagtgttgctatttcttaattaaattgatttcctgtcattttgaatcatttatcacctgcgatgcatgattctattaattttgttatgttactgttttaaccaaagctgaccgtaaggataaaacacttaagttgttgctgagtactatatatcctcaatatgcatgtctgcccatcacatcaaatgttctgtcaacaagatgtttggtaattttttttaaaaaggttggaaaattaattatagaaggttctatactgtttttttaattaagaaactaagtctagcaggctaaaggttaattgtagtgattttttttcacatagatatctttctatgacctagttagttactgcaattcagaattagttcacattgcataaagaattacttgttgtaagcaaaatgctgaaactaccaaaccagtggatgaagaccactaagaactttgcacataatcatacaatcttttgaaaatattttgcaaatatgtgtttagacaataagatggactagagttcgacaaaatgatttctttatttaaattttgtataagtattttcttcgacactttcaaattatattgtgttcttgatatatgctgtatatttatttgttagtgcatgtgtttttaatttacatgaaaacatgagttaggagaaattacaggttgaaagatgaaatgcctgtatgtgctctgaagaaatggtaattccagattgtgcagggggaaacaaatctattttgttttgttttgttttttgagacggagtcttgccctgtggctgggctggagtgcaatggcgcgatcttggctcactgcaacctccgcctcccgggttcaggggattctcctgcctcagcctcctgagtagctgggactacaagcatgcaccaccacgcccagctaatttttgtagttttagtagagatggggtttcaccatgttggccagatgatctgaatctcttgacctcgtgatccgcccgccttggcctccacaagtgctgggattacaggtgtgagccaccacacccggcctatattgttttgaaagcatactctatatatagttatgggcagaggcacaggcatcctcagcagctgattcaggagatgatggtaaagctagctaactatgaattaaacattcacatatccagtctacctggtccagtaataatacaagcaaatcttgtatttcaggaacaaatcaaggttctcttaattttttggcttatatacaatgaagtaaaaacttgataaacatggtttcaaattgaggaggagagtcttggatgtatgttttaatatgtataccttataattctgcctctagccaaatgctatgtttgcaaaatgtggcatctgttagtttttattgtctgtgtcttctttgtttactataccttgggtaattttgtgttaccaaaaaaaaaaaaaaaaaaaggaagtgtaatgtcagacacacaagaaaagcaaatcagtgttgtaagcttaaagtacaatttcaaaggtcactaccaacagcagggttttttttatactttgaaaacattatgctacatatcattgccattttcatattttggggttttgctactcttatacaatggaatcaatggaaatgtcatccagccactgaattgccattattatatctaaaaagtttctaagatgacagttatcactattttgttttatctccatgctgacatttgaaagaaggtactagtatccctctagccagattgcttagtttttcgttggtaatcaaacaacagttgtactaaaggaaagtaaagctaggacctaaatcagaatcatagttgcctgcatatatggtaacaaggtcgtgtgcatttgctttcacagtgatgagtgagaggatgagaagaaattatttgacatttttctgtggttgaatagaagacacctttcttttgtctttaggtttaggaggagatactaagatactggatgtttatcctatcttagtttggttggagtaataagagagaagaagagggtggactttggcttttcagtgttttttcccctaaagagtgatattgctgacgtttctatcaattttacacataatatgtggctatgaaaccatatatctcacttaagtaacaaagtaatcactttgtctatcactaagtaatagacaaaaatcattgtctattatttaaagccaacaaaacagtgtaacagttttaagttcaataatgttaagtattgtatagaaatatattggaggcaaagttcagttgatgacaattgtgtatatgttactgatgctgtaaattatttttaataaagaaaattgtattatcacatttgattcttgttctgttttgtagtagttgaaaataaaacaacatgatgtaaaaaatatgctgccatccggctgggcacggtggctcacgcctgtaatcccagcactttgggaggccgaggcaggcggatcacgaggtcaggagatcgagaccatcctggccaacacagtgaaaccctgtctgtactaaaaatacaaaaaaattagccggacatgatggcgggcgcctgtagtcccagctacttgggaggctgaggcaggaggatagcataaacccgggaggcagagtttgcagtgagcagagttcacgccactgcactccagcctgggcgaaacagtgagactctgtctcaaaaaaaaaaaaaaaaagcaaaaatgaaatgtcccgccatccagatgccatccaggagcagc

SEQ ID NO: 9761 - DNA, 1218 bp, Homo sapiens
ctcggtctctcaccagccagagtgatcatttaaaatgccaatcagttcctgtgggccttgggaatcattcagaggagccccattggctgagagataaaattctgtttttacctgggcacgcgggctctccaggatttgattccagcttacctttccagtcttgattccctatattccagtatttggaaatgtgggccttggactgaggctttaccaaataacgctgaacacctagtattgccttttgcacgaatggtactgatggtgcccaagataactgcctccacccccaagttcaggacccagatcactctctggagaaggcctcagcctcttgccttggctttcaaggctctgcgtgatttggatactcgcttagctcttatttatatatattttaaaagcatcagcagtttatctcatgcccactaaactatcctgcctccgtaccctttgttcatactttctgctctgtgtggaatgcccttctttcttcccctgttctttctcttagacccaagggttctcagccttatttctgcctctcccatctctgatttactttcattttctgtatcgatttctcaaaaaatactttcttgattctttcatcatcccttttcccaccctacccccggttcctctttccacattataatctatgactgcctctctcacctaactgccagtattagcttttcaggacaggaactggttttacacattttggtattccagcatctagcataatgcctgacacttagctgaataaagggagtaaataaaacagatttgtaaagtcagcaaatgctttttaatttgtgaatcttattttaatgatgatctgattttctttttacaggaactatataaagttcagaaaacatggtgagttaatacacatgccaataaacggttgcctgataaacagtattgcttgtactcagtttacagacttgagtgggaaaattgaaatagaaggaaagcagtgagaaggtgccttttttcttgtcagtttcctctcacctattgaactttgtataccaggataggttttgtaagatcatttgtaggcttgcaggagttggcctactttcagtgggtaggaatcactcatgtgtttttcctttgcagtctcgaagatatgactccaggaccactatattttctccagaaggtaaaatagaaattgtttaatctgcctcaagtttaaaaata

SEQ ID NO: 9762 - DNA, 4090 bp, Homo sapiens
atgttatggttaactatattaatcctacagtagtatagaacactagaatttcatacattcttgcttcatgaatgaacgtgttcctccaccatgtagattaccctcgttttattaataggatattgaaagtccaaaacaacattttcaaatctggaaactaactgctgtttacataataatgaaattcagcactggtcctttgtctgttccctcttctggctgtgtccaaatcgtagaaacaaaagtcgaatttgtaatggagcttatctatggtagccagaatacaaaacagtttatgaatgcttaagttcacagagtagggtttagctaccttcactgagctcaagtaactgtagtgatactaaatttagattattgatatgtttggctttttttctttgttaaaggaaaacgtccctttggtgtttcattgctgtacattggctgggataagcactatggctttcagctctatcagagtgaccctagtggaaattacgggggatggaaggccacatgcattggaaataatagcgctgtgagtatttttgttgtgctataaaatctagcagaatgtctaataactgccataattttgccatggtgatgaatgtaaacagtattttaagatagctgcaacaaccttaatgtgatatggaaatatctgtgatttctgttggtgacagcattgctgatatagctaatatactggggttcgttaactacattaataaatgctaattttcagttaggagttgtgaaattagaagctgtgattttgtttcacatctagtttacagaccccctgtattctatgacagaccccttgggagactgaggaccccaggttaaagacactctttatagagcattagtaccccctcttctcaccccgtgccgtgtgtgccctccctgtcatcaaaattatgtatatgggccaggcatggtggctcatgcctgtaatcccaacactttgggaggccgaggcaggcaaattgctcgagctcaggagttcgagaccagcctgggcaacatagcagaaccccatctctacaaaaaatacaaaaatttgctgggcgccatggcatgtgcctgtaatcctagctacccaggaggccaaggtgggaggaggagcacctgagcctggggagacttgaagatacagtgagctgagatcatgccactacactccagcctgggcaacagagtgagcccctgtgtcaaaaaaaaaaaaaaaattgtttatacttgtaatgccaataataattcaggcatttttcttctagaccaattcatgtttctaaaaaatgtaaaaacttaaaattctatgttgattcatgttttataggcagctgtgtcaatgttgaaacaagactataaagaaggagaaatgaccttgaagtcagcacttgctttagctatcaaagtactaaataagaccatggatgttagtaaactctctgctgaaaaaggtaattcatatcctctcctttaattctttcgactgagtgagggaaattagcagctgttaagatttttttcttttttttttttttttgagatggagtctcgctctgttgccaggctggagtgcagtggcgcaatctcagctcactgcaacctccgcctccttggttcaagtgattctcctgcctcagcctgccgagtagctgggactacaggctcgcgccaccatgcccagctaatttttgtatttttagtagagacggggtttcaccatgttggccaggctagtcatgacctcctgacctcaggtgatcctcccgcttcagcctctcaaagtgctgggattacaggcgtgagccattgcgcccagccagcaactgttaagattttaacatgtcatcctagttcattgaaacagcaaccttacgaattaggtgatgttatccctgtcttctaactgaggacactagggcttaatgaggttaagtgagttgaccaagatcaacattggtaaattgtggagtcacaatctcacactgtattccaaacttaaaggcttgatactgaacaatctcattactcacagatagacatcctgcactgtgctacttttagttaacagttatcaagtcttctcatcaatgatatctttgcttgtgtgtatatatgataaagcatacgtatgtagttatatatttatacataggtttggtatactttaccagagatacaacatttgcgtgggttgtgataccctctcctgttcttcttaatctactaatctcttattttaagctcatgttagcaattccaaataccttgttcaacttaagctatatgactatataaaagaatatttcagtcgagcttggtggctcatgcctgtaatcccagcactttgggaggctgaggtgggtggatcacctgaggccaggagttccagatcagcctggccaacatggtgaagccccatctctacttaaaatacaaaaattagctaggcatggtggtgcatgcctataaatcccagctacttgggaggctgaggcaggagaatcacttgaacctgggaagcggaggctgcagtgagttgagatcatgccactgcactccagcgtgggtgacagagagagactctgtctcaaaaaaaaaaagaatatttctaaatgtttttcagaaattgtggtaaattaacatgttgctttatgttaggacagtttagctcctggtgttccttagaaaatgccatttacggccgggcatattggctcacgcctgtaatccccagcactttgggaggccgaggtgggtggatcacctgaggtcaggagttcaagaccaggttggccaacatggtgaaacccctgcctctactaaaaatacaaaaaattagccgggcgtggtggtgcgcacctgtaatcctgctactcaggaggctgaaacaggagaatcacctgaacccaggaggtggaggttgcagtgagccgagtttgcgccattgcactccagcctgggcaacaagagcaaaactccatctcaaaaaaaaaaagaaaaagaaaatgtcatttacatgcagattgccctcttttgtctacttccacccagtttcaaggaagcactactcagtttccctggtacaaaaaaattccttcccctttaggtatcagtctgcttttcttggccatttcatgccttttatttatttatttttttaagagacttgaaaagtccataaaaaataagctgttattaccagttgaagattctggctgagccctcagaggttccaacagttccgtctaatcagcacagctaatagcaggccggcaatagcaattggttgattatactttttctaagggagtgacaaaatggctgaggagacgatatttaagtaaaaattataattaaaacattacaagatcaaaagtatattgttctcataaaagggaataatgttaagtataaaacataggagagtgctgaactaacgtttcaatgatgtggcgagcataaaccatgagtgcctattaagcttctctgctaagtatgcctgcctgcctgcaatacaaataaatgtatgtgtttgtttttagtggaaattgcaacactaacaagagagaatggaaagacagtaatcagagttctcaaacaaaaagaagtggagcagttgatcaaaaaacatgaggaagaagaagccaaagctgagcgtgagaagaaagaaaaagaacagaaagaaaaggataaatagaatcagagattttattactcatttggggcaccatttcagtgtaaaagcagtcctactcttccacactaggaaggctttactttttttaactggtgcagtgggaaaataggacattacatactgaattgggtccttgtcatttctgtccaattgaatactttattgtaacgatgatggttacccttcatggacgtcttaatcttccacacacatcccctttttttggaataaaatttggaaaatggaaatgaaggaataaattctctgtagcagtaattgttaaatatacaaaaactgacagggcgattactttttgcacattgtggcttacagtcctttcacaaagatgggcacgttcctcaggctggccag

SEQ ID NO: 9763 - DNA, 1416 bp, Homo sapiens
ttagcagtgtgactgcttttctcttcctgcccagatggagtccgcctgcgtgaccatccatgaggctctgaaaacggtgattgactcccagacgcattaccggctgcgggaggcccaggaccgggcccgagcagaagaccttaatagccgagtctcttactggtctgttggcgagacgattgccctgttcgtggtcagcttcagtcaggtgctactgttgaaaagcttcttcacagaaaaacgacccatcagcagggcagtccactcctagccccggcatcctgctctagggcccctcatgccccaggctggagcagctctcctaggtcacagcctgctgggctgggtcgcgtagcccagggtggaggcagaacgatgctgctgtggtagccctttgcctttcatgcccatgcttgattcttgcacctcagcagctgaaggtctcagagaccagtaatcagaaggcatccgactgcattaagtgtgcagcgctgaaaagacatttacaactaggccagggattagccactgtgggagggtggacaggcaatggttcagtggcctggctgttggcaggaactccaagtgcccaggcctcttgggcagcttagggccctgcctctgtttcatgatgcatgggtcatttgtcttgggtgtcctatcccatatggagaagaaaggggctctaagttctggctcttctttctttggggttctctgtacctgaggaaaccaggccctgggtgactttgcagatctgctcaccctcggtgagcaacagtgtcagccatgcaagcaggacagaatggtgactgggtgcccttggtgagctgtgtatttcctaggaggtagaaaactgtgggaaactgtggctaataaaaactaagtgtgagcgtcctggagacttgtgcctttatttctttgccctaaaggactccagagcttactgcagagcatgggtgtgtgcataaataattagaatgtgacatagagtacctagagaggtgcatggggtgctgtgcagagatgtatagagtgggcaagaaatgactcctcccaggtgactgaaaacaaaataggaagtctcctcgcatgctcacaccatgttgtacaacggaactttgcaaatgctgtttcctctgataataccttctcccggatatctgcatgccctgctccatcatttccttctgacccaaaggcacattatcagtgaagtccctcccaaccactcttcaagatggtactgtctcacttgcccttagtcctccttgcccattagtaagaaatgaatgcataccaatcagatgtctgtgcagtaggtctggagggaagatacagtgtctccgctgaaggaaacctatcaaatctgaaatcctgcaccgtctgacaggcgttaatgcattgtaggaaagg

SEQ ID NO: 9764 - DNA, 1115 bp, Homo sapiens
ttattttttgtagaggtggggtctcactatgttgctcaggcttgtctcaaactccgaggctcaagtgatccttccacctcagcctcccaaagtgctgagattatagacgtgagccacagtgcctggcctggtttttcatgacatgaatacaaaccctgatagtttcagttttacaagcctcatgtggctgtcaagtcttgaaaggcaaaggctgtatgggatgaagaggaaagagcagagtggcctgggatgcactgaagggaggggaggctgctttggagctcaggggagtggaaggaaggccgatggcgggggcagggcacaccactgcactctgctttcctgaggcgtccatctgacctctgacttagaaacacagtggattcatgccaggcccctgtggcagtcctggtccatggctggagtttggaaatacctgacctttgctctctaggtgacaagtgacctgggcggcagatcagctccagattctaatgaactctcccccatgtaaggctttttttgtaggccctggaaacagattgggagagccgatccccatttccaaggcccatgagcacatttttggaatggtccttatgaacgactggagtggtaattactggagctctgctcctgtagagatgacggggaggaggctggggacttggggcaatttcatagaagctgaagatctggtgcaggtcaaaagtggcaggtgatgcagtgactgagagtgggggtctgggtatcaaacagactttcagctctaagaactcgggccactcacttaactcctctgagctccaattttctcgagtggctagggacacggctgacatcataactaatatttactgagcacttatgtgtcaggccctgtgcttaacacccttcgtatattctcccgctgatccctacacggtatgtgcaatattatcttcccattttacagatgaggaactgaggcacagggagatttcagttagttgctgaactaagatttgaagcaaaacagtccagcttctgagcctgagctctcaaccctttgccatacgtgggaggaagatggcaccataagccccagaaagtgtctctctcatagtttgagaatg

SEQ ID NO: 9765 - DNA, 1165 bp, Homo sapiens
tggctgatcctgatggccagggagactctgagctaagatgtgaggtccacctacctcaccacccaaggcacttggattcagaaagagaagattccctcttggaggaaatcaggtgctgtctgtcactaaaagaaagaagagacaagtgggcaggcaggcactggctggctcaggagagctggcctcggtggtattggaggagctccttatggggaaggacgagtgttctgcagaatgaaagtgccttttcctctcaccaggaatgctgggatgtttgggttacaggattctgagaagaagatggagcatggaggtgccaggatcagatgggagtggtgtcagggaggggccacagaattaatgatcctggatatctgagtggcctaagccccagctctctgcagggaaggagaggagctgaggagaggcccagggcattccaggtgatagcagagcctgtgactgtaactggatatgcccaagaggtggggttcagagagcaagcagggagcagcagaagcagctcagcaggggccgcccaagggagcatggagtgagcagattctttgtgccttccggtggcctttcccaggttccctcctgtggctgttgaactctggagaaccttgatcctggtgagcagaactggaggcgccttgtgggtgacctcaagcactgccctgggtggggaccgcctggctgtcctggctggaaagtggatgtgcacaagcataacccacggactcttcaagacaaggtcgatttggcctgtttcccctgcatcatacttccatggctctgtttctgctggactcttcctgcattcagagaattgggtcagcattttggttcagtgtagaaaatagcttcaaaatagagctgtccaacagcagaagagggtgcaagcaaaggccaaattcctccctccctcccttcctctccccatccttcctgcctgcctgcctgcctgccttctttgcttcctttcttctctctctctcccctccttcctccttccctctttctttctttctctgaccactacttagtttattcatttattcatccattcaacaaatacctgccttgcatggctgtagaaaggttatgtgggatgcagcttaccttgcgatcagcctctccttcccctatctcctatatgcag

SEQ ID NO: 9766 - DNA, 1301 bp, Homo sapiens
ccgttttctgagtagctgcggccagagtgaggctcctgctgtacagtgccacccatactgtgatgtcgatgcccatgtgaatgaggcccaccctcgccctgcttgccctgccgcaggccccccaccagaagccatctcccccgctgtgtgtccccaggcgcatcattgctccactctcccctgcagccgcggctgctcggccactgaccaggggccctggcagacattaggggatcagttgtatttattgtattttatctgtgtgtgctcaggaggtgagcctagtgggtccttaagtttggttgtgaataatctcttgatagacaatttatacccatgaaagttcagccaatgcccagagtgaccaagcagcaccagcaggcctgcccaggatgctgaaagcagatttcttcttgatttcacttctgatggatgcatggggctctgggggaatgctgggaaaatgggcaagcagagtgcacagccctcgttctgccagctggagccaagaagcacagagacacagaggcgcctgcccctcagctccgctggtctgtctgtgcatccactgtgccgtgggacatatgtaatttgtgcagtgtgacatggacttgctgtcctaatggatgtgttgtgccttgtgtctgtcatgtgtggccagcgtgattgtatagaatccagagtatgtagagagccaaaatgtgtggccctgtccccaagctcagcaccaccggccatgaccagaggttgctcggcccagggtctgggagctgggctaacaggctgacacttcggcagggtcaccaggaggcacagctaggggcatgctcacatgggtaggtcagttctttggtccaagcctctggtgcagattcaagctcctcctcttagaggaagcagctccttcctcccacaggagccccaagggagcactcaccctcctcccaattggatctgaatagctgtgttcctgatcccacataagcatgtctcatccttgccccactggtgagaggaggaccttgtgcctgcccagagcctgcaggacagcacgccttgaggtcagaggcctggcccttctttacagatgtagatagcagggtaggacgcccaggccttctcacatgggcaccatgaaacactttcttccaggccacctgagccttcgttcttcagcccgactggaggaacagcagctctgggaggcacagagtgcaggtctcaggggcagaagacatgggttccagttctggttctgccacacacccaccggccttgaatttctctggtggtctcaagac

SEQ ID NO: 9767 - DNA, 2438 bp, Homo sapiens
tattatctttacacctttcctgcaaattcaaaattattctaaaatgcaaagttgatttaagaaaaaaaactaaattaccagaaaaaaataaagcaagaaaaagccaaactgttatgatatgttaatgtaggttcatcaaaggtactgctgtggtaggggatattgataattggggagactgtgcatgtgtggggacaaggaggtatctgggaaatctctgtaccttcctctcagttatgctgtgaacctaaaactgctttaaaagataaagtccttaatttaaaaacaaaacaaaacaaacaaaaaaaacccacggtgttatttccctgcctgtggagattattaacttatcattaaatgtgatgtgtattatctgtgagcataactaatggagtcctctttctgcctcccccctttctgttttgcagcattgacaagatatctaaagtcacctctcctgtgttggtcattcatggtacagaggatgaggtcatcgatttctcccatggcctagcgatgtacgagcgctgtccccgagccgtggagcccctttgggttgaaggggctgggcataatgacatagagctttatgcacaatacctagaaagactaaaacagttcatatctcacgaacttcctaattcctgaagacaacaacttgatcttacctcatttactgtgaacagaagagtcctctgttttgcacatgctttaactgggtagctgtaaaggcttgataaccatgaagaagtgcccaacctttagggtgttctaatcaaagagctgatgaaatctcagtcttttgtatctagaggtggttctgctaattcacacaacacgttaaactgaacagtcgtgattcccagcttcattaccttgcaggaatgggaatgagagctgaatgtagggacaattttctagtgctgtataaagtagcctcgcatctgtttctcaaccttatccatcatttctgacattcatgcaggacttgccctgttgccaccaatgttctcggtatttcacatgcagctctctttctgccactggatacatgggttcaatccatttgtgaagctgtgatagtgtaactggaaagctagtgtggtgaaaattcctttattattttttgttaacatgctgatctttcccggacaaatgaactgaagggtaatttactggaactctcgtgtacagcttcatcaactgtaaccatataaatataactggaatattcttaaacaaaaagaaactaggggtttttttaagtgtaaatttattactagccaacagagttttactattttgattgtctggttggtttaacaaagagcctagctgactttccttctgtaaagtcctccttgtaggcttttttaaagtactgtacatatttgcaatcacattgtgcatagattcttaatggtagatatgatttcttttgtcaggctacaacaatgaactgcagattccttgtttgtaatgtaaatgattgaatacattttgttaatatgtttttattcctatgttttgctattaaaaattttataacatttccaagacaaaaattccaagtttatgctttgaagaatttatgtaattaaaatttcactaaactaatctttttagtttaggaattatttgggttttgacactggaagttgcgccaaataagcatcagaaataggagatgcttaacattgctatactacttgtgttggttaggggtttggatttgggggttctttggttttaatttttttttccacatttaaaagccttaaatgtactgtaagcctcagatcgttgtacaactggactgcggttgattgccagtttgtgtactgttgcttggatgcggcacagtggttggtaatggaataaaggatgcatggatcagaatgtgtgggcttgtgcagtttttttcttcatctctccatcaaagaaaatagtgaataagaaaacaactttttgtcgtaatgtaggaagaaaaccttgaggctttcaaactgcaccatctttctcaaggtatatggttttgttctataaaaggccttggattacttttggaagaagccaagatataaagcatatagcagtaaagtgcagatgatatctaaatagaggatgcagtggattctggctatgaaacaaaattgatgaaggtgacctcattgtgacctggctcagaggaaggacagtgcctcttttgttgggaagcctgaaacaggtgtgttccatagttttcagccctttgaccagctgagcagaaaagagcagctgagggatgctagttttcaactcttggaacgcactctcctaagggtgcattaggaggaagtggtggtcaggaaggtgtgaagacatgagtatgcacatgtgaatgcatgcatatgccagctacttcctgatcttgaatcaggtgggtggggctggcttac

SEQ ID NO: 9768 - DNA, 1227 bp, Homo sapiens
aataaactgataagtgccagagaattgctctgaccccttagcaccttactagtacgtgctggctgactgattgcatctctctgcccaaggttcattgtgggatcagaccgtgctatcttcatgcttcgcgatgggagctacgcctgggagatcaaggactttttggtcggtcaagacaggtgtgctgatgtaactctggagggccaggtgtaccccggcaaaggaggaggaagcaaagagaaaaataaaacaaagcaagacaagggcaaaaaaaagaaggaaggagatctgaaatctcggtcttccaaggaagaaaatcgagctgggaataaaagagaagacctgtgatggggcagcagtgacgcgctgtggggggacaggtggacgtggagagctctttgcccagctcctggggtgggagtggtctcaggcaactgcacaccggatgacattctagtgtcttctagaaagggtctgccacatgaccagtttgtggtcaaagaattactgcttaataggcttcaagtaagaagacagatgttttctaattaatactggacactgacaaattcatgtttactataaaatctccttacatggaaatgtgactgtgttgctttttcccatttacacttggtgagtcatcaactctactgagattccactcccctccaagcacctgctgtgattgggtggcctgctctgatcagatagcaaattctgatcagagaagactttaaaactcttgacttaattgagtaaactcttcatgccatatacatcattttcattatgttaaaggtaaaatatgctttgtgaactcagatgtctgtagccaggaagccagggtgtgtaaatccaaaatctatgcaggaaatgcggagaatagaaaatatgtcacttgaaatcctaagtagttttgaatttctttgacttgaatcttactcatcagtaagagaactcttggtgtctgtcaggttttatgtggtctgtaaagttaggggttctgttttgtttccttatttaggaaagagtactgctggtgtcgaggggttatatgttccatttaatgtgacagttttaaaggatttaagtagggaatcagagtcctttgcagagtgtgacagacgactcaataacctcatttgtttctaaacatttttctttgataaagtgcctaaatctgtgctttcgtatagagtaacatgatgtgctactgttgatgtc

SEQ ID NO: 9769 - DNA, 1169 bp, Homo sapiens
gagaggctgaggaactcggcctgcgccgtgtctgaaggctgcaccctgctatctcaggctttaagggagaggtcttcgcccaggactttaccgccagtgaattccaattctgtgaattagcaccccacccccataccccttcttccacccccagactaaaggaagatacttactctctgcccctctccatttataccaaagaaatcataggtgaaaccccctaccctccccaacgttaaatgctcgagaggaatcttccacaaggcagggccatgcacgcaacctgcacacgcacttggagggcccaggtgtctctccaccagcccccatgcagtagggactggaagatatgtcatctgctggttgtgttatcactcccaccccctaccccagcccgtcttccggaatttctcaactaaatttcattattgggcaggaaggaggtcatgggttcatttcatttttgttttttgtgtttttaattaaaagaaaggttacctcagttttcactccttagacatggatgtagctacctttttttgtatgtcttttttttttttaagcaatcgtgttgaattaggagtatacttggtgtggaaagagtatgaatttgccatgtgatttgcaaatggggggaagctactgtgagcgtgtgtttttttaatttacactatagagtgatttttttttcccccaacgtcaagtttttaccttgcatgtactggagtatttatttcatctattaaaatgttatgtttctcagatggctttttgcaattattgttgatttttcaataattgtaattttgcatgctgcatgtcatgtatgggaagggtctgtgggaaggctatttcaatagtagtgaggcgggcccccaattcccagccctttctactatttcctcaagaaaaagtactgctcaagaagtactcccttgagcagcctggaactgaagagaggactatgtgtaacgttctattttaaaaggcaggtgacacaaatgggattgggttatgtagagtgcttgggacggttttgtctcatttttcctggaaagtgatttagctccctttgtctccacttacctttccatcatcatgaacagtggctcaggctgcttgaattctgatttgtattctgcctatcattttcagattaaatcctaatc

SEQ ID NO: 9770 - DNA, 1158 bp, Homo sapiens
gtggatcgcgctcgagaggagattgaggcgcacattgctctgcgtaccggcggcatcattgagctcacagacgagaacgacttccacgccaacggcaccgatgtgggcttcgatctgcatcatgggtccggcgggtccggcccaggcagcctctggagcaagcccacccccagcatcacgcccacccccggccgcaagcctttctctagctaccgcaacgacagctccagctcgcttggcagtgcttccacagactcttatttcggcggcgggaccagcagcagcgcagcggctacccagcgcctggcggactacagcccccctagccccgccctgagctttgcgcacaacggaaacaataacaataacggcaatgggtacacctacacagcggggggagaagcctcagtgccatcccccgacggctgccccgagctgcagcccacttttgacccggctcccgctcccccacctggggcaccacttatctgggcccagttcgagcggtccccgggaggcggacctgcagctccggtatcttcttcctgctcttcttctgcatcttcgtctgcttcttcctcctccgtggtcttccccgggggtggcgccagtgcgccctccaacgccaacctggggctattggtgcaccgccggctgcaccctggcaccagctgcccgcgcctgtctccacccttgcacatggccccgggggcgggagagcaccacctggctcgccgggtgcgcagcgacccgggtggaggaggcctggcctacgccgcttatgccaacgggctgggggcacagctgcctggcttgcagccgtcggacacgtcgggctcctcctcttcgtccagctcctcctccagctcttcatcctcttcctccgggcttcggcgtaaaggcagccgcgactgctccgtgtgcttcgagagcgaagtgattgccgcgctggtgccctgtggccacaacctcttctgcatggagtgcgccaatcgcatctgtgagaagagcgagcccgagtgcccggtctgccacaccgcggtcactcaggccatccgcatcttttcttaaaggcagcgggcgctgctagtgcgcaccgtgctgggggaagggggaacccctccccaccctctttccccagcgctcgcctgcctccct

SEQ ID NO: 9771 - DNA, 1167 bp, Homo sapiens
catctcggctcactgcaacctccgtctcccgggttcaagcgattgtcatgcctcagccttcccagtagctgggattagaggcacgtgctaccacactcggctaatttttgtatttttagtagacaacagggtttcacaatgttgaccaggctggtctcgaacacctgacctcaagcgatccgcccgcctcggcctcccaaattgctgggattacaggcgtgagccacctcgcccggctggatgtcaacttctaatgcttacttcacagttgcagttactgttcgagagatttataggcatatggcctggaagaatagtgccaaagtcaacgtattaattgccaagttatgtgaatttgaaattggaagaaaatgaaggctgtgaagggtcgtgaaactgcggggcggggcggggcgagttgggggtggggcgcttgatcatcatgaaggagagtttgaatagagagtgagaaaccaaggggaaggaatgctcaggccagtggaggttctatgtgtaggaggtcccaggatagtgagtcctcttccttctcactgtggaaaagaactaaagcgggtatttatatatgcacatgtgctcagtaccaggtgggagttgatttgtcttctcactgttctctttggctgtgtgtgctttgtagttatgtcacgcatctgatgaagcgaattcagagaggcccagtaagaggtatctccatcaagctgcaggaggaggagagagaaaggagagacaattatgttcctgaggtaaactttctggatatttgggcttctggctaatcctcaaatgataaagctatgggttcttggcttccaaagggacctcagctgaatctgagacctttaatccatacattccataaccagctgtgggtgcccataggccccctaccagtttcttagcctccattctgctcttctggaaccagttaagtctattccatatttcatgagagcccttaatgttgatttgatgactgctgtcgtggctcgattgtttgcccctaatatagtattctttggtgtaaacacagacttcaagtgttctgaatactgaatgagggcatgggaaggtaaggccagaagaacaggtcatcggggtctgtaatactgtaagagactgctcaccttgtgagaggaatgctatcct

SEQ ID NO: 9772 - DNA, 1167 bp, Homo sapiens; identical to SEQ ID NO: 9771

SEQ ID NO: 9773 - DNA, 1211 bp, Homo sapiens
cagcttttaacattatagcaaatttgtgtctgggggactgctggtcactgtttctcacagttgcaaatcaaggcatttgcaaccaagaaaaaaaaaattttttgttttatttgaaactggaccggataaacggtgtttgagcggctgctgtatatagttttaaatggtttattgcacctccttaagttgcacttatgtgggggggtggggttgatagaagtttttaatcacaaagtcacaggacttttttcttttgtaactgagctaaaaagggctgcttttcggtgggggcagatgaaggctcacaggagccctttctcttagagggggcaagtacccttcccttatatctttaatttgaggaatgtatgagataacagttgcagttgactgaaatgccactggaatttgaaaacttgacttttttttctttcctttttttttttttttttttttttaaaaagaaacaaaaaacccacaaaaactacttgcccctcctagggaagctgtgtgccaaagaaccagtgtcataacccctccctcctgctgagctgacgttgcattgttgcatatcccagctactctgtgggttttgtgaagctgtgtgtgaagtctctacctcattgtagtatatgcaggcaagactgcactctcctacagatgtgtggagtaagctgtggtgtagtttttttggcacataataaacacgttgcagcagagttctggttttgtctctgtgtttgaggtctgggagcaaggggctaacgggagggagtaagggggtaatggcacagccacagcttgtttccttggatttctgtgatggagatcctggcccaggataatggtgggaccatgtgggagacctgccctgtgagtacttcttggtcccttccatcgtcaaatatactttggagatgcttctccagtggatgggtgcttctagcccaaatataaaaagtcctcatatcttagcttctcgggggtcctcacagcctccaggcccagcttagagaatgctggaggcacagctgctcacgtgccagcagaagccacttgttctcagcttctcctggaagtcttggcctattacttcttcggaggctgctcatcctcttggacccacctatgatgatgcagttcctttctgagagggagtgattgggtttttgctgttcagagagccctatcaacggaactttctcagagct

SEQ ID NO: 9774 - DNA, 1118 bp, Homo sapiens
aatagtggccctggagcaacctggacggtgttcccttgagctggtgtgacgtgccctcgtttattctgacatccagcccagtctcagtactgttgtcataaccttacgccagactcaggcagaatgtaagccattcactcgtgagcatcgcagccgcttgtgctgcctggaagctgcagggccaggactgcattttcagtttgcaattgaggtctcctgattttggtgtttccaagactggctgctataccttgataagctttccttctgcctccatgaaacctggtgtctaaaaaagatcaactaaaacttggaaccctttaaccaagaggacctttaaaaataacctttcattccagtcaagacccagctggatgcattttaaagttgggagtggcgaggaagccttcctagtgccgcccggggaatgtaaaaccaccagagcaacaggttgggacagtatggtcaggccttggagggaaagagaaccagtatccacacaagacctcgaacttgtgtggcccctcagtttcatctctcctgcctgccatcacattagactttaattgggtgagagaacagggcagagactgtcacctgcattttgcagatgggaagtagagacagagaaagtgacacgcccagggtcacccagcggtgaccagcagcgtggactctgcatccaggtctcctggaccttgatgcagtatcttttgagacatgccactctagtccctttggtgacccgtgggtgccaagagaaaataattcttatatcctgataagagcatattacaattatattatttcaatatgtgtccacagcaaaggacagtttacaaaaatgtgaatccgaatgacatttaggaatgtttgttataaatgataagttccactttggaatgattctggttttgcaggaatctttccaagaaagttggttaaaatgatgtctctgcctgtgaggccagttctatggaaaacaaacacaccctgagttctttattgatggctttagtggaggcagagcagtatgttcaaaacaagtgggaggccctgagatcgcaggaatggaaacagagttctggctgggggtggcctgtccactgcccgcccct

SEQ ID NO: 9775 - DNA, 1419 bp, Homo sapiens
gttttattgttgtaggttgcaagacaacagacagttcagaggcagggacaacagatgggggtggccaagtgacaatcgatccaatcagtggcatggacgatcctggggtaacaactacccgcaacacagacaagaaccttactatccccagcaatatggacattatggttacaaccagcggcctccttacggttactactgatagaaatgttggcagcttttagtaaaagcatttactctgttaccatgagaaaagtttgggtgtcttctgttggtcatagttttacatctgattttacagaatggattattgattttttggaagttgagactttaaaaaaaatagatcttacttgcgaaatgcgatggttgctgggaatacctgaaactgtggattatattgcttgacttctacctcagaatcttctttgtttcatgacttaatagtgctttaagtttggtatattatttgacctctaggaattctttgttttacacagaaataaaaattttaaaatagaaaatgcttttactttgtaaggtaagagagtatccatatgcttagatgtgctcgtttctaaaattctagaggttgatataatcagctcatgaatgcacagctatgctttttgtgatagattgtacataacatcagcagttgaaaggtaaaacaattgcttttttttttttttgcatttgttaagtgactatggtactttgtgattccttaatctatagatgagtcagctccacacttgagtctctttttagagggaaatcagtaataaagctgtaaaataaggaaggaatcattgtcagtttgtgtcttgatctggtggtggttgggataagggtacacatcattttatacaaacactaaagctttttgctaacaacatagcaggtcaaaattcacacataagaaagtttaactctgtactgttcacactttttaatcctgtaaataatgctgcattttgatggttcttacttttttggtatttaatgtgggctgattttacaatgttatattcacttccagatgcatacctctgctgctttctctcctataaatagtgatgctataaacttcctttcacagagatcattctatttcaaatcactttaatgattattacaatgatttcattcaaataaaaattttaaaatatttaagcatcttcactcccaagttctggcagttagcccatttattaatatggtgaaatgagatttttgggtttttttatgctgtccttcatatctgttgaaaagggcttatttggtttaacagtaacattaagagtgcaaatttcaacataggtcaaaggaattaacaggcaccttcctgactttattagagtgacaaaaaaatatatatatttaaaaaggcgtcttccagccaggcatggtggctca

SEQ ID NO: 9776 - DNA, 1267 bp, Homo sapiens
ccttcacagcaagaaaccgaataaaatactaacatttctaacaactgctctgacattgtaaagagatccaacagaatcactcctgctgaaaaatacgctttctgccacctacacatttctatttaggaagtaaaatttgcttcatggtcatgaccccattagtcagtgttacagctgtgttggggataggaagtatatctggcagattgatatttatacacttttttataaagcagattttaaaatatagtaacatccatttttttcccttgaaagtgattctcttataaaaaatgaaagtggagtttaaggtatatcaaatcgttgtggaaggtgattaaaaatcaaaattcttttaaatatcaacttaattttttctaagtaagatacaaaaaattttcatctaaagtaatatttcactttatattgtaaagaaggtaggtatattggtggctgaggtctcttgaaattgctaaagggaaatttttctatggtaatgctcttacggatataaacctcagttaaatggaattatctatgggatgtgtggttctggttaactaaaaattaaccagtaaacactctgtagtaaccattacagaaaatacttctgccttaaaaaatatgatatgccagagatgagttagtgtttcttgacgttggagaccttttaaatgcctcatctgttgtactgaacaattgaaactgcatgcagccataaaagggacaagaaacagaactgtttactaactttgggacatcccctggagtttttaaaaataaataaatatatatatatataaaaaaaactcttttatgtcatttgcctttttcttctaaaagtgaatataaacagaattttgatttgttttttgtttgttttttgagatgaagcctcgctctgttgccaaggctggagggcagtggtgcaatctcggctcactgcatcctccacctcctggattcaagctattatgcggcctcagcctccagagtagctgggattacaggtgcccaccaccacgcccagctaatttttgtatttttagtagagatggggtttcactatgttggccaggctggtctcgaactcctgacctcagctgccttggcctcccagagtgctgggattgattacaggcgtgagccaccacgcctggctgtcaacaccattttggaacaaaggttctagttaattgaggtttaacttaatgggagtaatgcaatacaaaatacaaatacctcattgctgatttaaaccagttca

SEQ ID NO: 9777 - DNA, 1240 bp, Homo sapiens
aaaaaaaaaattattagcctgggcgcagtggctcacgcctgtaatcccagcactttgggaggctgaggcaggcagatcacctgaggtcaggagttcgagaacagcctggtcaatatgacaaaaccctgtctttactaaaaatacaaaaaaattagccaggaatggtggtacacacctgtaatcccagctactggggaggctgaggcacgagaattgcttgaatatgataggtggaggttgctgctgcactccagcctgggtgacaaagtgagactgtctcaaaaaaaaaaaaaaaagaaaattatttaaagaaatgtgatattttgcttagtattggaaacttttaaatggattatagttaaaagatgaaagaataattgggtagtttagcgatatattcacaaagaccaatttgttaattaactcttagaacctctgaacttttcaacgcttctctgacttgtggttctgtgtttattttctagtatgcagttctctttttgctgggtttattcgtgctggttcatcgtgagtaagaagcctgccttgctgttcctgggaagatgccatagttttcgttactggatgtttggagtagatactggtctgtgattggtggaatggagaacacacgtgttggtgcttctgggtagcactggtttgcattagtttatgtttccatgccagagtttgtgtgggcgggcgcatgtgcaccacagagtgcactcgaggggactttcagtcacaggatttcataattgtcattgtcacactttcaaatttttgtacatcagtgaatttttttatattaaaaggttgagccaaagcccccagtgtttgtattttgaagccaagcttcacttctaaagtgcctacagagacttgtaaatgaaaatgcagctctgcacgagtttgaaaccgtcatacctccttctattaggaatggcatatactgaggtggtcgtaagtcttaacttctaaaattttaaataaaagactttgcacattgaaccccttatccctgaattgtgtttgtcgggaaagcttctgaaatttgccttccttggctggttcttagtacccctgggggatataaaggcttggtgtgaacagtccttcagctaagaaggttgctctgatactaacaactagtttttttgtttgtctgttttgcgtgtgtgtgtgtgtgtgtgtgtgtgtgtgtgtgtgtgaagcaaaagtagccactgacagtcatagg

SEQ ID NO: 9778 - DNA, 1143 bp, Homo sapiens
ttcctgtggtgaaaccacagcaggaaccccatcagttcagaagtcttacttgattccagatattctctggggtacaacccttctcctcaaactcaagtctagaataatattcacagaaaagatacatcgaatgtggaatccctccccacaaagtggagggttctagatcctgtttgcttctgcttccacagactctcttagcccctggcagagaggccatggacagacaaacattgcccttgggtgaccatcccttcctctaaggcacagggaaaggcacctttgaatgatgtgtctttctcactacagtttctcctgcttctcttccctttgccccctcacagtcctctctgccgctcacaatgggatgtgtgcctggggagggagggccgggcacggcttgtgcaccacacaacctgccttcaggtggcgcttcacacctaggaacgcactgtgtctctgctggcccttgaaagggtttggcatggtagtttgcttcctgggcccaggaaggagaagactgtaagcctgagcattgttggtgagtttgtactggactcagtgcttactgatgcccctgaaatctgggagatggactggagaagggaactaaaagttctggcttttgcaggggtggatccgtttgtggtttggcactcctgctggttggtcctggagcagccaaccatgtttcacttcagcatgtggtatccagggatggagcaggggagccacagctggctttccaaggctgcttcccagccccatttcggctgggtctctcctttctgatacccttatgaattagagtccccccttgggtctagacccctagcattggccagcttattctttgtccattgtgggtctgcactcacaaatgtaggagctttttttctgagcccaagctctaggagaggctcctgtgctcttaggacccttgaatcactgagggttggctggccttcccctcttggcatgaatgaaggctctgctatgctgggggctccatctctgaggcttgacctacttatctgtgtgtctccctcatgcaccagtgtccctggagatgaaaggtgcagggtgaagtaaggcccctcaaacaatgatgggatgggacacctgggcttgtagactggcatg

SEQ ID NO: 9779 - DNA, 1166 bp, Homo sapiens
cttgaagtttacactttgccactgctggaggctcccctgagtcctctgcatgagttctgcaccccaagcccttgccccagcccagtccagcagcagatgttacaatctgagtgaggacatgcaggccaacttttaccctcctgcatttgcctggccctgatctcgcctgtcctcagggatccagacttcctctgctggtctggcctggtgactctcagggtatcttctccttccagctactttcgctcactgatctcagcttatcctgcaactaaccatccttgagcccagatggggctcagggcccttccagagcctgtcatgtccttgtgcagtggcctttgatgtgtgttcacgctcttcccccttcactcactcgcctgcttcccatgctcccttgtaccccctcgccacatccctgtcttggggcccagctgcagcctgctgcctgcccttcatggctctgcacatggccctttgcttgagggctccccactccctgcccaccaatacccaggtgaggaacagaccctctggcctctcaccccacttcagtgctctcttccccaacttctctcgggctctttgctcatgaggtgagagctggtgtgagggttgtgtcagcagctgtagccagagagaggtgttgactctgagagaccttgcactccatactgaaaggaggtggggtcacagtgaatttcacatcccctctcaaccaggagtggagggctaggtcccttccccatggggagtacacttgggtgttctaggagggatgcagtctatccatgcacttgggtggaggggagtctctgtgcctgggaattaggacccctgctccaaccatcgctcttgatcctggggccccagctctgggtcctcatgtatgggctcccaaggacccagcagcctggatccttccagagcatccctcctggaggcctgggatggggtaggtctgcagctagcctactccctttggaatgcaataaaggcagcattgtgtgccctgcttgccctcatctggtgtggttggaggtctgtggagtcaaggtccccctctcccaggcaggctctctgagggcattctgtagtcccaggcccactggaaaaatgaatctatattttggttcctggaccgaagttcagtcgcagccttctgt

SEQ ID NO: 9780 - DNA, 1397 bp, Homo sapiens
cagctgtgcccagaggacagccaggcaggccctgggagggagtttagaaagacagtcctggtgaatgggcttcaagtggtcacaaagagggtggctgtgaggtgaccccagacactgcagaacgatgtgcaccctctgcgttttggatgtccttggaatgtgggagcctagaaataaccctgtggatggaattggggcagcggctgctggagatctgtgtgccttgccttccttcagcaggaccgtctaggtgcgcagccacctatggatgcgtcccagccagccccgtcgctctcgtccatcctcagagacaaagaagagggcagggagtttgggcttggttttgaactttcctttcaatgtagcaaagcattcctagttaaccagagccttggaatctactgcctgctggccaggctttaaaatgaaaagtgttttaatgctgccataaaagggaggcgggggggaggaagggaaaataaaggcatctttccaagtactcatctaatttaattgtcaaaagattgataggccatgaattacttctccatctcactaagggttaaaggcgtgcaaccccccactggctgtgtcccctgccaccgaagtgagtgacctgccctacaaccaggtgggaccacctgtgctgcagtccggaggggcttctgcaggaagcactcaccccccacaccttccccggcctgagcttcccctacctttcgtcaccacctgagggcatgagcacaggccatggggcgtgcctggtgagtctgcctgtggttcaggcttagcctgtggtctcctgtgtgctgctgcccgcatgggatgcgcaggggaggcgtggggatccgcaggagggtggttgggatacaccggatacctctgctctcattgcttgtttgcaaatgctctatggacatttgtgtgctaaatcctattaaataaaaaagacgggttaaaacccagatgctgtatattcatttgtaattatgtataaagtgaagcagttttaaactgtaaagatttttttcagtgtgttttctcgaattttgccacaacatactggcttcgtattttatttatctttctttctagttaccagcttcagacccttgtaaagtctccctcagccctttcaaaaaataataaatttcctgtgaagttctggttggtgctgtgacttattcctattcctgattcctgtagaagggatactccccatccacccccatagctcttgaggagacgccttatgcaccgagcagctgctggggacgcatttcactctctcggagtgggacccaaacccagagagtgactgatcagccctaaagtcaaacaaacagtttatgccaagagccaaaacttcctatttccagataaatcaatacagtgaa

SEQ ID NO: 9781 - DNA, 1231 bp, Homo sapiens
tgccactcagtggggaaagcaggcctggggtgcctgaatcaccagactgcgctgccggtgaatggtggatctggcgttctcacgcccgagcctcatgggcagctgtgtcattgtcattttgttccagatcaggtcagaacagaacaatgtggccactgattgattttctcttcctctcctccctccacagaccgcggccttcagtgtcacagcgtggccttgcttgtctgccacagcgggagctaagccggccctgggccagcactccgagaggtggaaggggccctgccagctctggggagcagcagccttgggctgttctgagctttaggcaagagaagagaagcatctcttgcatccgtgcccctgggggcctcttcagctttgcagtggtttgtgggaagacatacctcccagaggggcatggactgccaccaggactgaccctggcgtcggggagaaggacacttgcagagccttgagatcacctgtttggcaggtcctggactggggccgggcaggcaggggcagggaggcgccccgggtgggctttggggctgcggcactgccacacatcctttccctcctggcctgccctgctggggctctactgccatctatagatggtgtcctgggcctgggaaactaggttcccaggggttgagaccagaaaggtgaccaagacagattttttaaggtgcagaaactgcaggggggcctcagtgacatccatgaggccttattagcaaaggacacccagacctccaaggtttgtgggccccttccacaaagctgtaagtcccagcccacctactcagggccttgctcagtgctgtggcccggtggggacacagttgctcgtggccactcagtggagctgggcctgcagcagactcaaggctccgagtgccctgggggtcacccctcccctcccctcctcagagcccaccctgagaggcagcagtgacccccatggcacacacctgccaacagcactgggggcttctccccaggagaccacgctgccctccaagaccaggagcagctgtgagctggagacagcagagggaccccagggtgtcccctgcagatcccaccagggccgcatccatctcagtgtggaggacagtgacgggaccctcaccatcctcttgcgttttggcccccatttgctccctgagctccaagataagaatggccccgagagaactgctgaacatttgttcattgc

SEQ ID NO: 9782 - DNA, 1242 bp, Homo sapiens
agtaccagggccactgttaccgccacttcccggaccgcgagacctgggtggatgctgagcgccggtgtcgggagcagcagtcacacctgagcagcatcgtcacccccgaggagcaggagtttgtcaacagtgagtgcggcggggcctctggagcctgagaggagagtggcggtgtaggcaaagggcctcacctttcagaaggcagcagatttgggcctcgtgagactgcaggacagggacctgggggagggggaacagtgttcccacagtctgagctcccagagagaagacaacggtctttggggccagaagctgtggctgcagccagggcagacccattgccagccagagtcagcccaagactaagctatggctgtcacccgtccatgccagcttggagaggtggcccgaagtgcactccaggcatgcacgtgctgagcctcttgtgaggacctgagaagcacgtgccttgctcctaggagcccacccacctcctttcctcctccatcccctctgcctccgtgagctcaagtttctcagacaccctcagggtgtccagtgtgatgcctgacaccctcaccctttccccagacaatgcccaagactaccagtggatcggcctgaacgacaggaccatcgaaggggacttccgctggtcagatggacaccccatggtgagttctgctgtaggcacagctggtggcccaggggacagggagtgggatagagacccctggagagagatgcattcaaaccccatgcagacagccgcttaccagctgctggaccgggaacccttgagggcagggattatctccttcatctctgcctctggaacccagcccggggctggacagattgagctaatgatggcaagaggcaaggagccaggaaggaaatgaaggaataacagccaccaccatgaggagtatacggaagctttagagaggtttcttgcccacactgaactcgagtctactcaaggagacagacagaaagcaacatagatgccaagtgaatggtacgggcacccagtgattctctttgtcctgaagcaaggctggaaggataagtcttgggaggacttcttggtgggcagaagctggacttaagagctgtgttcctaccatccatccctacccaatgtggtcagccctggttggcccttctggataagaggtgtggaatcagctcatgtacagagcctgtgagtcttgggggttctgagctcctgagaaggac

SEQ ID NO: 9783 - DNA, 3746 bp, Homo sapiens
ctctgggtgggctgagcatctgggctgtgccctggctctgcttttcaccctggacaaagtcgctgtggacttcaatttcttcacctctaaaatgggggacttggaccaggtagattgctgagctcactaccaggttcaaagttcaatgacaaactcagtttactgaggtttgagagaacatccctccaggggagcctgggagctgctctcccagtctaagcatgtagatatcatcgtttgccttttgtgtgtgtgtgtcccttatttgataaaaagatgttttgagttgttttttttttaagcactcacttgtaattttagtttttaaacccaagtccctctaactttgcctttgataccaaacaattcaaaagttggatctgagtttggagaaagatatttccaacctaagtgggtattattttgaaaccagatttttaatttaatagcctatatttgtagtctgttggataggtgtttccaaagtgtgtcttctcaagtgaaaacgcaactctaggtttcaagtactccttttctccgatcctgtggtacttgaatatccaaaaaccctgcactttgaacaatcagctgttgctatctggaactaaacagaactatgagtaaaattgcctggatactttaaaaagatatttttcctccttcatctcctttgactccaggacagactggaatataagtagtgggtctgcatggatgtttcagggatcaaaggagccacctgggcgcctgagtgccaaccctcagggccacaggtgggtgtggtttgggcacgggtccaagtgactgtgacgggacccgtgggcatgggtccaggtctgtaacctgaagaagttgttttctgacaatcaccaaatcatccgaatgacatcaaaagcagcccttatctcagagactgagatttctgtggtctcaacttcgctttggtataatttctggcactcaccagcctctatcattatgactttccccccagtgtattatttctctaataggtttccttttcacgttcttttagcacagactggcactttaccctctcagtttggaagttagcccctctcctctgttacttttcccttcacccaactacagctgtgatctagaacattcatagtcatatttctgctactactaccttcatttatcaagactttttatgagaataggtaaaccaagcaataacttcctaggactgaatcaccaccccagaagagcgagaggctcctttcatatgcctgaggccacaccccttaacctgttctgacaaaatagtggctggcccatgtaccagctccattcagaaattcaggaagagaaaagacagccctgttgtcacacaaaccggtgtgggggagggtggagcctggtctgcacggcagtcctggtggcccctgtggaggacaggcagggctggcagcatagcctttgttgccacacaaccggaatttgctcccccaggactgtgggagccagtgtcccagctgaaatctttttagtgtgtggctctgaatggcactcacattccattttggctcacatgaaactaactgaagccctttgttcaagcttcaggctcttaggcatggaaatgagaatgtgactgtggctgtcttacaggaaaattcttgtttgtccctgaatgagagcacagaggcattgaattcacagagctgcaaacttgcctgataaatgagggagtggcagtttatagataggtcatcttttttccttcctccaggtgtccttgcctttcttcccaaagtcattcatttctgatgagtatatgaatccccctcttgctagtaaggttctatttgggctaaaacaaggctgaatttttaaagagtatttgaatatattttagaatcaaattgaggctataaattgcatcaatctggacaattccattgcaggaataatatgttaaaaaccaatggggagaagcacccacatctctcctgtagcactccgtgtctcataagcaatttgaagacacttacaagtaactgattccagtcaaattaggattaactgactcaaaaaatggtgtcaagtttctttaatgtttttatgttagaagtgagtttaacagacttgaagaaaactgttatcttttcctgctgtgagtttacacaaatgattccagagcagaatgaaagcagaaagctgttggttacaatattcttttaacctctctgcagcattttacacttactgggaaccttatgattcaccgtaagagtggaaatatacctgagttcgtgtcctaatggtctctaattcacattggatcgtgggcaaatcacctcacctctctgagcctgttccctcctcttagaccatctctaagaccacttcatctatttacacatcatttgcttgaacattgctgaacatctgcgtgaacttggcctctccagcccttgcaggtggaaacagctgtgtcaaggctcaaggctcacgctgaggggacttggagggagggggcttctgcattaagctttcctggtgaagacccttgatcttgtccaaagccctgtgtctttgactggcttctcttcagagtccccgttgtcatcgtaagacccttgctgtttggagggtggtcttgtgactgtggcagctgctggccgctggaatgaggagcctatctccatcctccagtgtgactcaggcagagcattgagaattcccagggcagaaatccttcctgctcaggctttcattctaaaactacagtcttcattaaagctgaactttctgggtagctgagcttatatgcccggcatctgaatgagagctctctttgtaactgtgtgacttgagatctagtttgccagctcctgggaaacaatacatgtgttcttgtttgtgtttgctcagcaagcagatgtctgagatgtaagaagcttttcttttcctgtggcattgattctgacttagagctgaagtaaaagatcactgaaacatcacgtcaagttgaagtcactcataggtctttgtcctttaggcaggacaggagagtcattaagaagcatttcactgtagcattctatcacaatatcatctggaattgttttctttgcccagaaagccttaacttgcctctagagaatccctggtattacaacgatattgcggcattagaattccaactcttctgctgtggaagtttgaagcgaagctgcagcaaaaccagagaatttcctcaagtggcctgtaggctccttgttatcttatgcccccacccctccctcaacaatatgagtgatccagaactggcccaaacacctcagctctggtccctttttgcccttcttggccttactctgttgttcaaagccactttggattgcttggatgcttcgaacagccatgaaaagtagcctgcctgtggcatttagaggccaagcaattgacagaaagggtttcttctacctctgttatctaagcagagggaagtaaacctctcaccgccccccacccctcactgcccccgattaccctagaattgctttcgccaaattgtagttgaagctaaggaaggggaatctggcccctgctgggagagggaactggaatgccacacaaggcaaggcctgcttccttccttcccctctgctgctgctgcctcggaacgctgcagcccaggcttcctcccacagtggcccttggaagcaggccgcagagtagacagctgctccttttggaagagtcagtcccct

SEQ ID NO: 9784 - DNA, 1361 bp, Homo sapiens
tttagtggagcaaaaattgtaccataaacttgtgtttactcttttcattcggatcatagtcaaagggctgtagcattactgaaacagtcacagttgaccctgggtcaataattccactgttgggcctcacacagtaccggtgaggcacggtagtcttcactttgaaacacacttttctatccgatggatttcgcaatttaagatttgtagtgactacatctgtgaaggggcctttgaatttgaggtctatgggcgggtcgaggaccaggatctgctcgtgcttcgccgtggccccggaggcagacgccattggagagacagcgcagagcagggggcggcttgctcgctgggggcgggggacgatggcgagaggggagggggagcgagttcgcatctctccttttcctggttagactctgttcaaccacattcttatgttggcagatctgcttccagattgatttttagagcaccatcactttcacattcctgattctgattttgttttgttttgtttgggttttctgaaacttaaaatgctgccccgaaaatactatatttttgagtttgtgttctgaaagcctccgtgctgctggatctttggggggaaatacaggatccttcagcactgaggtgtttaagatttgcaactagcaatgcaattttttctaaatatggggatatttacctttattaagaaattatactaaacattgatgtccttgatcattttatgttctcatattacttttgattctactatgattgtgtggtggtgaacaaagatcattacaaacaaaaactgtaattttgttatatttgattcaatggaatttacctaaaaaataaagactaaaaatgtggtgtggctatgtgtcctttgtatagtgccagttttccatctgaaaggattcttcctgtgtcttcaccaaagtatgagattaatggaaatacacaaaaccccatttttgcaccacaattgatgttagtccatccttgcaaacaaataccaaaaccttgaccaggccacaagtgtcttcacaaccccatcttctccgggcaagaaagccaagaactaaaataagtgaagtatctcttttctacttttttaattttttagagagaggttcttgctctgtggcccaggctggagtgcagtggcatgatcacagctcactgcagccttgacctcttgggctcaagcagtcctcctgcctcagcctaccgagtagctgggactacagggacttgccactgcacctggctaattgtttagtttttagttttttgctatgttgcccaggctggtctcaaacttgagttcaagtagtcctcctgccttggcctaccaaagtgttggg

SEQ ID NO: 9785 - DNA, 1237 bp, Homo sapiens
tacaagaagagcccaatttccaaataaggtcacattctgaaatactgggggttagagcttcaacatatgaaatttggggttgtggggaggacacaattcaattcataatgcctctattactttggtctaggccactgtcatctctctcttaaacatggtagcagtctactaacaggtatccccatttcactcttaaacccccataactcattctccacacaaggagcaaggatgatttttgaaaaatctatcatcccatttccttcttttctctttagtaacttccgttgcacttagagaaaagctaaacttcctaccatggcctgtaagattcttcataatctggtcctttcccgtttctcttcaaactcatcttctactactcttttctttattattctccagccatgttgatttttttttttttaagcaaggctttggcctcaaatatgccaagttctttgctgcttcttggacattgcacgtgatcatacttccatctggaatatccttctctaacgcctttgaataattagctccttcttgtccgccaggtctctacttaaatgtcacctacttctgagaagcttccccttactaccctagaggaaatttccttcctttcctcacttattgtctatctcagcctcttatttggttcttttacaatttttttctgccatcctttcccctcctgctctgttatgaactctgagtcaaattactatgtctgttttgttcatctttataacatgcctaaggaaaataacatgctcaaaaagtatttgttggatgaatgtatgttcccaacttagtgctaagttataaacataaatgtttatagaatgagtaagaatagattttagtcttgacaatccaggatcatattaagatataccctcctctgtctaaaaattatggtgtttgtaatacttggcgtctctgaatgatctgaacgtgacagaagagtactttttcatattgagtgtttaggtcattggggtaaaagactgttgccagagacttgtacctttttctttctttgcagttgactaatctccttcagaatcaagcagtgaaaggaaaagttgctggagcactcctgagagccatcttcaaaggtaataataattaatgtcacttctgtctgtctcctgcattcattggtagatttgtttagttttcgtacttttcttacggtttgaagccccactggaacattttccatgttttgagg

SEQ ID NO: 9786 - DNA, 1657 bp, Homo sapiens
atttcaaaactggaagtttacatacaagtgccctggatttcagaattttgaacatgcattcttcagatgatcacactccaggctctaatgtacctggccccatccactctctttacccacttggcagctgcactcaggagagtcatgtagcattttgatgtcaatggcttcttctcttgtcattttgtcccataagtatcctcagtatagcaaaagtcctaaaaggaggtgccactgtcttattactctacactttggaggactccttcctcttcttcaacaacataattacctcctgtgagtgggaaagtggggaaagcatgactaacaaaggctttgatgagaagatagagtcttttttttccttctttttatttccactgccttggagcaggtttatcacgttagagcattaattctttccccttctagggcactgcatcagagcatgggggacagaacaaagaaccagccaagaagaaaaggaaaaaataaatgaaatgcctgagttaatgtgaactttggggcttctgcttcatttttacccaacaagcaacaatgccccttgtcctgtagtccacaccgatgttggcatcttggttctgaacccactgaattcaactgcaccttcagttagaaggaatcttcttggcaggtcctgctactgaaaaatggctggccttaggcaagcccttttgcaaaaagcacagctgaaagcctgagtttgggagcctgcaccaccccgatgaagctccacgggagcaaatacagagcctccaggcagtgctatggtccaggctggcttcgtttttccaaggagcctttggtgagttcaattatctggtaaatatccagcgcttcacctgaaagatagtgcaaattggttaggatgccacctcaagaactgtaactgagagctcagaagtgagcaaaggagcttaatgctaaggtcaaaaggagagtgaaaggttgagaacaattgccacgaacggtaatgttacatgttaggagggtctgttttctttttatataagtgtgtcttagatatattttaaatagaaaataagctttctgatttacttgtttggtatttaaagcacagtttgtttttctgtcacctatagagtgcaagaatgcactctatagaataaattatctttaaacatttcttctgtggttgaagtaggggacaggtacaggtagaatatttgaagctctgctgccttcatttctgaaacatcatatcacattcactctggacacagggcaccttataaactgaaattagcctagaatatagcctgagtcaagagtggattctctggggccccaagtttcctgttctccaagacccactttctagtccacctcagatcctatgtgtaatgaggaacaaatgtgttgtgctcaccctggggaatcccgtatctcctttccatcccagttgggttggaaggggttttacaatccatggtcacttccttcctgaggcaccggtcaatatcgactgcactgaaaaaggcgactgactggggcaagtcattcagacccagcttgtaggcaaacatgcacctgaaagagacccaatctactctcacagtcatgcccctcctgtgaacagatgcatcactcctggagcaatgaccccacacccctt

SEQ ID NO: 9787 - DNA, 1166 bp, Homo sapiens
acaccattcttctttttttttttttttttttggtgagacagactcttgctctgtcgcccaggctggagtgcactggcatgctctccgctcactgcaacctccacctcccaggttcaagcgattctcctgccacagcctcccaagtagctggggttataggcacccaccaccatacctggctaatttttgtatttttagtagagacagggtttcaccttgttggtcaggctggctacaccattcttaaggtggcagtaaataagacttctgaaggtaatagtctagtgggtcagtgtttttttaataccttgttgggaccatgtatcaaacccctcttagtttgttaagagacacttcagaagtctcttaaagctaatagcttgctgaatttccatcttatatgtggtactatgtaaattttgcccggttttggacaacatgagaaaatgtcaagcttgtagttgtctttggttacttactgtggttctgattttacagaaataagtctgagacgaagtcctcgaatcaagcagttgtcatttagcaggacacattctgcctccttctattctgtgtctcagccgaagtctcgaagtgtgcaaagagtccactctttccagcaagataagtcaggtaacatacgggcccctctgccttcacaagtccgtgctgacttggtgagaagtgtttttgggaaaagaagcaagaaatttgacattttctttcttgacattggagaagtagaataggtatgtctagttgaggttcagggtgatggctagatggacagtccatgactttgtaatcagtcatccctaggactcctacaactggtcatccatgctatcattataggtagctcattcattcaagaggaagctacccataatttcccataaggacagaacctacacatcattatcttaggtggaaggtgatatctgtgtttacgttcttcattcttctatccatggttagcttgctaatagatttgtgtttcttattttatctttttttgagacaaggtctcactctgtcacccaggctggagtgcagtggcacgaacacagctcactgtagcctcaacctcccaggctcaggtgatcctcccaccttagcctcccagggaggtgggactacaggcatgcaccaccacgcccagctga

SEQ ID NO: 9788 - DNA, 1187 bp, Homo sapiens
cgcccactgcaacctccacctcttgggttcgagcgattcttccgcctcagccccccaagtagctgggactacaggcgtgcgccaccacgtccagctaattttgtatttttatttatttatttatttatttatttattttttgagacagagtcttacaccgtcccccaggctggagtacagtggcacaatctcggctcactgcaacctctgcctcccgagttcaagcgattctcctgcctcagcctcctgagtagctgggattacgggcacctgctaccatgcccagctaattttttgtatttttattagagacgaggtttcaccatgttggccaggctggtctccaactcctgacctcgtgatctgcccacctcagcctcctaaagtgctgggattacaggcatgagccaccgcgctcagcctcagtggcattttcctaagtgctgtgatagaggtgggaactggagactggggaagcgcagaggggagtgggggctggtgtgcatgataaggcagtgacattgagttgggttttgaaggatgagtaggagtttgacaagagggagaggaaaggcattcctggcagtgggaacagaatgagcaaagtcacagaggtatgaaaaagccccgatgatctggggagacgctggcagctggagccacagtgggcagtagaaagaggacaggccagagggtcaagttcacagaaggtattaaggcccaagccagagttaaggtttcactctgcaggttgggcaccaggtttgaatgggagagtcccacccacactcttaggcagagccctctgctgacgtgtgctggtggggttgggtgacaggggagggtagcatagccgccactgcccgatggggtgtggaggtggccaggcctgggctgtggcaggggactggacgagggaagcccttttgtgtgttcctgaaggtgggggctgcagagcatggctgtctctgtgcccccagcctgggttggcctggtgcctagagcagggacctctcattatagagccaactttgggctacctgctgcaccaacttggaagaccagaggccttgtccagaagagtaaagattccagccagctgggcctatggtctgaatccaaagcaaacaggaagagagtatggtgggccaggcagggcctctttctttgtttagaaaagggattag

SEQ ID NO: 9789 - DNA, 1039 bp, Homo sapiens
ggctggagtgctgtggtgcaatctcggctcactgcaacctctgcttcccgggttcaagcatttctcctgtctcagcctccccagtagctgggattacaggcacccaccaccatgcccagctaattgttgtatgtttagtagagacagggtttcaccatgttggccaggctgggctcgaactcctggacctcaagtgatctacccgccttggcctcccaaagtgctggcattacaggtgtgagccaccgtgcccggccaccagaatcctttggtatagccaagccttttggttaccgcctcatgaagaatatgcttcccgcattgtcctagtcccagttgtattctcacaggtgttatgtgcaggacacaatccaaatcataaacctggctcatgcccaacacatttctgctaatagggagagggacccaccacacacccacacatgccagaggtccctcctcacagaggagagggcctgtgtctgtagaaggttaaagctgacaacatgtgaaacatcccagaattatgactcttcccaagtttaaaatacattctcctcatgagagcagaaggtttgttgctgtgttgtgaatgatgagctgcctccatagggaacccactgccacctgggccagcttctggagcatgagaacctgagccagggtcacccttgtggggcctggacatgacgcacgctggctgcgactaggagcagggctgcctcttctccctccccaaggtctgcttgtgggcacgctctgttccctcaggtgccattctcccagggcttaggcgcccataaatgttctttctgtggtggagtagggcctcctgcttccatactgtcgcatgggctagatctcaggtgtggtgttgagccaccttaagatgagggctgcttcgcagtaaagtttccagcctgggcccctcttgggccttctggctggggaccctcagcctcctgatgctgttgcagggcaggtctgagagggtgcccagcagcacccggtgtcagggccaccttgttttccatttttg

SEQ ID NO: 9790 - DNA, 1039 bp, Homo sapiens; identical to SEQ ID NO: 9789

SEQ ID NO: 9791 - DNA, 1159 bp, Homo sapiens
atttggggaaagcaggggtccatttgtgatagtgttggacccaccaagggcatgagtagtgggcaactttggagtcctgtgagagagggtgtggcacccccccccccttagcagcctgggggacgtcagctccaagggtgagggtttcagccctgggttccttgctatggagtcaaacgtttctccagtgtgtgttcagacttctgacctggacccgccttagccttggggagctctctcaactgcgtcctttgttggatggaaactgcattagacacagaaacacagagctgctcttttccccacaggcaggtgcagacctgaaagagccccgctgaagcggctcagaggcaaggggaggacctcatccttaagtcacaggactcaggattagaggacctacagctttcagcctcggctcaccatctcctagccctgatgacccacagcctccccaagccttggtttcacagcctgtaaaatgggttcatgagcctacttttcatagctacactgtgtgtttgtatataacccatggctatcactattacctgcggaccgcggtgctatgaagtcaggagacaggcctgcaccatcctgaatcctctgttctctgaaaaatcgccctttgttctctcttacttccttcattcaatcagcaaacatttaccaactacctaccatgtgttaaactctgtcatattaaggtgaatggcatggtctctctccccagtgagcccccagtccagaaggggtactagatattggatatagacacaaaagcacaggaagttagctcttcgaatgtgctgggggcagggggctgtagggaagactgcttggtggaggtggtgtctagctgagtcctagcagacaaaggcggcatgggggaccaggcgtggtggctcacacctgtaatcccagcactttgggaggctgaggcaggcggatcacctgaggtcagaagttcaagaccaggtgaacatagcaaaacccgtctctactaaaaatacaaaaattagccgggcatggtggcgcatgcctgtaagtcccagctacttgggaggctgaggcaggagaatcgcttgaaccagggaggcagaggttgcagtgagctgagatccagccactgtacttcaggctgggttacagagcgaga

SEQ ID NO: 9792 - DNA, 1203 bp, Homo sapiens
ctggataaccctcaccaaataaggggcccgccaccttgggtttggcagcctgtgttgacacatcctttgtgacagggacacatgtgtcccacgcatcagagggatttcaaaatgtcacctgggagctatagagaattttcactcaggttttcctaaattatccaaacagaacagtttggttttttccctgtaggcctctttatttttctttaaacctgtggaaacgaacctcctctgagagccgacatatgcttgtcaatcaggcatgtgcgtgtgcctggttagcacatttactttacctgttaaagcagtggctcctctcctgtgtgcatgggtcagtggatagcaccgcagcaaggccagcactttctacatccccaggggccaccagtcactgtggtctgaggagtaaaggtggccctgcctactcttgaggtgtgtttatacctgtgtaggccaaacccccgcactgtgtcacacctccacattacaatcactgctccctcccccagagtgcctttcttctgttagtctgcctgctgaactcctacacaacctacaaaaccttgctcaggtgtcacctccccctttgactcccccacataagacttaatcacatctccctttatccatctcctgggagttgtatgtcatagctgtcaactcactaaggtaatcatccatttactgtggctgctggagggcggagactgttgtcttcatctctctagctcctaggagaatggtgtgctgtccatgtttgccaggcagaaaagccttgcaaaacctcagtcactctacagtgacctcagagcttgagcctggtcaactggaacagcagaaagaaggaagctggaaatggcggatggcttcaaggacgtgagccatggagaggttagacagtgacggctgacaggtttgccgtctgggaactgttgcggacctgggtaagggtgcagctctagtgaggtcaacactgaggtgagcgcagaagccatgagagatggtttctctgagggagtccactcaggccaaggcctgagcccaggggccgctgggatgcaggaggccagggagtggtggtggtgcgtggcctgtgagctcagagagggttgtgtggctgctgccagatgaggaggaggcccagctcaaagctcctgtgtttggcaaagggctgccaccttccagaggacagctgagctc

SEQ ID NO: 9793 - DNA, 1570 bp, Homo sapiens
cctagctagccgtcacgggatggagggcttcatggactcagggacacagacggacgccgtggtggtgctgtccttggctcaggccgccgtgcttggcctggtctccgaaaatgagctctttggagctaccataagcgccgaggccttctacccggacctggggcccgagctttcaggggcagccatgggagagcccgagccaccaggccccgacgtctaccagctggcctgcaacgggagggccttggaggagccggcggaggaggaggtgctggaggtggaggcagcctgtgagaagcacacccggcggaagacgcggccacctgtgcggttggtgcccaaggtcaagttcgagaaggtggaggaggaggaacaggaggtctatgaggtttctgtgccaggtgacgacaaggacgcagggccagcagaagcccccgccgaggcggccagtggcggctgcgacgccctggtgcagagcagcgccgtcaagatgatcgacctcagcgccttcagccgcaagccccggacgctccggcatctgccccgaaccccgaggccggagctgaacgtggccccatatgaccctcacttcccggccccggcccgggatggcttccccgagcccagcatggcgctgcctgggccagaggccttgcccacagagtgtgggttcgagccaccccacctggcccccctgagtgaccccgaggcccccagcatggagtccccggagcctgtcaagccggaacagggcttcgtgtggcaggaggccagtgagttcgaggctgacacggcgggttcgaccgtggaacgccacaagaaggcccagctggatcggctggacatcaacgtgcagattgacgactcctatctggtggaggcgggcgaccgccagaagcgctggcagtgccgcatgtgcgagaagtcctacacgtccaagtacaacctggtgacgcacatcctgggccacaacggcatcaagccacactcgtgcccacactgcagcaagctcttcaagcagcccagccacctgcagacgcacctgctgacgcaccagggcacccggccccacaagtgccaggtatgccacaaggccttcacgcagaccagccacctcaagcgccacatgctgctgcactcggaggtcaagccctacagctgccacttctgcggccgcggcttcgcctaccccagcgagctcaaggcccacgaagtgaagcatgagagtggccgctgccatgtctgcgtcgagtgcggcctggacttctccaccctgacccagctcaagcgccacctggcctcccaccagggccccaccctctaccagtgcctcgagtgtgacaagtccttccactaccgcagccagttgcagaaccacatgctcaagcaccagaacgtgcgacccttcgtgtgcactgaatgcggcatggagttcagccagattcaccacctcaagcagcactccctcacccacaaggtaaggccgttcccagggcctgggcatctgcctgcccctcctgccactttttcatccagtactttccaaagtcccagatgggaccatttaggt

SEQ ID NO: 9794 - DNA, 2029 bp, Homo sapiens
agacccctgtcctacatccctttctggaagtgagtgtccctacagtggattgcaacacatgtcgtccacttcgaccctagctggagtgcctcaccagggggccccactaggaacaaagccaggacaggccccgcgtcaggcacacactaacaaaaccagaagcatggggcagggcagggcggagtgagggcatcacaggggaccaagaagggctgtccttgggggaggcccaggaccacctgtcggggagggggaccgcagtcatttctcattcctcagtgtccaccttgcgacggggatagccacgagtcagcagcttcccggaaagagcaacgtattttaaaaaggaaagtaaagcccacagagggaaatcaagggtttttttgagcaaagggggtcttctgaaggtaacttattatttttttctttccaactgtgtgtcacctatgaccttttctgatggagatgcattttctttttccaagcgtaagcttcctaatgtgctgtgcgtgcttcctacccacccaccccgagcagcctggccgggcaggactggggctccatggggactgtcaccctggccctggaggtgcagccgctggcagcagcctcagcaggctggggtgggaggcaggagaaggcagagctgggaagccctccacccctgcctggctcctgcagtcgctgacttgctctgtcccatgtcccatcctcggctgtcagggctgctgactctgctcagccaacagctagctccctcgctcgcctgctctcttcccctctgttcccacgccagctcctgcccctggaaccagagatgacaggcccagggcagtgaaatagcacattcaggaactctagggcacccggacccccccacccacttgcctcctgaggcctcagtggggaggggcaagcaggggtcttccccaaaggcacagatgaagccactagcttcagcctagaaacccggagaagggaacagcctgcggtgggaggaaccaatctgcagcgcagccacccccaaggctggatccttaagtgaaggaccaagccaggcctcagggtgactgtgatcaggactgaggggtggacaaggtggcccaagtatggcttccagaccccgaagccccacgacctcccaggtgcccgccatgatgaccctcaggtggcagtgaccccgtcactgtataagacattttctcctgctgagcagaaggcatcatcccctgcaactacctcttcccacgtctttctcccctggtaccaaaaagaaccctgtacctctcctcctcctcctccctcctgccagtgcagtggccttggtcttggaaactgaagggagaaggtctggcccccagggtggggctctcctttccctcccccagccccgccgtcagcactggccctctgtgaggttcgatacttgaacgccccctgccctgtgccttggacctgggcaaagctaggaggaggaaacagcacaactcacagtttgagctggggggtggtcttggcaaggctcctgtctgtacccctccctaaccttctcaaaagaggtgcacagcctctcgggtgacttggaaactcctggacaaattccattctaacttattttgacatgtatacaaaccaactgtttagagattccacttgtgcaaagccctactgtgtttttatgttcctgtttaaaagagaagtttacttagcaataattataaataaatgaatattctttagtgaggtgactgcaaatgcttctttccccagctcttggggacctggccctcactcccagcaggaactcccagcaaaacttcccagccccacacagcagggctgcactctcccagggcccgggggaggctgagaccatcctctgcactggaatggccccctgcagggccaggcgcctatagccagctgccccgggcccaagagagtggtgtgggccacggcccctgtattcccaccacttgcagagaaaagctgcttcccctccctacccacccacatggcttcaggaaag

SEQ ID NO: 9795 - DNA, 2060 bp, Homo sapiens
tgggccctggagacccacaggagggtgaagagacctggaacagtccctgtcctcccagttgcagctgggggaggctgagtagagccacgaactatggcagctacaatattgggttgtagagggcagcagggctcagctgggtggccccaggagaggcgaggccctgagagaaaggctttctaccctccaggctttggctcccttggcctgatgacgtccgtcctggtctgccctgatgggaagacgattgaggctgaggccgctcatgggaccgtcacccgccactatcgggagcaccagaaggtgagtgcagggcatggggcctcacaatgcccctctaccccaggggcctaaagcccactgggctgagggctggaaggacgagcctgacccaccagcccaggggcgggcagctgtatctgggcagcctcctcactagctggctcggctcttgatctccctgcaacccccgtccccagggccggcccaccagcaccaaccccatcgccagcatctttgcctggacacgtggcctggagcaccgggggaagctggatgggaaccaagacctcatcaggtgagcatggagggagaggccggagctgcccaggacaggctctgggtcctgcccttgcacagatggggtctcattctgccccatccccataggtttgcccagatgctggagaaggtgtgcgtggagacggtggagagtggagccatgaccaaggacctggcgggctgcattcacggcctcagcaagtgcgtggcctggggtggtaggcagaccctggggccatgtgggaggaagccaggggacccctcctaaagtccccctcatgagtcagcttagctgcaagggggcctggggcaggacatgtccacagccctgagagactgctcaggccagcctctgtagaccaggtctagtgagttcctccccatccctgaggctggctactcagagctccttccgaccctgcccacacccctttcccagcttctctcaggagagcagttacctggcaagacagaccctgcgggtgcctgccgaatctcggtggcctcatggtagggggctatagctggcctctggcctgtagtctgggtggcaggagatggctgttctgatgcccaagctcaggctgttccctggaagggcctggctgatggccttggcaaggcctggagccacccctgatgtgagtggtgctctctctgcagtgtgaagctgaacgagcacttcctgaacaccacggacttcctcgacaccatcaagagcaacctggacagagccctgggcaggcagtagggggaggcgccacccatggctgcagtggaggggccagggctgagccggcgggtcctcctgagcgcggcagagggtgagcctcacagcccctctctggaggcctttctaggggatgtttttttataagccagatgtttttaaaagcatatgtgtgtttcccctcatggtgacgtgaggcaggagcagtgcgttttacctcagccagtcagtatgttttgcatactgtaatttatattgcccttggaacacatggtgccatatttagctactaaaaagctcttcacaaaattgtctgctgtgtttgtccctgaggggaggaggtagtgggaccctgaggcagaggccctgctagagctggcaggttcccctggggcagaccagagcacctcaggaaggggctgccacggcagggaagggaccaggcagccctgggagcccgcattccacaggggcccactgcggagttctcggacactcagggcacaggcctgtgggttccctggaattttctagcatgatccagtttctgtgtccagttctccattctgagagtcaatcagttcctgataggttgtcattgatttttttcttcgttggttttaaccttctaaacatctccaggccactttcttagcctttttctaggtactaaaaagaggtcctacccacacctgcctcacacttctcctttccaaggctgcctgagtttggaggggcttgggtgtgtgtgaacaagggccctgcattg

SEQ ID NO: 9796 - DNA, 1118 bp, Homo sapiens
caaagcaaagttgagagggagaggctgggccagcagaaacatcgtgtgcactgcacggaggctggtgttaaacagtcgcgtgggcggcggggtaccgttcctggagagctgggccttgccctgggaggtgggaggttgccggcaatcgccaggctagggcaccacgccagggccctgtctctccccctgcagtccatctcaggttttgcgcacagctgcttccagtatgccatccagaagaaatggccgctgtacatgagcaccaagaacaccatactgaaagcctacgatgggcgtttcaaggacatcttccaggagatctttgacaagtaaagcctcatccatgtactctgtggcctttcttcccttccccccatgctgttcccatcctaccctgggaaggtcgctattagagtgcatttggctcagctccgaggctcagggagggatccccaacctgtcagccttctgccctctccccataacagacctttttactcccaggcactataagaccgacttcgacaagaataagatctggtatgagcaccggctcattgatgacatggtggctcaggtcctcaagtcttcgggtggctttgtgtgggcctgcaagaactatgacggagatgtgcagtcagacatcctggcccagggtacgctgggaggacgctgctccctgtgggggtggactgttggtcttctctggctggagggattttcagacccttttggtagaaaactctagtggagcaggactcattgcagggtcctctgtggacagcagggggcaggagctccctggcatctgagtgagagaggatcacaaattaggtttggactggtgtatgactgaggctgctcttagagagaaaggagggcacaggaattccagggctaggttgacagccctaaggttgctccagtccatgatggagcctcatgactctttggttccagtaggaaaatgggatcaagcgggactggaggttctttaaactacagcgaatgcattttgcatagtgaacctaatggatggaagagaatgttggggaagcctgcaaacccccaagccctagggtgtcctaaaagacaaatcagattgcagtaaaaagtat

SEQ ID NO: 9797 - DNA, 1104 bp, Homo sapiens
caccattaaaactggcagacttgctgggcatggtggctcacacctgtaatcccagcactttgggaagccgaggcgggtggatcacctgaggttgggaggtcgagaccagcctgaccaacatggagaaaccccatctctcctaaaaatacaaaattagcttggtgtggtgtcacatgcctgtaattccagctgctcgggaggctgaggcaggagaaccgcttgaacccaggaggcagaggttgtggtgagccgagatcgcgccattgcactccagcctgggcaataggagcaaaactctgtctcaaaaaaaaaaaaaaaaaaaaaaaaattggcagactccagagcccacacatttgcactctagactctactgccttcctcatgaagaattttaggacccccgtctggctgtgttgttgcttggggttcaaattctggttgaaagatggcggctgcagtgggaccactattatctctgtcctcacagagttcaagctgaagaagatgtggaaaagtcccaatggaactatccggaacatcctgggggggactgtcttccgggagcccatcatctgcaaaaacatcccacgcctagtccctggctggaccaagcccatcaccattggcaggcacgcccatggcgaccaggtaggccagggtggagaggggatccactgacctgggcaccccccgactggagctcctcgcctagccatcctcttgtctctgcagtacaaggccacagactttgtggcagaccgggccggcactttcaaaatggtcttcaccccaaaagatggcagtggtgtcaaggagtgggaagtgtacaacttccccgcaggcggcgtgggcatgggcatgtacaacaccgacgaggtgaggctggcttgggcatcctgggcccctcctctcccagcttgtctcttcatctctgtctcgtggctttcctttcttctgtaatggcctcattcttaggccacaaagaggcagaaatggccaccagggctgggcatggtggctgacacttgtaatcccggcattttgggaggccaaggcaggattgcttgagaccagaagtttgagaccagcctgggcaacagtgag

SEQ ID NO: 9798 - DNA, 1207 bp, Homo sapiens
cagagaagaggccactcagcatccaagacagcttcgtggaggtatccccagtgtgcccccggccccgggtccgccttggctcggagatccgtgactctgtggtgtgagagctgacttccagaggacgctgccctggcttcaggggctgtgaatgctcggagagggtcaactggacctcccctccgctctgctcttcgtggaacacgaccgtggtgcccggcccttgggagccttggggccagctggcctgctgctctccagtcaagtagcgaagctcctaccacccagacacccaaacagccgtggccccagaggtcctggccaaatatgggggcctgcctaggttggtggaacagtgctccttatgtaaactgagccctttgtttaaaaaacaattccaaatgtgaaactagaatgagagggaagagatagcatggcatgcagcacacacggctgctccagttcatggcctcccaggggtgctggggatgcatccaaagtggttgtctgagacagagttggaaaccctcaccaactggcctcttcaccttccacattatcccgctgccaccggctgccctgtctcactgcagattcaggaccagcttgggctgcgtgcgttctgccttgccagtcagccgaggatgtagttgttgctgccgtcgtcccaccacctcagggaccagagggctaggttggcactgcggccctcaccaggtcctgggctcggacccaactcctggacctttccagcctgtatcaggctgtggccacacgagaggacagcgcgagctcaggagagatttcgtgacaatgtacgcctttccctcagaattcagggaagagactgtcgcctgccttcctccgttgttgcgtgagaacccgtgtgccccttcccaccatatccaccctcgctccatctttgaactcaaacacgaggaactaactgcaccctggtcctctccccagtccccagttcaccctccatccctcaccttcctccactctaagggatatcaacactgcccagcacaggggccctgaatttatgtggtttttatacattttttaataagatgcactttatgtcattttttaataaagtctgaagaattactgtttaatcctggctcttcctcttcaaggacagttgctttttgaggtaggtctagtcttctgagttctgagaggttctgaacctcttctt

SEQ ID NO: 9799 - DNA, 1203 bp, Homo sapiens
gactagaatccctgtcagccacctatgtggctgctgccacccctaaaaagtgttgtgagtgcaccaaggacaaatggcatgctcttcgttattagtgagctattaacctcttccagttctttctcctaccttggtgaaccggcctgtatcttgtgtgttccgagggcccctctttcccctctagcgctagacccagtttgcctttttggtttggttccatcctgtttcctccataacctccacccctcccaagttggaggagccccaatatctgggatttacagtaactctaaggccaggaataaagatcatagagattggagggagaaaagcttcccctcttcagttctatttataatacctctacttctactaaaagctccaccttttagtacagtggccccattgtgtatcctagggcactccattttctcctctgcctgtaacagagctctttcttgggaaaagagaggagtgtgtagagagtgaatatgactgtgtagaggcagtgagtataagtaagagagtataagtgtagagagacgaaagttttctgtggctgtgggtttgtgtttccctgaaaggttaactgggaaaatttaggggtaattcctataaatgagcactgggagtggttgagaaatagaaaatgtagagatttctgcttttcttcattgtttggagagcagcttcaatattgaaattaagccgctgttctaatgagatatcacctaacgattcaaggctttttgctaagggctgcacaatagatcaaggatacatcttaaattattatttatgcttaaattgaagcttatttttatccttttgcctgttcttattgagttttacatttgtttaggctaaggagcggggttttttttgtttttttgtttttttttgaaacggagtctcgctctgtcgcccgggccagagtgcaatgacgctatctcggctcactgcaagctccgcctcccaggttaacgccattctcctggctcagcctcccgagtagctgggactacaggcgcccaccaccacgcctggctaattttttgtatttttagtagagacggggtttcaccgtgttagccaggatagtcttgatctcctgacctcgtgatccgcccgccttggcctcccacagtgctgggattacaggcgtgagccactgcgcccggccggctaaagagcagttgtata

SEQ ID NO: 9800 - DNA, 1082 bp, Homo sapiens
tctccccttccttcctagaagactcttcctctccttttttcctgagttcaagcatcccttcgttttggaagctttccttgctttttccattctgagttgaagccctttccctatggtcctgtggcacttttggtgaactgatttacagcacaataggtttataatcatctgtttgtgtgtcgctcccaccagactgtaaaagactgaagagaaggtgtcatgtcttgtataacttttattcccaagtgcctgttattgtgcctggcacacaattcaggcacctgattcacagttaaaaacctgcgttcagattctagacttatcacttaccagccccgtgaggatgagcttaagctatctaatatttctgggtcttatagtttatgaaagataagacacttgcttcaggctgttcctggctgttagtctaacatagttgggtataatttctgtcttcccagcaaactgccctatgatgtgacccctgagcaggcgctagctcatgaagaagtgaagacacggctagacagctccatcaggaacatgcgggctgtgacagacaagtttctctcagccattgtcagctctgtggacaaaatcccgtgagtgccatcagttgtcatgacccccagtagaacccagcactaagtgcctttctgctccttggcccttctcactaagttttgtccatcccgcagttatgggatgcgcttcattgccaaagtgctgaaggactcgttgcatgagaagttccctgatgctggtgaggatgagctgctgaaggtaagaatctcatagccggcagactcctgccctttgaggacaaagcaataaaaccagggctgaccatagatcattactaactgcctaagtgtaggttctggcagtagcttaccattgattgtgagcttttgaaagcaattgtaattggtaaatggtacctctcttaggatgaaacacttcctatagtttggcacacaaacatcaaacaagtagaaagatggatttttcctgttttcagatgagtttctttgagtcctatcttttcgctgtagtattgttccctctgctggtgacctggc

SEQ ID NO: 9801 - DNA, 1228 bp, Homo sapiens
ctctaaaggaaagaatttttttgtttgtttgttatgagacagggtctccctctgttgcccaggctgaagtacagtggtgcagtcatagctcactgcagcctcaaattcctaggctcaagtgatcctcctgagttgttttttttttttttaatagagatggagtctcactatgttgcccaggctggtctcgaactcctggcctcaagccatcctcctcctttagccttccaaagtgctgggattgcaggactgagccactgcacccagccagaaagaatgttttcagagagaattgtgatattgtagtgttgaaatgatttctcaaacatttatggagttattatggatcccttgcctttatcatttggcataacattttatttctcagtaaaagttgttctcgtcacactgtatgtgttaggtgattcaagtattatcttagacttgcatcatcttatatttgtattatttccccccaatatctcctctctttattacgctgactctttccaccctcccaaaacttcaggggaaagctctggcaatttaaatgacccaaataaggaggcactggctaagacggaagtgtctctcaccctgaccaacaagttcgacgtgcctggagatgagaatgcagaaatggatgctcgaaccatcttactgaagtgagtatcaaaagaaggaagaatgaaatgaatgtaatctgaaggtttcttggcctttggagaggaacctgctgggtcctacctgaaatgaccatcctgacctctcgtacttgtcataatcccagtcaccaatcacctcgcatattgtacttggtacaggacttatctgccttattttgctaatatgctacagtgaaatgtaaatcttggaaatcctaaccctcgtacctacttatggaatggctgggtaaataagccttgtgccttgagtactgtgtactggcagctgccgcttgggacttctgtgaggtactgtttgtgctgctgctgctgctgctgcttcggtccacttgagaggaactagaacactggtaatatttaaatgcctcccccatctcgtttcagtacaaaacgtttaattgtggatgtcatccggttccagccaggagagaccttgactgaaatcctagaaacaccagccaccagtgaacaggtaaaatttagggtctaacatactcctttgtttggtagataagctctcccgataggcgcatgtcagagaa

SEQ ID NO: 9802 - DNA, 2193 bp, Homo sapiens
catacaagacacacaactaaaatgtcatgttattaacagttattaggttgtcatttaaaaataaagttcctttatatttctgtcccatcaggaaaactgaaggatatggggaatcattggttatcttccattgtgtttttctttatggacaggagctaatggaagtgacagtcatgttcaaaggaagcatttctagaaaaaaggagataatgtttttaaatttcattatcaaacttgggcaattctgtttgtgtaactccccgactagtggatgggagagtcccattgctaaaattcagctactcagataaattcagaatgggtcaaggcacctgcctgtttttgttggtgcacagagattgacttgattcagagagacaattcactccatccctatggcagaggaatgggttagccctaatgtagaatgtcattgtttttaaaactgttttatatcttaagagtgccttattaaagtatagatgtatgtcttaaaatgtgggtgataggaattttaaagatttatataatgcatcaaaagccttagaataagaaaagctttttttaaattgctttatctgtatatctgaactcttgaaacttatagctaaaacactaggatttatctgcagtgttcagggagataattctgcctttaattgtctaaaacaaaaacaaaaccagccaacctatgttacacgtgagattaaaaccaattttttccccattttttctccttttttctcttgctgcccacattgtgcctttattttatgagccccagttttctgggcttagtttaaaaaaaaaatcaagtctaaacattgcatttagaaagcttttgttcttggataaaaagtcatacactttaaaaaaaaaaaaaactttttccaggaaaatatattgaaatcatgctgctgagcctctattttctttctttgatgttttgattcagtattcttttatcataaatttttagcatttaaaaattcactgatgtacattaagccaataaactgctttaatgaataacaaactatgtagtgtgtccctattataaatgcattggagaagtatttttatgagactctttactcaggtgcatggttacagcccacagggaggcatggagtgccatggaaggattcgccactacccagaccttgttttttgttgtattttggaagacaggttttttaaagaaacattttcctcagattaaaagatgatgctattacaactagcattgcctcaaaaactgggaccaaccaaagtgtgtcaaccctgtttccttaaaagaggctatgaatcccaaaggccacatccaagacaggcaataatgagcagagtttacagctcctttaataaaatgtgtcagtaattttaaggtttatagttccctcaacacaattgctaatgcagaatagtgtaaaatgcgcttcaagaatgttgatgatgatgatatagaattgtggctttagtagcacagaggatgccccaacaaactcatggcgttgaaaccacacagttctcattactgttatttattagctgtagcattctctgtctcctctctctcctcctttgaccttctcctcgaccagccatcatgacatttaccatgaatttacttcctcccaagagtttggactgcccgtcagattgttgctgcacatagttgcctttgtatctctgtatgaaataaaaggtcatttgttcatgtttgtgtttttctcagtttcattgttaacagttcctgctaaacaccttgactagagtgagatgtatcagttaaaatcacaacagcagacaaccccttccttttaaaggagaaaacgtaagtccaccatcagatcattgaatgtctcaaagtgacttttaatgtgtgaacgtgtgactttagcctttttaatgaatatgcttaagttatcttcaccataaaaagaagggtgttgcgggaagcaaacattatatgtcacttaattctgattgacgaacggtggaaagtttaaaattgcaacagcatttaaccttttttgaccagcatactgttgttgagcacatagactgtgccccttagggggttcctatgtcacttggaagtcaccagaaaagactaggggatgttgaatgtggaaaaagtaaatcacagcagtaaaaaaagaagaaaaggggctggcgtagtggctcaca

SEQ ID NO: 9803 - DNA, 1207 bp, Homo sapiens
gagacgggatttcaccatgttggccaggctggtttcaaactcctgacctcaggtgatccacccacctcagcctcccaaagtctgagattacaggcgtgagccagcacgccagccttgttatcttgtttcatccataccctgcttttaaaaattgcagatattttaatatgtatctctaatagataaggattttcttagtagcctaaatattgtcatgctgattttggtttttcacaactacttcttcctgcacacatctttccaagattgtgtgtgtctgctctggcctctgactttcacggcagatggtttcctcagggcctggtgatcctcagtgctctgctcatgtttaagaacaggacactgaggggctgtctccttgcggctctacactagagcggagtatgagactgaggcgaagggagtcatggcaggacaagcgtgtagaaagttttttccactctctgactgagtattggttggaaggagcgctgctaaaactgtaaccaaaggaggcattttgcttccagaaaaatctcaaggaaaagtattgcaagcaacagtagtcactgttggatcgggttctaaaggtaaggctggagagattcaaccagttagcgtgaaagttggagataaagttcttctcccagaatatggaggcaccaaagtagttctagatgacaaggattatttcctatttagagatggtgacattcttggaaagtacatagactgaaataagtcactactgaaatggcatcagtgtgaagctgcccattccactgaagttctgaaatctttcatcatgtaaataatttccatatttcttataataaactaatgataactaatgacatccagtgtctccaaaattgtttccttgtactgatataaacatttccaaataaaaatatgtaaatgagaaaaaaaaaaggacactgagaagctggctggcagctctgtgtatgtgggcaggcctgctgagtgtggtcttcattgtagaatgatctagcttggtcatttccttgggaaactcctggtgtcataagttttacattcttctctggccaggcgtggtggctcacacctgtaatctcagcactttgggaggccgaggcgggtggatcacctgaggtcaggagttcgagaccagcctggccaacatggtgaaaccccgtctctactaaaaatacaaaaattagccagg

SEQ ID NO: 9804 - DNA, 1209 bp, Homo sapiens
agcactgtgtcatagtttaattagcagaattttttcttccttaatagtccataaaataacagtatcttaatatagttggcatcttagatccaatgaaatattgtaatgaccaattgtaatattgtaatgggctgggggccgtggctcacgcctgtaatccctgcactttgggaggctgaggtggacggattgcctgaggtcaggagttcgagactagcctggccaacatggtaaaaccccgtctctactaagaatacaaaaattagccaggcgtggtggcgggcgcttgtaatcccggctacttgggaacctgaggcaggagaattggttgaacccaggaggtggaggttgcagtgagccaagatcgtgccactgccctccagcctgggcgacagagcgagactccatctcaaaaaaaaaaaaaaaaaaagtctgcaatgaagagctagtttccttatgaagagattatgttttatgcttctttgaatctggatctagcacactgctatgtctttagttaataaatacttactggtctgagttatttccatgggcagatagcccaacccagaatttcagtagtagagttcctggaaaacaacgtcttcatatagttggccagctgggctatattaccttccatattcttcttcataaaatctcataatcatcaccttctctcttcttcattccctctcctacgataatcggtcattacaatatttcactgactctaagatgccaactatattaagatactgttactttatggactattaaggaagaaaaaattctgctaattaaactatgacacagtgcttttattgaaaaaattgtgttttactgatttagacattgatttttattatccacagctgtgtgcctgtatgaaaaatacatataatcaaattaccgtaggtacttataaaagttcacattcaaagcctgactcttctgagtcactttttgactgagtcgtccatgtctttgtttttccctatgtcatcactaacattctcattagccataaggcatttccagagtgttccactattttccccaggatttaatcgaaatctctgttatcagttctgttttgaaggtggtggtttcttgatgataccagaaggtgtcaacagaaggttgtacatctctcagtaacaaaaatgtagtgcggcctcatctactttgggcatcttctttcttagg

SEQ ID NO: 9805 - DNA, 1151 bp, Homo sapiens
agctggggccccgaggatgacggcaagacagtggatgggccagcccgcctcgccgaggaggccttcttccgtggggttagccaggtgaggtggggatctgtccagcccctgcgggcaggttgggtgctgtcttccgtacctatcttgtgttttttggtttgttttatttattctcatgtttaactttacacaaagcatgtttattgaaacattaagggacagaagaagagtagagtgcatataccacttggacttgcctaattaaaaaacacattttttttagaaatgaggtcttgctgtgttacccaggctggtctcaaactcctggcctcaagcgatcctcccgccttggcctcttggtctgattttttgtgtgcctagatagacatatttggatacatacttgatccaccagggatctcacaggggacaggaggttcccagagaatgaggctccagccttcccagttttccagcagtgtcctcctgccagccctccctcaagtcccaatcttgaatgaccccagcccactctgtccacagggccgaggggggctgggctccatctttgtctgggcctcggggaacgggggccgggaacatgacagctgcaactgcgacggctacaccaacagtatctacacgctgtccatcagcagcgccacgcagtttggcaacgtgccgtggtacagcgaggcctgctcgtccacactggccacgacctacagcagtggcaaccagaatgagaagcagatcgtgagtcttacctgggggtgggggctggggagatggggctgctggctggctctgtccagcaccctcttttggaggctgtctgcctccacccccatgtggctgggtgatagtggctcaggcatcatgcaacatgaactctggggctctgtaggttcttggaggccatggagccatctctgaagactttgaaaagcctagactctctctaaaaacatactttgttcttattcatctccaccctctagttgaacccccttattcctttggaaaatgaggcccaggaggggctcgtcattagcatgtccacggcaagttagcaaggcagcagctgggacctggggttcttggccctggctccccataccatctgtggtgcccagggcctgtatgcagag

SEQ ID NO: 9806 - DNA, 1785 bp, Homo sapiens
gtccccgccacagcagcagccacctcggctgcccccggaggtggaggcggggcaacggctgcgggcagggctgctgccctcacacctgcctgaggtggtggccggcctcagctgcgccttcatcgtgctggtcttcgtcactgtcttcctggtcctgcagctgcgctctggctttagttttcggggggtgaaggtgtacaccatggaccgtggcctcatctcctacaaggggctgccccctgaagcctggcaggaggagtgcccgtctgactcagaagaggacgagggccggggcgagaggaccgcctttatcaaagaccagagcgccctctgatgagcccactgcccaccccctcaagccaatcccctccttgggcactttttaattcaccaaagtatttttttatcttgggactgggtttggaccccagctgggaggcaagaggggtggagactgcttcccatcctaccctcgggcccacctggccacctgaggtgggcccaggaccagctggggcgtggggagggccgtaccccaccctcagcaccccttccatgtggagaaaggagtgaaacctttagggcagcttgccccggccccggccccagccagagttcctgcggagtgaagaggggcagcccttgcttgttgggattcctgacccaggccgcagctcttgcccttccctgtccctctaaagcaataatggtcccatccaggcagtcgggggctggcctaggagatatctgagggaggaggccacctctccaagggcttctgcaccctccaccctgtcccccagctctggtgagtcttggcggcagcagccatcataggaagggaccaaggcaaggcaggtgcctccaggtgtgcacgtggcatgtggcctgtggcctgtgtcccatgacccacccctgtgctccgtgcctccaccaccactggccaccaggctggcgcagccaaggccgaagctctggctgaaccctgtgctggtgtcctgaccaccctcccctctcttgcacccgcctctcccgtcagggcccaagtccctgttttctgagcccgggctgcctgggctgttggcactcacagacctggagcccctgggtgggtggtggggaggggcgctggcccagccggcctctctggcctcccacccgatgctgctttcccctgtggggatctcaggggctgtttgaggatatattttcactttgtgattatttcactttagatgctgatgatttgtttttgtatttttaatgggggtagcagctggactacccacgttctcacacccaccgtccgccctgctcctccctggctgccctggccctgaggtgtgggggctgcagcatgttgctgaggagtgaggaatagttgagccccaagtcctgaagaggcgggccagccaggcgggctcaaggaaagggggtcccagtgggaggggcaggctgacatctgtgtttcaagtggggctcgccatgccgggggttcataggtcactggctctccaagtgccagaggtgggcaggtggtggcactgagcccccccaacactgtgccctggtggagaaagcactgacctgtcatgcccccctcaaacctcctcttctgacgtgccttttgcacccctcccattaggacaatcagtcccctcccatctgggagtccccttttcttttctaccctagccattcctggtacccagccatctgcccaggggtgccccctcctctcccatccccctgccctcgtggccagcccggctggttttgtaagat

SEQ ID NO: 9807 - DNA, 1473 bp, Homo sapiens
catcagggtcactgtggcaacagcaggctctaggggaatcctgtggttatgtagagactccatgtcctggtgtgatgagcaggatcagagtgactctgggaggacaggggtggggacccagagttagcagtggggatggagcagtagaaggaatcactgtttctcctaggagtctgaaggcctcgctgctttctgtgatggctttgcagtaagtgccgcctggcctgcatgcattggctaacaggctgcagaatggcaggaaggactcgctagagattgtcatggccagagatcataggtcacttcaggtagcaagacccctggcaaactgggcacttggcctatgtactgatttgtgggatggtggcaggggtgtggggtccttcaccctgcctgaattctctttggcttctgtgctctgtatgctgctgtccccaagggctctttcttattatggcagggagtggggattggtcctactttctttctctggaaaggaaagcctccaagactccatgtgcttgggcagcttgagaaggcgttcagcaccacgcctagcaggcagaccttgaagcctcacctttagtctatctgcagaggtattcagttcctggcacaggggactaggggcatgtagagtatatgaggaggcagtatggctgtgcaggagccttcatttcagcttcaattaatagggaagaatttatgatagctctatagatgctgaaaaggtatttcgtaagatttaaaatccatcccttattaaaactcttagtaaattaagtctggaaagaaacaccctaatctagataaaggtctgtttcagaaaccaacagtgatggcattctaaagagtcagacgccacaggcattcccattaaagtcagaaactagccaagggcaagctattattcagcagtgtcccggcactactaacccctgcaacaagccagatgaggaacataaggaagaattataattgtcattatttgtagacaataaaactgcctacctgtaaaacctaagaatcaactgaagacctgttaagagtattctgtaagtcaacccaatgatacacatcatgttcctgtccacatactggttttccccaaatcagctgataaattcagtgtaattccaatgagattgaaactttggaattgacagttctaaagtgcatttgggagagtgaatgtgtgagaacactaagaccactctgaacgatgataatgagttggggggtggactgctcgggggtgatcctgccagattcccagaggattctcacgccaccattacctcactcagtgtgacctggagggggtcagacagacgggagagtccagaaacagacccagggctacaggaatttagtatatggtaagagggatgttttaagtggggaaaaaggtggattatttaataaacagcacttttagacaactagctatcaaagctagatctcagctgggtg

SEQ ID NO: 9808 - DNA, 1176 bp, Homo sapiens
ctccagcctgggtgacacagccaaaaaaaaaaccactaagttagatctctacctcacagtgtccatacaaattagttccagagggaagatataccacaaaattactcaaaaatttttatacctctggtgtgggacggtcttttctaaactttaacatgagacttaaaagatataataagggaaaagataagcagatttcgcaaccaaaaaatatcgaaagtctctgtgtgatggaaaacatcaaggttaaaacacaaatgacagatatggaagaaaatatttgcagcacataaaaaaatcaacgagtacaattactttaggagaaaagcttgcttcagggtccttagagaaagtcactggggcctgccaagctgccacctaaagacaagagtgagagggctgagttcttccaggtcatcagagttgttgctgcccgtattaggccacacagtggaaccccatttatatcatagcagaagaaataggattatcaatgtgaactgcttagcatggtgcctggtatatacgagagctccacaaatgtgagctataatcctactagtaaaggatgctaagcagttccactgtggcaggtgtcatttgctagtagaatttgtaatcaaacaataggaggggaatctgtgaacgcctagaaaatgagcagaataaaggatattatctttggaagtcttagatgtgcaatgaaattatttgtctgacagaaacgaatgctgaattctatttacttaagcctttaaaatgacttaaggcagtccgggcacggtggctcatgactgtaatcccagcaccttgggaggccaaggtgggtggaccacctgagctcaggagttggagaccagcctggacaacatggcgaaaccccatctctaccaaaaaaatacaaaaatgagccgggcgtggtggtgtgtgcctgtaatcccagctactcggtaggctgaggcaggagaatcacttgaacctaggaggcagaggttgctgtgagccaagattgcgccattgtactccagcctgggtgacagagcgagactctgtctcaaaaacaaaaaaacaaaaaaaaaaaacataaaatgacttaaggcagcatggctcaaggtgtgattcagaatcaccagaactgccattgaaagtacaggtttctgttctgactagggcttc

SEQ ID NO: 9809 - DNA, 1570 bp, Homo sapiens
ttaaccaaacttagaagggtgggccatgtgtaagagaggcagtatggccactgatgttatttatttttcaacagcgagaactttcaaaggcttccaaatctgatgctacttctggaatcctcaattcaaccaacatccagtcctgagaagccctgatcagtcaaccagctgtggcttcctgtgcctagactggacctaattatatgggggtgactttagtttttcttcagcttaggcgtgcttgaaaccttggccaggttccatgaccatgggcctaacttaaagatgtgaatgagtgttacagttgaaagcccatcataggtttagtggtcctaggagacttggttttgacttatatacatgaaaagtttatggcaagaagtgcaaattttagcatatggggcctgacttctctaccacataattctacttgctgaagcatgatcaaagcttgttttatttcaccactgtaggaaaatgattgactatgcccatccctgggggtaattttggcatgtatacctgtaactagtaattaacatcttttttgtttaggcatgttcaattaatgctgtagctatcatagctttgctcttacctgaagccttgtccccaccacacaggacagccttcctcctgaagagaatgtctttgtgtgtccgaagttgagatggcctgccctactgccaaagaggtgacaggaaggctgggagcagctttgttaaattgtgttcagttctgttacacagtgcattgccctttgttgggggtatgcatgtatgaacacacatgcttgtcggaacgctttctcggcgtttgtcccttggctctcatctcccccattcctgtgcctactttgcctgagttcttctacccccgcagttgccagccacattgggagtctgtttgttccaatgggttgagctgtctttgtcgtggagatctggaactttgcacatgtcactactggggaggtgttcctgctctagcttccacgatgaggcgccctctttacctatcctctcaatcactactcttcttgaagcactattatttattcttccgctgtctgcctgcagcagtactactgtcaacatagtgtaaatggttctcaaaagcttaccagtgtggacttggtgttagccacgctgtttactcatacagtacgtgtcctgtttttaaaatatacaattattcttaaaaataaattaaaatctgtatacttacatttcaaaaagatatagtgtggtgtttcctttttttccccagtcactttttagttggttggtctgtgtgtgaaaaacaaacacaaaaaactaaaaggacctcctggaaatttttagtcaggagtgtgatttttttttttgagtctcactctgtcgcccaggctggagtacagtggcactatcttggttcagtgcaacttccacctcccaggttcaagcgattctcctgcctcagcctcccgatttgctgggattacaggcacgcaccatcacacctggctaatttttgtatttttagtagagacaggctttcaccatgttggccaggctggtcttgaactcct

SEQ ID NO: 9810 - DNA, 1267 bp, Homo sapiens
gaaatttgaggaggctgggtgcggtggctcatgcctgtaatcccagcactttgggaggccgaggcgcatggattgcttgaggtcaggagttcaagaccagcctgatcaacatggtgaacctccgtctctactaaaaataaaaaaattagccgggcatggtggtgagcacctgtaatcccagctactcaagaggctgagacaggagaatctattgaacccggaaggtagaggttgcagtgagccgaaagcacgccattgcactccagcctgggcaacagagcgagactccatctcaaagaaaaaaagaaaaagaaaaaagaaatttgaggagtttggtattggtgttgggagtttttttcctccattgccccaaacttatggactgttttccctcttgtaggaactcctggatatgatgattgctgaagaggaaagcctgaaggaaagactcatcaaaagcatatccgtctgtcagaaagagctgaacactctgtgcagcgagttacatgttgagccatttcaggtccgtggcagcccacagggtctctggtgatctgtctggggcctgagacttagaaagcaacgttgacttgggcctgcagatggaaggcttcctcgtagggatggagctagacgtaagaagtggggaaaacatgctgtgtagttaattaggcccagcagagtaattctcacctctgtagagagttgccctggtaagaggtgaagcaactaatagatgatcaaaaagaagctgctgcttaccatagttttgctttgtagggaatatgaatttttttttataaacgctgagaaaaaggtaggcatagatggtgctgcagtgttctttctctgaaagaaaatgaaaacaggaacaaaagtaactaatgattaaaaggaatactatgaaaacaccaacctttgtgggttttatcatacccagaagctgcataccactgaaccagccaaaatggcttcttcagaagaaatgtctcaaaagctggaatactgggagtgcatagtccatttcagagcatgccatgacatccatctgggtatggagctgagaagtggctatattgtggtccactgcaagtcagggacttgagtgaggacacagcaaggatgaaatgaataacagatggggtcctgaaaatctctgcttagaaccagtaaaaatagtgccaggatcataaaaattaggacagatgtggagcttggaaagacaatgagtacacccataaggttctcaggtccctcttcctgttac

SEQ ID NO: 9811 - DNA, 1261 bp, Homo sapiens
acgaatagacccacaagctcctggaagctgtcgtgtgtccaatgcgtgaaaatgtctgtgacattttcagtgttagtcttgaactaaggcccttgtctgtgtgttttgaaggtgggtgaacctcagagaatgaacctgttatgatttggggtaagaatcacgttggaaaacctctcgcaaccagcacactaggccttctacggccatttctgtaaggggacagagcttaggtaaaggcacacactcatacacacacaacaaagggccctgctaacttactcctcatgctgcttcagtgacctttgttcatgtcacattcctggcgctggaaaaaaaactcaaaggttgattggtttgctttttcaccttggacacatttgcattttacccacaaggcaaacaaaagaatcaggaagtaaaaaatggttgggagtgggacaggtatggtaccgaatttttaatgaacattgtaaatgaagaggcttgaatgacagcccaaatctagagaaggcactcagcaagaccaaccaaaagaaaagctgtgtcgtggtatggggccaccgtgatcagctacctggggcaggatgcttctgagacaggcctttcaactgcttagtgttagtatgtccttgcttatgaaaatggggacactcatcagtacgttaactactaaaggggagatggttctccaaccacttcataaaatatgtatgttctgttgttcctaaggctttgataatatcctgtacagattttggtttagttttgcaaatatattgctaataggtcactcttatagattattgcttggcccttcaaactcagtacacacacactgaggccctttgacctagtgttttatggaactatttgctttgagagaaaaaaaaaagaaagttttttaaactctttgcattttggattttttttcctaagattttaggatgaatgtgaaaaagatgttagaataacaggaagacaactccagggctgagttttatcagcaattgggtataaatttaaagaccgctgttgcaggatggctctgaattctgttgtgtcgtcttttaaaattttaattattctcatatagtaccgaacagaaaactcagtctagttttaatttgccttttgtgctctaaagaagcattgtacatacaacactagatccagcccctcgattatctgtttggtttcaagtgaatgaaaagatttcctggtaagatcattggatttacagaatacaaaaatgtacgggatg

SEQ ID NO: 9812 - DNA, 1162 bp, Homo sapiens
tgcctgtgacatgacccagggatctgctgctggcttctggagacagggccttgggctgacttctcaggttgattgaggcctcctgactagcggtgttcccaggctagaggtgattggctgcaacaaagatgcttctattagtctattagcagtgccttcgggaccctgggattttgctctctctagaaaggtgttttttatttttttattttttatctcccccttttttcctggctttgctccagggtttgtgtatttgcctgtttattgtcctgctctttttttttttggatgaaaactccagcctttcctgactcacctccatcttcggttcttcagttttctgagaagagttgggatatgtgggaaggggcatgggagctcggcagcctccgcctgccaggaaggcagtttcgcctctgcaggaaagagcagagcccgtgggaagccctgggtgagggtggcgcagccggcccagcacgcatggtattgccagccacggggggcctgcgtgtagtctctgctccctgcatttcaccttctttgttgactttccttctctgttttcccccatctgtttgccagaggggtgggactggcaacagaacagccgtggctgctttatctctcctctccacggtgtactcaggcctgagtggtgactcacgggagcctggccacctcgcagctgttcgccccctcaacctttgaactggaactgctggctcacacagggttttcgacaactgcagctgaatctcatggaaaagctggattcctctgccttacgcagaaacacccgggctccatctgccaggtgcttgccactggtcctggcagaaatggcggctgctgaaagtgaccttccaaatccttggtggcacttcagcgccacaggctctccaataaaaaccctttacacacaaaccatgagtaccttgggcttggatgttttctgtggtgccggccagcggggcaccttttgtgaagacagaggtgggtgggcccaaggctgaggaggagggcggggatgggagctgggctggaggtgtttggatcctggtgattagagaaaagcttggaaatgaaaaaggcttggtggtggaggggcatgcatgctgtttttacgtctacatatacaattggaggctcactcgctcat

SEQ ID NO: 9813 - DNA, 1988 bp, Homo sapiens
tggtaaacaaacagagcaatagaaatagtttgggatttattcctgaaagaggagggagtgcttaattaatgtatctacttttatttaacttcttaaatttggtttccttgctcatttttagtgtgagatataataaaatgagtttcaaacatacttactctaattgtgagagattgatcagtgatttttttaaattggtattctataccaggcttggttgtctatagaatcagacttctttcacctttctcattttgtgtgatatttttgtggattcttattctgaattaggtttatagactagatcctgaagagagattcttttgtctcaatgaaatgtctactttctgctttcttgggaggactttgctagtcttagctatataacgtacttctgatgaaagttaaatattgatagccacaggtcagtgagttgggtgtgggtttttaaataaatgtaccttaaaaatctaattcaccctaacatctgcattacatttgtgatgttttattttgagtgacctctgagctgttttgcctttgcttttgttttccatagtgtctcgcactaggttactgagccatgtttgttaaaaccaatcacatagttgtagaaatctttccctcttttacatattaattaacacattctctgtagggtacaagattaacagcaataggaatagtttgccattttccttaattgtggagagaaagagctactgaaatgtctgtgactgtaagctttccttggcctagtgctgttagcagagcactgttggctcatgagtgaacatactcttaaatgagtctaaaatgaatacatcagtagttggtgcctttaaggcacactgactaaatgttgtggcatttttatttgatagtctcaatctgcagtatccagtatggtccccactactcacatgtggcttttaaaattcgcattagttaaaaataaaacttccatttctcagtcacaccagtcacattttaagcgcttggtagtcacatgtggctgatgggtactgtattggacattgtagatacaggacatttacatcgttgcagaaagttattggatattgctgttctggaagtcaagctgagataaatatttcctggctttagagataactcagtgatagcagagagatattaattttcaaatcaaaagaagagggagttccaccaagcaagtgcttaggtttctttgtgtctaaaagctcatattgaataatggtatattgagtagactgttgatccaggagatagtgttgtcccgaagaactgtgaattaaagtctgtaatcatttttcccccctcacacactgaaggcaagtagcgggtctgagagtgggagcccaaaaagaagaggccagaggcagctgaaaaaacagtaagtctttcatgggggaaattattcaatctagtagtttcaaacttgtcagcatttctaggactgccttcgttgtgtctttagtctactccaggtcccttagtctgcttctgtctctcttactagctcgggtgactgtctaccttgacctgttgcaatagcagcagcagcattggaaactcaagattctcagtttaacacatggaaggggtccacgtatactcgagcttttgcttgggataaatctcagcttcttccatcgggttaacccaattagcccattgatttttttcagaaaaatatgtataaataacaagtacacaggtatttggtattgtagtaagcaaggaacaaatgtagatttgctatttttatggcaaaattatattggctgaacatccattttggtaagaaattacatattgttgtttctgtataattttaatgttgcagttcataagccagaaaaatttaatttgtggacttaatgtggagtttctttataacatagatttatatgttgattttttaatttaaaaagttcgatttatatgatatgaaattatttgattttttttgagaaataattttt

SEQ ID NO: 9814 - DNA, 1438 bp, Homo sapiens
gagtcttgctgtgttgcccaggctagagtgcagtggcgcgatcttggatcactgcaacctctgcctcccggattcaagtgattctgctgcctcagcctccagagtagctgggattacaggcgcccaccatgccggctaatttttgtatttttaatcgatacggtcaccatgttggccaggctggtttctaactcctgacctcgtgattcacctgtgtcagcctcccaaagtgctgggattacaggtgtgagcctccgcgcctagccaatatgtttctttttttaaaccaggaagtatttgtgttgaagcttccagcagtctgggaatacttaaatttcatattcttattactgggagacaacatacagggttgacatttttaattttagaaatattgcttctctttttgcctgatgaaatagtagcaaattttttcttccattatggtttttctttttttgtgtggtagtctacttgtttacataataatctgatactaaaaaatgaaaaaaatagaagtgtccttatagttttctatatcttgcttatacaaatcagtataaatatagaatttttattttcaaattgagttagactccctacagttgtttaggagcattcatcagcactttaggaaaaaaaagtaagctttgagcctactgtaaatggcagatctataaaacaacatgcttttggaaccaaaagggtatggtttcttattctagtgacggttatgtgtggcagtttaattctgaagagatcatttctcatttattcagcattattcctcttgcagttacaaagaagatgatgactttgagactgactcagatgatctcattgaaatgactggagaaggagttgatgaacagcaagataatagtgaaactattgaaaaggtcttagattcaagactgggaaagaaaggaggtatgtgtatttggggagcaaattacattttatgtatgcttagtaagacttagattttaggtattttaactctaatgtgatgaattttagtctactgctgtatttgttgtgatatgtagaagtctttctgacccagtgtttcagagctgaggacaaaggtatgtgtacactatgtctttaagattttaaattaagctagtatagataagtgtcaatgttttataaagcagtgatatagcagagatacctgctaattaacattaagcaaatccacctttggttatttgtttcttaagctccttgtgaaaatatcaaactggttaaataaatattgtggtaatattgaagatttttaaatatctaatttagatatctcataactaagttgcattaaagtaaactttctgtaaaggaaataccaaaataatacttaatgctttttcttttggcttttttttttttttctttttttcattctggcttcgattgaggttaagaaagttaaccg

SEQ ID NO: 9815 - DNA, 1264 bp, Homo sapiens
aaaatcatacgagagttgaactgagtcaggtttaggaagcaagtttggttgcatcaattaagcaggctcttttcaattgactgatgctggggccttcagttttattctcagtatagattgccagtattgttaagagtatccaaaggcctttctagatggagacagaataactgacttgaacatacagtgtgcctgtaagtgtccaggctcagagctggtgaaaacccttctgttgggcgtgtgcagggttaaactcctgaagtaacttgtgaggacttcagtgcttgctggtgtcctgggcagcaccatgaatgcctttaccaagacatgccaagttggatcccccgaatgaagcagatgtggctgtggtgtgacccttgctccctgctacacagagcatcgcagggctggcctgtgtggtttccagatgagggtctgggtcccggaagcttgtgttgagagctcagtggacccaccccgcttgctgaaccctcacagttcttggggttgtccagcctggacttgtagcacacatgtcctgaagcaaagctccggtgactgcatgagccacctggccacagtcctcccatggagggcctgccgtgacgctcagtggagagggcagggcctgtgtctccacttaggccacacagtgatgaggaaaccacagatggagcttcttgccgataatactgactctagcccatgattgccttgcccaagccaaagaggaaggttaggttggcttgtcgagcccttgagcgttgggagatggggtgggaaggaggtgagcccctgcagagagttgggtagtgtccttcaggaatgaaaggaggggcaaaggagtcaccagaggtcctgcatttccatcagggtttccacagtcatcagggcttctctcttgagttgctgataggagatgtgagttatgcccagagatgtcttatcgtgaggaaaaagaaacttccttttgttcacatttaggactctcagtgccatatgaagtagcaaaaggcagtatcggccagatcagtgttacattgattctaaaattacagtgtccccattagacaactattttaggtgctggagtatgtttgaagagtgtgctgggaaaaaggaagcatttcttcattgatttaaatcagtatgaatattatatgcctaaataaaaaatttgcacaggtaaattctctcacttgtgaatgggagaagctgccccaggaatctgtgaggatggtattccctggagtctggctttgaa

SEQ ID NO: 9816 - DNA, 1103 bp, Homo sapiens
ttcattgttggtagaaataacaggttgagaaagagggagttagcatcacctaaaacctgcacgtgaacaagggttgacatgatacactatggccttagaaaagggccaggtgaaaccccaagctaatcactgcggtctttcagagccggacagacaggtgccagcagagcccggggctcactctcctttcagtcattcctcagcccttcgaagggaagcccaaacactttgcacgctgtgctgcagacattctggcctggtgtgtctgaaagttgcatcagtcctcacggtgcaaacacagttgatttaggaagtcacacaatgacactgaaatcctacagaccaaaatccacttgtcagcaggagcagcagcccaggcccagcaccagcggtcttccggctcctctgagggctgccacgttgggcgaggggagccatgccaagggtccaggctgctttaggccatctgtgccccactcatctggggacagatggtttttctttattgtaaaattgtggacttttaaaacctgttgactaaacagtaattaatttatatttgtgaaaaatgccactgtcctagtgatttctgatgtaaataatgttgtttatatagtatgtattaaattttcctacattgtaaaactgctgtacttttgattcttgtatattaaaaagtgttactgagcatttttagaattgggctaacacgttgcattgcattgtggtgtgagctctgtgactagagataccgccttgtctaccttccctcgttggttgctgggtcacatccagatgttttgacagcttgtgaagtggagtcttttaaagttgcatttccctccatccagtaccagttgcattgttgcgtaccggccttaacaccacagatacctaagctgttcctgagtatgccgtcgtcgaggtgaacagctccctggccgagcaactccaggctgtggcccacagctctgcacttgagggagggccagggttgccgaaaccggtagttaattcccgtgggttagtcctgcctggggggatccagggagacctaggggggccaccccttctatcctgaaggaaataacactgtgtctgcc

SEQ ID NO: 9817 - DNA, 1172 bp, Homo sapiens
gccaacaggcatagcctcatataaaaaatgggggaaaaaaaacatttattagcccaagaagccaatgggttcaaggtcactcccaacatttttatgccatcaagtatatcagctccaaaagaggcttttcctttgccattggggggtattttgtttgctgtcgtttattttagttctccactgcttcggtgtagaggacctatgctgcctgtaggcttgacctttcctatactttttctgctgtctgaagttgctaaaacatttggccttaataaaaacactaataaaggttttattaatctgtatccgtcattgtctcagcatttgtttatccacttccctttctcacgttctcctcagctggtggcttcatgcgttgagttccccttcaacctccccagctccacttcccacccgaattccctttcaaaactttccatggaatgttctatgcaattctgggcaaaagaggaaagtgaacacaattggtggcttcttccagtcagcacccagacagccactgtgaggaggagaggatttcctctttctcgagtttagtttctggcactgtgattttagaaaaacagagatctgttgccctggattctgtagggagatgacagaaatgattaatgggctgctggcttgatctgaagaaagattagaacagatgaatagaaataggttgtctaatagaggggacttctaaacaggaagggaggcttagaaatggagccacttctccacggccttttctctgagggattcctcactgctgagcttcatgcctcggagcagagcccgcccccacgctggagaatgcaggctgccatgttgtactctcagatctctgaggcccacagcaaggaagatcaaggtggtgttctccttgctggttttccaaagtatgattttgcaaggatccatgggtatatgcgactgtgtgtatagggacatttctcattggacaccattgaaaaaaatgcagagccagttagatacgctatatacctacagcctatcatttggttgtcctgaaagtactggaataaaagtgctcacttaaactcgttttcagttttaatttaaaactctacttccaaaaatttagaccatgtgtatgttgactggccttggtgattctcagaaataccgcagccataacgtggtgg

SEQ ID NO: 9818 - DNA, 2625 bp, Homo sapiens
atggaagtcctgatggttacagagtaagtgaaagggtgcctgcgctgacgtgagagaaaggaatctgtaaacagtggaaacactgtgggagtttcccatggtgaagagtggaacgaaggcgatatgaactgaaggggtgaagacttgattttggagagggcaacaaaacaagggtgtgtgtgcataggagaatggcccactccaaatacgaagtgagatcctgagtctttgggtgcttcatgatttcctaccatattcaggcctaaagacattgaaaaagcatcttttcttgagatcatggtcatatgaggtcctaatgaagtactacagttttcattctttcaagggtagactaaaatatagtttataaatcggcagtacggtattatgaaaccaagaaagggtttcttgaaaagcttgtcggttcaaagaggaaagatgaatttcaatgtgaaaacacgttttgttgagggctgtactttttaccccctttaagtgctttaacaggatatacgtttgattttcctcatatcttatttacctaggagcatgtaagagaaagaagggagagaaaaggttgcatctgcaggatgccttgataactacacagtcccaaataaaaggcctttttctaacctacctctaatggggttatcagatatgtttttaaatctctcgccctgagtactcttcttgggagttgctgctgtttacagccacagtctcatctatcactaaatatgaaactgggccaaggggaaaattcagtaagttagcgttaaatggaagtaaatatatgtatacctaagagaatgtcaaaataaacaccaaaccaaaagaaggtaggagtgccatttttagaaaagacacaactttaattcctgtcaagagacctaggtctactgatggcagtcactgcattgtacattattccagttcttcagtaattctgtttaaactgtgattttctttattgtgttggtgcaatattttattatcatttaacctcaggatattcagaccaacaggattgtgttgctgctgaaagtctgagcagtgttttaccgtccccagcccccctcccacatggtcacatgttcacttgcttttccttccatctgttggttttgtgagctgagagcatctctggacacatggaagggagccagggattcctgtgatacagattttgaaccagcagagtactttggttttcttcatgtcctaagggtttgatccagaaaccctggtgcttcccctgcagaatactgtacttcatttaacagaatgattgatttttctttcaatcagcatgttcaccaaaaatagaaaagttcttctaaggttaaattttgtatttaaaagttagttggccatttgatcagggaattttctacacacattaggcaaatgtatgcttttcatcctctgggcttacctctctcctctgcaatcctggaagcatcgtgcatagttctttcattgtaagccgctatttaaattcccacaatgcaaaactgttagaccagtaattgtgctactgaaattgtcacaaaacgttattccttgatttggtttttaaattttgctttcgtgtgtgtgtctttaaacaggtaatgtgtatttaagtgttgtctaaacagttgatttttactttagaaaagatcatcttcaactgtttattgacttctgagttatatagttcatgccctgccaaggcattgttcgactccatgatactaaaacataatgaaagaaacaaactccagtatggagaagagaaagtttaattatttggttccatctagaaaagcaacaacttaaaggaatccttcactaggattgtcttatcacctttattagataaatcatgaagtgtccctgtgaaattgaagtgaaactatctctgtaggacttaagagaatagctaaaaggtgtgacttgccttattgaaatgatactggcatatctgactgtaagcagtaggttgaagatatcattttatgaatgtggagaattctacattgaaacagaaaatacctgggaatgaagattaaaaatgtagctgctgttatttgcttggttattcccctcttgctcttctttagtttgaaaaaacaaaaacgtggccttggaattttcattttgatgcagaaattttgaaattgaaaatgtgcatgttttggtgcacaaaatccttctgtgggcaaaactttgtttttgttttgcacagtaagaaacaataggcaagcgttatgtttttggtaagttaactatgaaagctttcttatttttattattaaaaatgtaacaatttaacccacaggaaaaaaaattactttgtatgcttgtttgaaccctatgggttcgttttattaataaaattattacactaatgctatgaggtgctagttttttttttcaaatataaattattatagacttaagggaactcaatgccaaaaaaacaaatgttgctgcagttgaaatccttttctctaggtgtgttatcatgagggaggaacagccctagaacctgactttgtttttacagtgggctccggttcccaaggtagtccagtgttagcattccatgaagaaaagtagctgagacaagtgaggaaa

SEQ ID NO: 9819 - DNA, 1227 bp, Homo sapiens
ccaagtccggctgaaagagcttcttaccacatctggcatgtagaatggcagaagactatttttgctagattccttgttgctgcagccgtttctgatgtccttttccccttcacacctttcgtgttacacatgtctgagatgacatgatgctaagtaaccaaagtactgctgcgatggaattgctctgatgtttttttccagagtgaaagctgctattactttaaaaaaaaaaaaacttgaggtttggtttctttccccctctatccgggtgttatacaaatatgtaattaagatgtttgggggttcagatgacaaacaaggagtctacttctaagaatgcatttgcaagccaaaagagtggtgaaccacttcagagtgcgggtctgtgggggatgatgtctgctttgcttcgttttgtggaataatttttaacatttctatttagcattcatgatactctaaatagaagcaggagaacactgtggctctcggatccaggagaggcaggccacgagggctcctgctgtttggggacagtctgtaactctaaatctttttatatgcagcaattatgaccttaaaaatgggtgactctaatactggcattcattgcctaaaaataattttaatgtgcaaatgccagagaccaggtcatctcagaaatggactagaattgaccactgctatgttttggtgaaacctgataaccttgcttttctccgtgtaccttgtttttcattgtaaaactatttaattatgaaaatgagagtgtgaaaggcaaagtatgattgaatttagggggcagttccatatagttgtaacaaactgattatcaaatgtccaccattagtatgttaaaatacggttttctaatactgagacaacagggatggagcagcctatccactgaagtcttgttgtttgtccctgctgtgtcccaacctggaatctctttcttcttccttcagcagacccttcgagatcagcttaagcttcactgccttagagaaactttcctgtctacctggactgtcttctagatttctagagcagtgttcctgcccttttcctttctaaatggggtgggagttctcagagaactcatctcctttatggctttatccatcacagccacacagataggttctgtctggaccatccttttccctgagctttcttctcctttgccatgtgttttcatttctgccagacactggcactggggaa

SEQ ID NO: 9820 - DNA, 1174 bp, Homo sapiens
cctttttcccgacccagcataagaactcttccctctccctactactctcctcctttttacatttgcgttttaatctgttggtgaagatgggtaaaatcctgcttgaccatttcattcagtttctcaatcccctgtggttaatttgtttttttcaaaaatgtgtttttatgtgatgaaaagaaatttttaaaaaccaactgctttctttcctatactagacttccttgctttgttctggtccttctatctgttagtatcctcaaattatcttgaaatcctcagagatctgaaatactagtactgactgtacagttttcttactcaaatctatagcatgtggaaagttgacatcaagccatgccatcgcctcctggtattctctgtgggtttaaggaagcagcatcttatattctttggcttagagttcccccaaagcacgttctgtctaagggcttgtttctgtacctgctttaattacggtttcttctccagtgtacgttcctgatgagtgggaggtggctcgggagaagatcaccatgagccgggaacttgggcaggggtcgtttgggatggtctatgaaggagttgccaagggtgtggtgaaagatgaacctgaaaccagagtggccattaaaacagtgaacgaggccgcaagcatgcgtgagaggattgagtttctcaacgaagcttctgtgatgaaggagttcaattgtcaccatgtggtaagagaaagttcctgaaaagccaaaatgcagcacagggagagggtatcacacaagcctcccagtatgttcttggctgcatgtacccgtgggtttggtgtcttgcctttgccttctggatagttaccccattacctcactgctaccttcagacccctgtgctcagaccaggccgcagcaccacagagacagttccagacaacacaggcatcagcaagggccacctgaccctctgagtctttctctttttgattcctcccaggtgcgattgctgggtgtggtgtcccaaggccagccaacactggtcatcatggaactgatgacacggggcgatctcaaaagttatctccggtctctgaggccagaaatggaggtcagttttcatttccaccggtattgcatgttgcctggcctgctctcttttcctttataatctccctgcaaggaaatgc

SEQ ID NO: 9821 - DNA, 1131 bp, Homo sapiens
gtctttctctcagtgaaggtggggagaagctgaaccggcttccctgccctgcctccccagccccctgcccaacccccaagaatctggtggccatgggccccgaagcagcctggcggacaggcttggagtcaaggggccccatgcctgcttctctcccagccccagctcccccgcccgcccccaaggacacagatgggaaggggtttccagggactcagccccactgttgatgcaggtttgcaaggaaagaaattcaaacaccacaacagcagtaagaagaaaagcagtcaatggattcaagcattctaagctttgttgacattttctctgttcctaggacttcttcatgggtcttacagttctatgttagaccatgaaacatttgcatacacatcgtctttaatgtcacttttataacttttttacggttcagatattcatctatacgtctgtacagaaaaaaaaaagctgctattttttttgttcttgatctttgtggatttaatctatgaaaaccttcaggtccaccctctcccctttctgctcactccaagaaacttcttatgctttgtactagagtgcgtgactttcttcctcttttcccggtaatggatacttctatcacataatttgccatgaactgttggatgcctttttataaatacatcccccatccctgctcccacctgcccctttagttgttttctaacccgtaggctctctgggcacgaggcagaaagcaggccgggcacccatcctgagagggccgcgctcctctccccagcctgccctcacagcattggagcctgttacagtgcaagacatgatacaaactcaggtcagaaaaacaaaggttaaatatttcacacgtctttgttcagtgtttccactcaccgtggttgagaagcctcaccctctctttcccttgcctttgcttaggttgtgacacacatatatatatatttttttaattcttgggtacaacagcagtgttaaccgcagacactaggcatttggattactatttttcttaatggctatttaatccttccatcccacgaaaaacagctgctgagtccaagggagcagcagagcgtggtccggcagggcctgttgtggccctcgccaccc

SEQ ID NO: 9822 - DNA, 1110 bp, Homo sapiens
ccaggctgtccctggctggttgtctttggaacaaactgcttctgtgcagatggaatgaccaacacatttcgtccttaagagagcagtggttcctcaggttctgaggagaggaaggtgtccaggcagcaccatctctgtgcgaatccccagggtaaaggcgtggggcattgggtttgctccccttgctgctgctccatccctgcaggaggctcgcgctgaggcaggaccgtgcggccatggctgctgcattcattgagcacaaaggtgcagctgcagcagcagctggagagcaagagtcacccagcctgtgcgccagaatgcagaggctcctgacctcacagccagtccctgatagaacacacgcaggagcagagtcccctccccctccaggctgccctctcaacttctccctcacctccttccctaggggtagacagagatgtaccaaaccttccggctggaaagcccagtggccggcgccgaggctcgtggcgtcacgccccccccgccagggctgtacctccgtctccctggtcctgctgctcacaggacagacggctcgctcccctcttccagcagctgctcttacaggcactgatgatttcgctgggaagtgtggcgggcagctttgcctaagcgtggatggctcctcggcaattccagcctaagtgaaggcgctcaggagcctcctgctggaacgcgacccatctctcccaggaccccggggatcttaaggtcattgagaaatactgttggatcagggttttgttcttccacactgtaggtgaccccttggaataacggcctctcctctcgtgcacatacctaccggtttccacaactggatttctacagatcattcagctggttataagggttttgtttaaactgtccgagttactgatgtcattttgtttttgttttatgtaggtagcttttaagtagaaaacactaacagtgtagtgcccatcatagcaaatgcttcagaaacacctcaataaaagagaaaacttggcttgtgtgatggtgcagtcactttactggaccaacccacccaccttgactataccaaggcatcatctatccacagttctagcctaacttcatgct

SEQ ID NO: 9823 - DNA, 1126 bp, Homo sapiens
cactgagatcgatgggtgagaaggctaggatgcttgtctagtgttcttagctgtcacgttggctccttccagggtggccagacggtgttggccactcccttctaaaacacaggcgccctcctggtgacagtgacccgccgtggtatgccttggcccattccagcagtcccagttatgcatttcaagtttggggtttgttcttttcgttaatgttcctctgtgttgtcagctgtcttcatttcctgggctaagcagcattgggagatgtggaccagagatccactccttaagaaccagtggcgaaagacactttctttcttcactctgaagtagctggtggtacaaatgagaacttcaagagaggatgttatttagactgaacctctgttgccagagatgctgaagatacagaccttggacaggtcagagggtttcatttttggccttcatcttagatgactggttgcgtcatttggagaagtgagtgctccttgatggtggaatgaccgggtggtgggtacagaaccattgtcacagggatcctggcacagagaagagttacgagcagcagggtgcagggcttggaaggaatgtgggcaaggttttgaacttgattgttcttgaagctatcagaccacatcgaggctcagcagtcatccgtgggcatttggtttcaacaaagaaacctaacatcctactctggaaactgatctcggagttaaggcgaattgttcaagaacacaaactacatcgcactcgtcagttgtcagttctggggcatgactttagcgttttgtttctgcgagaacataacgatcactcatttttatgtcccacgtgtgtgtgtccgcatctttctggtcaacattgttttaactagtcactcattagcgttttcaatagggctcttaagtccagtagattacgggtagtcagttgacgaagatctggtttacaagaactaattaaatgtttcattgcatttttgtaagaacagaataattttataaaatgtttgtagtttataattgccgaaaataatttaaagacactttttttttctctgtgtgtgcaaatgtgtgtttgtgatccattttttttttttttttttaggacacctgtttac

SEQ ID NO: 9824 - DNA, 1210 bp, Homo sapiens
ggccgcggagtgtggacctgtagataggcaccaccgagtttaagatactgggatgagcatgcttcattggattcattttattttacacgtcagtattgttttaaagtttctgtctgtaaagtgtagcatcatatataaaaagagtttcgctagcagcgcattttttttagttcaggctagcttctttcacataatgctgtctcagctgtatttccagtaacacagcatcatcgcactgactgtggcgcactggggaataacagtctgagctagcaccaccctcagccaggctacaacgacagcactggagggtcttccctctcagattcacctggaggccctcagacccccagggtgcacgtctccccaggtcctgggagtggctaccgcaggtagtttctggagagcacgttttcttcattgataagtggaggagaaatgcagcacagctttcaagatactattttaaaaacaccatgaatcagatagggaaagaaagttgattggaatagcaagtttaaacctttgttgtccatctgccaaatgaactagtgattgtcagactggtatggaggtgactgctttgtaaggttttgtcgtttctaatacagacagagatgtgctgattttgttttagctgtaacaggtaatggtttttggatagatgattgactggtgagaatttggtcaaggtgacagcctcctgtctgatgacaggacagactggtggtgaggagtctaagtgggctcagtttgatgtcagtgtctgggctcatgacttgtaaatggaagctgatgtgaacaggtaattaatattatgacccacttctatttactttgggaaatatcttggatcttaattatcatctgcaagtttcaagaagtattctgccaaaagtatttacaagtatggactcatgagctattgttggttgctaaatgtgaatcacgcgggagtgagtgtgcccttcacactgtgacattgtgacattgtgacaagctccatgtcctttaaaatcagtcactctgcacacaagagaaatcaacttcgtggttggatggggccggaacacaaccagtctttttgtatttattgttactgagacaaaacagtactcactgagtgtttttcagtttcctactggtggttttgatattgtttgtttaagatgtatatttagaatgacatcatctaagaagctgattttgc

SEQ ID NO: 9825 - DNA, 1193 bp, Homo sapiens
gtgacagagtgagactctgtctgaaaaaaaaaaaattaaaaaaataaaagatgggaggaaaacatctcatgttttatgctctgtgctacaattctcctctcatttatagcccctaccaagtcttctcataaatgggtctgggcacctgctgggcagcaaaggctggatgggaacggtgtggggggctgaggggcaccacactcaccccaccctctgcttgtctgcagggcccccaaggttgcttcgaagccaaggcaggcatcaaaagccaaagtggccttctgcaccagcatccctcaggacaccctgctggggaaggcccggcccggcacaacagcagactgaggcccccaccctgaaaaagcctaggacattcctgggcactgtcatttagggtgctgtacaaatcacctccgcctagaaaatggaattcaacagtcaggatacagatttccaaggccaactgttggccccaacatgcaacagtgagaccataagcctcccgtgggccacattttgacagtggatgcccttcagggtgatatatgctataaagcagttttctatcacctaagtggtttttcttgccaacaagaatttttacccatcagcactactgtggctgaaaaacttctcttcaacagttcagtgcgccctgtgcaggagtcagcccggcatctgcttgtacacacagctccttgcataggtgtggagttagatctggacagtgaacttcaggaagtcctttcttataggaggctaatagggattgagaataacatgagaagaaaacgctaataaagggaaacctgaacacgctgctgtcagcatgtgttttcaaagtgcagcctgcctcagagttcttcggagcctgaaaaggggtttgagaaagagcccagtaggaggggcaggaggccgacacacctgacttggcctggggcccaggaggcaggtgtaagggagtgaaaagaaaggctagccggaggctgcggggggaagaccgcagactccctgctgcttcgcatccctcctgtggcctccactgcaggcaggacaaacctggatgccacctggagctgcttcctgagttggcacactatcgtgtacacagcagtcttcagccccctggaaggaggccatagtcgtgtgaggatggcaaagtcgaacaggaagctttgagtgccttcctccac

SEQ ID NO: 9826 - DNA, 1218 bp, Homo sapiens
aaagacattctaatttctactccagaaatctgtttagctcatatgaacaagttgcacttacttcattgctattattcataaatctcctattttcttcttagatggatggtaaaatcacacaagtggcaaaaaccaggttccttgaaatgactgtaattgttcttttctcaccctggcaacaaacttgactcatcaagatgcagaagccatagtgacagacttctggttcagactcaccactttgtgtctctttttttctccatgctacccagcccttttctccatttaagaaatgttggcagggtaatttaaaaacactcacctagcttggattatttgcattttcaccaaaaatcctgcacttcagcattcatgtttatgggaatagtcgcagctactgatttcatttggttaaactgttataatattgattcattttgtttatttcagttcataaggatgcaatttatcctaattttgattttggttgtagaggttggcgatttgaaggagctgcagacactagacatttctaccaatcgtttgctaactttacccgagaggcttcacatgtgcctttctctgcagtacctcactgtggaccgaaatcgtctatggtatgtgccgcgccatctctgccagctgcccagcctcaatgagctctccatggctggaaaccgtcttgcatttttgccacttggtaagtgattgtgtttaaagtaaagcagccaaagaataagatggaaagcctttgtttctttgactagaaccaattagttagtttccttccttctgtttatcttgacgattgcttctctaagtttgtttttgcagtgaacaaagcgtcattcctagctaacaaatggaatttatttcagtgagggattttatactttaaaaaagaaatctgtgctaaaactgtgtttagggataaaatatatgagatgatttcctcagagaaaggaattaaagagtgtgtgtgtgtgtgtgtgtgtgtgtgtgtgtgtgtgtaaggtattgaacaatatgaaaagatagctagctacgggtcttaagtattggcttagatgttgacttctccctagaaaaattggtattgggtatcctaataattaatattgccagataaccagattataaaactttaaagaccttaaaattggctgaacttcctgctgagctagaaatgtcagcctggctaaaaaataatatattatc

SEQ ID NO: 9827 - DNA, 1222 bp, Homo sapiens
tcaaagtcctgtatatctttcattgtagatttttaaatactccttttcctaaaaaactcaagggtttaaaaattgctattttatattttaaatgatattgagcagctacctacaatttctatgtacattttgttcccccccccccaccccccccccaaattacgttccttttgacattttcctcatctgctgtttgtgacaagtcatcagccagatttcctgactgacacataggtatgatcagtgcaggagagacctgcgcaccacaggctgcaaactggaggttctgttctcatggcagtttgggcagtaacttttgagagaggccaaaaaaaggaggatgacatgctgtctcctctcttcagtatagacattaggctcttattcagaaaggatttttctttaaaaatgtacttactttactgaactacttacaggcacatttcttcataaggccacacctaatccaaacaagacagtctcccaacactgaagttccaaaataatccttaccactttgtaaaccatttatagctttgaaagtgttaagtgattccttcgttattatttatgcatgttcatgaacttctgctgtacattggaataggagttaacacattcacatttactgtctattttcttgtgtgccttatgagatggcttttctgactgtatctcaatagtctttctttctatgcaggtttataatcagtacaactactgttttctaaaatactactactcaaggctcggagtttgtatttaaattacactgaccaagtaacaatgtattccatttcaggaactgaatatttgactgttaacctttttcccatacgtccagtgtggcatggagcatatggacttgacagacatctctcacccagacgcccacgtgtgaacacacccacatccacatctctgggtggaaaccagcctagagaggggacgacgctaatggtgttgctttagaaccgtcttttcttacccttttagactcgtgttttgtatgagacaccattgcaagaaaattttatccctccagaagtattttattactaaagaacaaaagcaaaaaaagcttaaattgcactggttaaagtacagtttccaacagctgtccttcctcagtactctaatggccactccaccgcgagtggaagtcactgttgtgtgtacacaggtggtcccaatcaaaactccatcttttgagcccaattat

SEQ ID NO: 9828 - DNA, 1110 bp, Homo sapiens
ctcctcatagtcacagagatgtgtgtgctcggcactcctgggcttccgatgctccctctgaaccactgaaagctgtgatgtccaagggggctcacaccatgtgtgcttctagtctgtcttccccccgggcctctcaaagtctggtagattacgacagctctgacgattctgacgtggaatccacagagcagtgtttagctaacagtaaacagacatctttacaccagcaagcaactaaggagattcaggatgcagctgggacaagcagggataaaaaagaatttagccttgagcctccatcaaggcctctggttctgaaagaatttgatactgccttctcctttgattgtgaagtagccccaaatgatgtcgtctctgaagtgggaatattttacagaatagtaaaatgcttccaggaactacaagatgccatctgccgtttgcaaaagaaaaatcttttcccatataatccaactgcacttttgaagttgttaaaatacatagaggtgataagtaataaaactatgaacactttgtaaaacattgacattttattttccaggtattgtttttccttaatataaattatgtctcaatgaggtaatagtataaaatcatcaccataaaagggttttcttttttttttttttttttgagacagaatctcattctgtcgctcaggccggagtgcagtggcgtgactcgactcactgcaacctccacctcctgggttcaagcaattctcctgcctcagtctcccgagtagctggaattacaggtgcccgccaccacgcccagctaatttttgtatttttagtagagacgggggtttcaccatgttgccaggctggtctcaaactcctgacctcaagtgatccgcctgtccgccctcccgaagtgctgggattacaggcatgagccactgtgcccggctgggttttctagacaagttcttactttttgccttattggaagcaacctagtgactgaaaaagagacatcaagtgacaagtcactcattatagctatataccactggagatttatggcagttctaagtgacacaaaatcgggggtggtgattgcgttcctcagctagggctgccgtaa

SEQ ID NO: 9829 - DNA, 1224 bp, Homo sapiens
acataatgaatagggagaacagatattttcagaaaaatcaaccgattgttttttccagaaacagaacagaaaatgttcagaatattttcaaatttgtcagattcttttatgtttcctttgaaatttattatttaagcctattactaaacctttataaaaatatatttggcaaatacaccaaagaaaccagcttacaaaagattatgatcattaatgaactgcaaacctcatctttcgaaaacaaggttttgtgtttttttttttttgtaaatatttgtgtttataaatgtacagcagagtaagagtgttttttagattatttaattcccatatttctaaactatttactacacagtaatccatgcctgttagtttggaggacttgactgtctcattttttaattcattgtcagtcatgcttggaacagcatttccactagagaatccagcgttctggcagtagcaagagtacacatctggagcatgagggactctagcatgactcgtcagatgcacaccccaagagacaagaatgtgtagtttaatgaccggcgtggaccatacgaaattgagattctaactttcctgcaggagtgctcatgagcccagaatgtgattgggataaggccatttgcccacaaatttagctttcatgtaactcctagtgtgttatatcataatgtattttgttcttcctttttaatgtaagttttgctttgggtcaatttgaattaaaaaaatcaaatctgatttaaaacatgttggagttgtattttatttccagtctaccttaagtttttaatatgtccagctatttggtgaaaataaataaaactctatccttccttcatcagcattttagatcgctgggagttgtttaagaatatgatgatgtggaaaacaataccactctccattgtcaccagataagccatttcttaccctcctttaatttgttcaatgcattctgcaaatacccaccaacaaaagatgatcacagtgttgagtgtatcgacccagcactgggccttcttgggccgtaatcgccacctgccccgtgcgtgccacaccttgactcacgacagggtttagaccacagcgcttctaaacgtaggacagcatgcagtcaaagcaatgcatctgacggagttaccctgcaggagatgaagcaaaacaactttgatttcacatttcctctataaaacataagcacagcttgattca

SEQ ID NO: 9830 - DNA, 1735 bp, Homo sapiens
tccacagattctaccttttgtgttttgttttttttttttacaattgttttaaagccatttcatgttccagttgtaagataaggaaatgtgataatagctgtttcatcattgtcttcaggagagctttccagagttgatcatttcctctcatggtactctgctcagcatggccacgtaggttttttgtttgttttgttttgttctttttttgagacggagtctcactctgttacccaggctggaatgcagtggcgcaatcttggctcactttaacctccacttccctggttcaagcaattcccctgcctttgcctcccgagtagctgggattacaggcacacaccaccacgcccagctagtttttttgtatttttagtagagacggggtttcaccatgcaagcccagctggccacgtaggttttaaagcaaggggcgtgaagaaggcacagtgaggtatgtggctgttctcgtggtagttcattcggcctaaatagacctggcattaaatttcaagaaggatttggcattttctcttcttgacccttctctttaaagggtaaaatattaatgtttagaatgacaaagatgaattattacaataaatctgatgtacacagactgaaacatacacacatacaccctaatcaaaacgttggggaaaaatgtatttggttttgttcctttcatcctgtctgtgttatgtgggtggagatggttttcattctttcattactgttttgttttatcctttgtatctgaaatacctttaatttatttaatatctgttgttcagagctctgccatttcttgagtacctgttagttagtattatttatgtgtatcgggagtgtgtttagtctgttttatttgcagtaaaccgatctccaaagatttccttttggaaacgctttttcccctccttaatttttatattccttactgttttactaaatattaagtgttctttgacaattttggtgctcatgtgttttggggacaaaagtgaaatgaatctgtcattataccagaaagttaaattctcagatcaaatgtgccttaataaatttgttttcatttagatttcaaacagtgatagacttgccattttaatacacgtcattggagggctgcgtatttgtaaatagcctgatgctcatttggaaaaataaaccagtgaacaatatttttctattgtacttttcgaaccattttgtctcattattcctgttttagctgaagaattgtattacatttggagagtaaaaaacttaaacacgattcataaagtttttcaagttatttgagggaaatgcttctgtggaccgcagcttgggagtgaaacgaaacccggtttcaagtgcttccttccgttttttcctcagatgagctcgtccttgttcctcatcaactcgctgaccccacgttcttcaaaacaaaggtcttcaaaccgggcctgggccgcgtctggctcctggatagaaatgtcccctcccaggccccatagaacctgcattttaacaactgcctggcgtggggctgtggcacaacttggggttccaggatcaatctagttagaggataaatcagcacagttgcaatataacccaagagtcaaaagaagtgagatctttgatgccaaggtagcaagctcgtgtgggcaagcattgcccccgggataggtatatttacagtgtaatgacagttaagtcccagcataatgacattgcgctcaca

SEQ ID NO: 9831 - DNA, 1161 bp, Homo sapiens
cacttcttcattttttgttggggttcttttgaaagttaatttagactttgcaatacgcggtaacctgggctttcgttaagaggaaccaagcaggccaagtagctttttatcattccattgaacacggcgatacaagatgagcagataacgtgaattcctgaaaatcagcttggaataaactgttctctaactgatatttattttaattccagaacatggtccaagacaattcctgggaaagttcagttcttctcaagtgagggttctgacacatctgtaccaattccagtagtgccactacggggtgtggacgactcctacccgccccagaagaagtccttcatgatgctcaagtacatgcacgaccactacttggacaagtatgaatggtttatgagagcagatgatgacgtgtacatcaaaggagaccgtctggagaacttcctgaggagtttgaacagcagcgagcccctctttcttgggcagacaggcctgggcaccacggaagaaatgggaaaactggccctggagcctggtgagaacttctgcatgggggggcctggcgtgatcatgagccgggaggtgcttcggagaatggtgccgcacattggcaagtgtctccgggagatgtacaccacccatgaggacgtggaggtgggaaggtgtgtccggaggtttgcaggggtgcagtgtgtctggtcttatgaggtaagaacagaattctttaccatgggaaaaacttaattttgtcaattttgtcattagttctgagcgtatcataggaaactagagatgatatcctctttgagggttgaagttggtattattctacatttttagccttagattaaaaaaaaaattcagttcccctttattaccttttcttggctttgagcgcatatcttctgtactttttctccccccagagagagtcttgctctgtctcccaggctggagtgcagtggcgccatctcggctcactttaacctccgcctcctgggttcaagcaattctcctgcctcagcctcccgagtagctaggattataggcaggcgccaccacgctaggctaatttctgtattcttagtagagacgaggtttcaccatgctggccaggctggtctcgaactcttgaccttgtgatctgcctgcctcagcctc

SEQ ID NO: 9832 - DNA, 1410 bp, Homo sapiens
gacaagtttgactcttgattttttttaatctgttttctgtagcgtgaacagcccttatttgaatgtatgagttttagtaagcactgtgataggaggattcatatacttaaatcaggccctcttgagagagttttttggtgacccttttgcatgtgtttcggaggttgggacaaagaagctgaatgacttttttccccaccagacaatcagttcaaatggcaatcacaatataaaggtttttttttttttcacatagctaaaaggtttttttaaatgtcccttaggatctgtatctttgcagtgctttgcgtgtcactctcataattttattgtggatatacaatgttcccagattttcagatttttatcaatactgttgtgctgcttttctgtcctcccaggttataacccgttgtctggtgaaggaggcggagcttgctcctggagacctggacgcagaggcccgtcatctggcggatgaggctaagaatcttgttagtgtcacttttgacattagcaagatgaacccttaaccctcgattcaattgccttacgcacgcttttcacagtgactagccaaggggaggtggggttgatttctgttcctaactacacctgcatatgtcagggctccagtcagcaaaaggtatagatgttgcctctaggcatgaggtcattggtcacattctacttggagacagtgattgcattcattgatttcatggttaattgctagttggtaggtaaaggcctctagatgattagcaatcttgataaaagaggcctagtaatgttcttttgaggttagaaatccttgctgctaggacagtctctgtgacaggttgcgttgaatgatgtcttccttatcaatggtgagcccaccagtgaggattactgatgtggacagttgatggggtttgtttctgtatatttatttttatgtacagaactttgtaaaaacgaaactatttaaaaaacaagaataacatttttagcatctttattcaaggagatttatggacttcaatttgtctatcaaacattaaatagctttttattacaacctctaactattacttatttctctatttattattactcacccaaaataagtctggcaagtggcagacagctgccgtgattttgaaagttgacagactccttggggttcatccacaaaattgggtgcttggagtcgagttgccgaattactgggataaagaaacatcgtgcctcaaggttcctcataggctgaccaggtttctacgtgacctctcagttattcccttacgccatgactcatcttttacgctcttgtccagaggcactatcagcagttttggataaagagccaaacagtaaatattttagactttacaggccacatatgatctctgtcacatagtctta

SEQ ID NO: 9833 - DNA, 1254 bp, Homo sapiens
tgttggcatatttccctaatttagagacaataaagtcattgaactgttgccagtatatggcatgtagtaggtgcccagatgtttttgagtatttccggtttctttgcctacggtagtgccatgaaaagcacatgagtataggctttaccttcaccaaaaatgaattattatcaactacaatgggaggcaacaattttgaaatctttgtgacccttttcctttgaaattgagcatcccttccagtacctgccaaagacagactagaccgtccctggacgataagctcctcaaaggcaggtgctgcttttgatctttttgtacctacttcagtgtgtaacaaacagtggccacagaacaaacacttgcatgctaagggaatggattctctaaaattgatactacttttgctttggtggttttctttagggcccactgatgatggtgaagaagagatggaagaagacacagtcacaaacgggtcctgagcagtgaggcagatgtataataataggccctcttggaacaagtcttgcttttcgaacatggtataatagccttgtttgtgttagcaaagtggaatctatcagcattgttgaaatgcttaagactgctgctgataattttgtaatataagttttgaaatctaaatgtcaattttctacaaattataaaaataaactccactcactatgctaccaagttgtgtgtcatcatggtgcatttgcagtgaggtctaaggacacgttgaaattggaaatgcaggagggcagcgttttctcggtaggcttcctgggctggattagcgtctggctcctgcagtgtcatgacacatgccaggaaggccgccttttccactcccacatagcccttctgttagtgcagacttacctgtcgctccggcttctgataggacaactgaaatgattccatttttgaaattgattggtgtgtcccaccaaacctggctatgttttttgtttttttctcccccgcccccaggctggtctccaactctggcttcaagtgatcctcccgccttggcctcccaagggagtacaggcctgagccaccatacccagcctttagttttatatatgtacatagttaacataaaggtcatatggagagtctacaagaacatttgttgaaaggggcgtaagttactcatatttgaagaacactactgtttcattgccatctctctgatcccccttagccacgacagtcttaatcccatcttgttgcatatacttt

SEQ ID NO: 9834 - DNA, 2048 bp, Homo sapiens
agctcctgacctcaggtgatccacccacctcggcctcccaaagtgctgggattacaggcatgaggcaccgcgcccggccttgaaacaatcttcacaggcaccgaagactgacctttccctcttttgcctttcctgatgcggggccccagctgacgagacattctgcgagatggtgaagtccaaccggctgtgcgaacggaagctcttcattcagttctgctgccgcacgtgcctcctggccgggtaagggtgcctagctgcccacagagggcaggcactcccatccatccatccgtccaccttcctccagactgtcggccagagtctgtttcaggagcggcgccctgcacctgacagctttatctccccaggagcagcatctctgagcacccaagccaggtgggtggtggctcttaaggaggtgttcctaaaatggtgatatcctctcaaatgctgcttgttggctccagtcttccgacaaactaacaggaacaaaatgaattctgggaatccacagctctggctttggagcagcttctgggaccataagtttactgaatcttcaagaccaaagcagaaaagaaaggcgcttggcatcacacatcactcttctccccgtgcttttctgcggctgtgtagtaaatctccccggcccagctggcgaaccctgggccatcctcacatgtgacaaagggccagcagtctacctgctcgttgcctgccactgagcagtctggggacggtttggtcagactataaataagataggtttgagggcataaaatgtatgaccactggggccggagtatctatttctacatagtcagctacttctgaaactgcagcagtggcttagaaagtccaattccaaagccagaccagaagattctatcccccgcagcgctctcctttgagcaagccgagctctccttgttaccgtgttctgtctgtgtcttcaggagtctcatggcctgaacgaccacctcgacctgatgcagagccttctgaggagaggcaacaggaggcattctgtggccagccaaaaggtaccccgatggccaagcaattcctctgaacaaaatgtaaagccagccatgcattgttaatcatccatcacttcccattttatggaattgcttttaaaatacatttggcctctgcccttcagaagactcgtttttaaggtggaaactcctgtgtctgtgtatattacaagcctacatgacacagttggatttattctgccaaacctgtgtaggcattttataagctacatgttctaatttttaccgatgttaattattttgacaaatatttcatatattttcattgaaatgcacagatctgcttgatcaattcccttgaatagggaagtaacatttgccttaaattttttcgacctcgtctttctccatattgtcctgctcccctgtttgacgacagtgcatttgccttgtcacctgtgagctggagagaacccagatgttgtttattgaatctacaactctgaaagagaaatcaatgaagcaagtacaatgttaaccctaaattaataaaagagttaacatcccatggcacaggagcctgtatttctttccacggcacacaaaatgaaacatgagtgctgaccaagtgttaagtggacgttactttaactgtggtttcagatctgtttgatgtcattacgtggaaggtcttcttttgagctttagcaaatgttgatgtaaggaagcaatggaggaaatcccagatcccaaccccagaatgtcactgggcaaagagaccccttcagaccacgttagcctcactgggaggaggttctagagcctctccagatgtaggggccccttccatctgtcacgggggagctccccagagcccagactgcctcttcaccggttgctgccaagtgtgattgaattaggttacagcttgtcttctatgcagtggctgaaatccctgaacccatggctgatgcactccttgggatgtttaccatggcctctctgtgaagtcagaagcttgtacttgctaggaatcctttggct

SEQ ID NO: 9835 - DNA, 1128 bp, Homo sapiens
tggagatctgggaaggtggtggaggggaagggaggggctgcctcgtgttggataagggccctcccaccagaggtcaggcctgctgttccctgtctagtagaaggctgcatggaggtgctcctgtgccccacaccgttctgctcacctatcttgtaccccgtcctccagatgggaaaccagatgtctctctggattcctcccaccagcctctgcatgcaccgaccacagccctgtccgaccagcctctgggtctttctcccctgccacccagcccatggccacagccgaggccgggcctgctcactcatactctcactggtggtgagtgtcctggtgactgcctcactggcttccctgcctcccttccaggccatttcccacacggccatccgtaggattcttcagagccccactgctctgtgctcacccagaacccttcacttttaccacacgcatcttcatgaagtccgggcctttgacattcaggacactttccatatgctttttctttcttctgcacctatctgttgctgtcgttttaacctgggggccccttccttgtgtggtctacccgggccctgcccttctttggcattagccaaagtgctgcttcctgacctgcctgcagccctgtcctctccgagctccacggaggggctcggccatggcgtgcggggtgtctctctccccgctagaccctctggaccacagcgtctcatagtctgcgtctttacgtgactcattttgcttcctgaggccctagtgcagttcctggcactgagaaggtttagtgaatgagaaattgttagaattttttatatcaggacctgtgatgtcctgattccattcaccaaaggcaaatcatccttaagcgtgagtatggagaaaatgctgaccttgttatcttcacttctgctgagctctagcaggtttgtgagcagcaaatatttgtgatgtttctgtatagtcaaatatcgcttatgctttccaccctttgacatctcttggtaccttgcttttgggttctgtgtttcctgggactgagtcttgctgagtgattccagtgtcacctgcagggactctgctctcaaggccaaggcagatgttcagtcatctgtgccacgtggc

SEQ ID NO: 9836 - DNA, 1152 bp, Homo sapiens
gtgaattcagatgaaaagaacacgggattggaaatggagagatttgggttctagttccagttttgccacagacttcctctgtgattttgcaaaaccctactgtaagttttttttcaacttacaaaatgatagtcttttttttaagcccttaatgtatacccagaattttctatacattatttgtatatgagcacctttagttttcacggccacgtgggaggcaggaatgaagtaatgttttacaagtgtggtgctcaccaggtcccacagctggccgtgggcagaattctgctttaattgcaggtgtctctgactccagtcccatgcttcttcccttccagtgcagtgtctacttgctaatgatcacgtctcttaaccttagaagattgttctctgttattcgaatcagtattataggagaataagcttctctcttgcctctcacagaaagtactgaaatcccaccttatgtgatgaagtgtccgagcaatggtttgtgtagcaggcttcctgcagactgtatagactgcacaacaaatttctcctgtacctatgggaagcctgtcacttttgactgtgcagtgaaaccatctgttacctgtgttgtaagtactgcagcttacttattctaaataaattcattgtaaactttaagttagaagaacaattcagacttgattattgggaagaaattctgaagaatttttatattcttttatgatttcccttttgagtatgtaagcagaaataaattaaaaaacccaatagacctttccatatcagctcactactgttttagttataatgataactgtcaagccagttgatgtctgctggaaatgcacttgacagaaatgttgctttgtaggactggagaagatctcagtctactagcatatctgaagcaagtctaattcgttcagatggattctgtgttctcaatagtgacagctagtgtacagagggggtggcagtgtctttctgccatagatgagcttttgaagggccagtgcttatctgtggtgagaagatggattcagtaaatgccggaatgcctggtagctctctagaacaaaattaagtggaacgcctgtcttatccagaataaattccagatagtccaaagatgtaatgtgaaaaatgaaaccctga

SEQ ID NO: 9837 - DNA, 1155 bp, Homo sapiens
taggcagaggggtctggacacagtgaggtgcagccccctcccaccaggtcagacccaggagatggtgcaggtgcacagagcaggtccctggcccaggcaggaaggcagctgcaccctccctgcagcacaggatgtctggatgtgtactagggcagagaggacaggagcctagggaggctccacttccaaactgtccgtcccacaggggacggggcttgcgtcttgctgcgagcactggagcccctggaaggtctggagaccatgcgtcagcttcgcagcaccctccggaaaggcaccgccagccgtgtcctcaaggaccgcgagctctgcagtggcccctccaagctgtgccaggccctggccatcaacaagagctttgaccagagggacctggcacaggatgaagctgtatggctggagcgtggtcccctggagcccagtgagccggctgtagtggcagcagcccgggtgggcgtcggccatgcaggggagtgggcccggaaacccctccgcttctatgtccggggcagcccctgggtcagtgtggtcgacagagtggctgagcaggacacacaggcctgagcaaagggcctgcccagacaagattttttaattgtttaaaaaccgaataaatgttttatttctagaaaactgtgccttagccagagctcctctaggtgatcaacccatgtctggagctagctcttcctccaggacacgagagctgggggcctgagtacgtagcgccaggcccggtgtggatgctggggagaatcatcagtgtgggagccgaaagcccccgagggtggggtcctgcacagtgggccatgcctccaccagcaagatgtgcacaggtgacagggcttctccagcctagcagggccagcccaggccctcgtgccccagatggtcaggaccaggtcacagcttggctatgagcctgtttgcggcttctgtggactgtggtgaggactgggccaggaaaggctcagggtagcctgggaggaagaagcgcatggcagacagaggtgctggggagggggccacagggcacttcacaaatagaaggctgtcagagagacagggacaggccacacaagtgtttctgcacattcttcagggtggccacagactggggggtccaaggagcaggtg

SEQ ID NO: 9838 - DNA, 1102 bp, Homo sapiens
cctgggccactcagccctgcagggccctgcgtgcagccagccttggaggctcccgagtgagcactgggcggtgagcagagggggcctgaccccaagagcctggcagagcctggcgggtggttcccaccgtccacaagccactgtgcaaacaccccatgactgcagatgtggtgctgagggagggccccagttggggtcacctccatgacggggctcagcccttgggaagcagacaccccacacccgtccacttcccccctgcaactcctgagaggctggggcaggtactcccagggggatgtggggtgctcccagcaggcagtgaactcaccccccatggctgcccacttcacccacatgtggtcattgcactgttcactgttgccctgggagggggcgcacatgcagtgggggccgtggggcatggacaggaggctcctcgggatggggtgtggacacgccgtcccctgccacaggcctccttcccatctgcggtgctgcctgctcactgccctcctcacctccgtcctgcagatactacttcaagaaagtgagcgacgagtttgactgtggggtggtgtttgaggaggttcgagaggacgaggccgtcctgcccgtctttgaggagaagatcatcggcaaagtggagaaggtggactgataggctggtgggctggccgctgtgccaggcgaggcccttggcgggcacgggtgtcacggccaggcagatgacctcgtactcaggagcccgatggggaacagtgttgggtgtaccacccatccctgtggtctacccgtgtctagaggcaggtagggggtccctccaagtggtccacaagcttctgtcctgcccccaaggaggcagcctggaccactcctcatagcaatacttggagggcccagcccaagtgaggcagccgaggtccctgctgccagcttcaggtgacccccccccatcccccggcacctcccttgggcacgtgtgctgggatctactttccctctgggatttgcccacgtacccaggtctgggtggggcccaggcccggatgcagaggcctgcagggcctctgtcaattgtacgcgccaccgagtgccttca

SEQ ID NO: 9839 - DNA, 1377 bp, Homo sapiens
cctgaggcctgggcctgaggaccagtggccttgagccccctcgaagcagcccacccttgtcgttctgctgcccagacctgggcaggcccccagtaaccaccgtatctgggccctgggagctgcagccgcggccccacctgcactgatacctgcgtggctgttttctccaggcttaccgctgcgggcaccggcgccagtgctaccccacctcgtggcagcgctgggccttctacctcctgcccggcgtctctatggcctctgtgggcatcgccatctacacctccatgatgactagcgacaactactactacacccacagcatctggcacatcctgctggccgggagcgcagccttgctgctgccgccacctgaccagcccgccgagccctgggcctgctcgcagaaattcccctgccactatcagatctgcaagaacgatcgggaggaactgtacgcagtgacgtgacactggcctggggacagctgctgctctgatgacctcttcagccaggagctgtatcgagggggaggcgcctggtccagccctggacagattgatttccagctgaataaattggcctagataccctcttacttcctcctactgaggagagggccacccctccctcacacgcacctctcctcgccagctgcctgctcgctgctgagatccctctgcagatcccagctgctgtctgcagtggcccctggggcctgggcttggttacttggagaccacaggtgcctgtgcgagggtggggctgtgtgctctgctggcctgtgggtggctagagatggggagaaggactccctatggtcctgttccctggcgaggctgtggtgagacccatggcgcccaggagccctgagcccaccactggggccgggagctgtggactccgagacccctgctcctggcccctgtgtggccctgatgccagcctgcctggggcatggaggatccccctctgctgctgtggtcaccatagggacgggagacggaggtttcccccagagctgatgggcactggggatgcaggctcccgccccgcccctccctttttcctggctctggagccttgggtccctgagaagagcttccttggactggggtgctctgctgctctgggggtttggcccagaaggaacccctacccagccctgtccacccaccccagcgttcctgggcccccctctgggagcttcctcttggtcccaggagctgcggtggtgtctgccccctgcactgggctctgtgccctgtgggtgttcaggagactggactgtctctgctcctcatgcaaaccttgtgggggaagcaatgaccaggagcagcacctggcccctccctgaggcctgtgagtgtctcggatccg

SEQ ID NO: 9840 - DNA, 1148 bp, Homo sapiens
caaagcctcctccccactcccccattccccaccaacaatccgtctgcctggcacaggcaccaggtatccccggggggtggtactgcctcctgaccttggaccccgcccgccgtgcctaccctgcttgctcctgggtgaggaaggggcttctctgcagggtcctgggtgaggggtgggccctgaggttcagcagtgcccccagcctccgcgtcggggttttgtgaccgcaggctggcgtgggtggagctgcacggacaacagcacagcccagacggtggcccagcagagggcggccacactgctgctcacgctcagcaacctcatgttcctggcccccatcgccgtctcagtgcggcgattcttcctggtggaggcctccgtctacgcctacaccatgttcttctccacggtaggctggcccctcctgcagggatgtggggtgggagggcaggaccgcgctcatggagcctccccacagttctaccacgcctgcgaccagcccggggaggcggtgctgtgcatcctcagctacgacacgctgcagtactgcgacttcttgggctccggggcggccatctgggtcaccatcctgtgcatggcacggctcaagacagtcctgaaatacgtgagtggccctcgacgtggggtgtgggctccgggggagcagggcccccaagtgcagcctgcgaaaggcagtaccgtgggagaggccggacctggcgttgggcacggcccctggaaacctcacatctcggccgagcatggtggctcacacctgtaatccctaggccgagcatggtggctcacacctgtaatgccttggccgagcatggtggctcacacctgtaatcccaacacttgcaggaggatcccatgaggccaggggttcaagagcagcctgggctgtacaaaaaatcgaaaagttagccgagcgtagtggtacatgcctgtggtcccagccactcgggagactaaggtgggaggatcgcttgatcccaggcattggaggcgttggagtgagccgaggtcacagcactgcactccagcctgggtgacaaaagaaaagaaaagaaacctcatgtcttctgtgatgccacacggagatgcgggtctgagaccccgcaggcagttgtgagggggcagtgcca

SEQ ID NO: 9841 - DNA, 1187 bp, Homo sapiens
taaggtctggaaggggccgccatccccagatgtctgctctatgttagctctgaggtagcgagacccagtgaggagcctggcttctcagagccgggtctgggcagctccccaaggtgagtcgaaggtgagggatgggtctgactccaattcctaaagaccatttcttcattttccagcttcgtatagatctgttggcttcctgctgtgaaagatggcaacatacacttttatcttcctcccctgccagttcttaccgaaataaacatgcagggttaaggcccttcccagggagccactcagtgtggctgccgggtggcctctgctgccgtcagagtctgcctttgtgtctttatctgctttgccttcctagtccccgtcctgcttcgtggcccggcatctggcagggctgggagacgcctctccagcttcctctggagcatcccctctggagcctcctctctgccctgttgtgccgggcgttctccaggcctcgtggctgtggtcctggacaggtctccccacactggtgggttcctttgtttcgggggttggatcctctagctccctggccccgtcttccttctcatttgttttctctggtttttgtccagcgtatcttcctgtagcttcttgagaaaagaggtgctcaggagataaacttgagcttgggttggtttgtactgtgagagtgggatcattttcctgtaagatttttgacggcattgcttatcttctagagctaaagttgttaccatgaagtttaacctttctgactcggtttctttgggaccagcctgagcaacttagtgaaaccctgtctctacaaaaaaaaaaaaaaaattaaaaattaaaaattaaaaaaaaaaaaggaaaataggcaaggtctagctgcgttgcccaggctgtagtgcagtgagtggcaattcataggtgcaagcatagctcacaacagccccagactccctgggcttaagtaatctttccacctcagcctcccaaaattctcggattacagaggtaagccaccacacccagccaagaacagaaaccttttgttttccattttcttttattttgagacattgtcttgctctgtcacctgggctgaagtaccgtggtgcaatcacagctcactgcagcctggacctctcaggctcactccatcctcccacctcctcctcctgagg

SEQ ID NO: 9842 - DNA, 1145 bp, Homo sapiens
ggtggagaggagagggagaaagggaagtcccagggcccggggtccacagaggatgagggttgtggcagggccgtccatcagcgctgaccttccgggggcccagagcttcccagccctgagtcaagctggccatgaacgcgtacacttcagttcagcaggatgggctggagagcctctctgtgcagcggtgtggggtgagccctgctgtggcctccttgtggtggtccctcttcccacgtgcagccctgttgggaagaaaggaagaaaacaggtccctccaggggtgctgctgcctaagccacccacataagtacgctggtgccgtgtcacccatgttgagccgctcctgatggctgacgggctcccagaccctcacctcggacatggtggtgggggaaggacgggtgggcaaggctggtgcgttccccagctctccctacgctgctcgggccattgcccagccagatgtggtcacctcagtccagctctggggcctccaggccatgtggctgttcccacggcccagtcctcgctgcagtaacccctgggggctctgaccacctatgggggccgggcaggagcctctggggcctccactccgacatcaggacctgagatgaccgctgtgtggcgctctctccctgggcagggtggatgccacaggcccctctggctcccaggtgctgcttctccacaggtgcggcctggcccggcctcctaaaggccacaccctccccacgcacttcccaggccagaatccaaacatcgggaaccctgttttcttctgggtgtgtctcacttagaaatcgtggttcttccccgagggtgcatgttgcaggagggagagggcagggaagactcacagcagagcaggagggggcctgtgcttctcggggtctgcaccccaggcacagcggtgtcaccccgcaggaccgcgggcctgccccaacccccagcattcccgggtgggcccagaccccatcaccaagactggccacccgctgcgtgtgtgtgcgcgcgcgtgtacgtgtggccccacatccgccgccttccacgctaggatgtaagaggtcgcctcctattgtacatttggggaaagccttgggtgtaaatcagtgtaaacttggaggagagatttttctatc

SEQ ID NO: 9843 - DNA, 1135 bp, Homo sapiens
gggcttcctattataggcctcagggatgggcccccgggggccgggctgcaagaggacggtgacggagcagctggcacctgctggggtcaccggcctgtggttgcggtaggcgctgagccacggaggtgtgggccgtggtaggctcagggccccgtcctcccgccacctgcaggtacttcgactccgtggacatctgtaaggtgcactcggactggcaggaggcgcgggtgcagggctgctttcccagctcggccagcgcgcccgtgggggtaacagcgctcacggtgctggagcgggcctcgctggagttcgcgctcttccaggagggcagcaggtgggtgctgcggggccccatcgggctgggctgggctaggctggcggccgtgaccacgcgtgaccctggcccgtggtgtctggcgcaggcgctcggacgccgtggacagccacctgctggacctgtgcatcctggtgttccgggccacgttcggcagcggcggccacctcagcctgggccgcctcctggcccacagtaagcgcgcggtcaagaagttcgtcagctgcgacgtcatgctggagcctggcgagtacgctgtggtgtgctgcgccttcaaccactgggggccgcccctgccgggcacccctgccccccagggtacgtggcccctaccccaggctcatgccccaggcccacggggagggctgcggttcacacgcccgtccttgtagcctccagcccctcggcaggggtcccgagagcctccccagagccgccgggccacgtgctggctgtgtacagctcgaggctggtcatggtggagcccgtggaagcccagccgaccacgctggccgacgccatcatcctgctcaccgagagccgcggagagcggcacgaggtgggtgggggtcccgggggagggtggcgtggggcagggggagtatgccccagcacctcccctgccccacaactgccattcctgtgcccagggccgtgagggcatgacctgctactacctgacacacggttgggcggggctcatcgtggtggtggagaaccgacaccccaaggcctacctgcacgtgcagtgtgactgcaccgacagcttcaacgtggtgtccacacgcggcagcctgcgta

SEQ ID NO: 9844 - DNA, 1206 bp, Homo sapiens
tcattttacattttcatctttattcttgcttaatacgtgaatcatggtttgtcaaggtttcaattggcgtgaccttgctaatgagattgtacagttctcctcgtgctacacctttaagcacacctctctaatcaggtttcttaaaactaagaagcctggagttcggttcggccccacagccgcgtcaggtggtgccgaggaggccgtgccctgggccggcctggaaatgggagggcaggcctggtggctgcatgtgcgtcctgcctcgtgcgggtggggctgagctgggcctggggtggacttggggccagcactctggctgccccttggagaagcatggcccacgcgaggcggcagccaaggagccctacggcgtccaccaccgaacttgaagctgaggtgccccgacctggggccctgtggctgcacctgtcaggccgtctgtgcaacatcccgcagcccacggtgggggggcagcagcagctctgagccgagcctctcctcttctcttccagcctcccggcatggtgctcaaggccttcttccccacgtgctgcgtctcgacggacagcgggctgctggtgggacggtgggtgccggagcagagcagcgccgtggtcctggcggtcctgcactttcccttcatccccatccaggtcaagcagctcctggcccaggtgcggcaggccagccaggtgggcgtggccgtgctgggcacctggtgccactgccggcaggagcccgaggagagcctgggccgcttcctggagagcctgggtgctgtcttcccccatgagccctggctgcggctgtgccgggagagaggcggcacgttctggagctgcgaggccacccaccggcaagcgcccactgcccccggtgcccctggtgaggaccaggtcatgctcatcttctatgaccagcgccaggtgttgctgtcacagctacacctgcccaccgtcctgcccgaccgccaggctggagccaccactgccagcacggggggcctggctgccgtcttcgacacggtagcacgcagtgaggtgctcttccgcagtgaccgctttgatgagggccccgtgcggctgagccactggcagtcggagggcgtggaggccagcatcctcgcggagctggccaggcgagcctcgggacccatttgcctgctgttggccagcctgctgtcgctggtctcagctgtcagtg

SEQ ID NO: 9845 - DNA, 1162 bp, Homo sapiens
gtccacgtccacctgggggcctcgggaggctaggcccctcctcaaaggcccaccagcccggcgctcatgctgagccccaggcacgcagggccggccacctctctcctgaagccattggccgctcctccacccagtgcttctgcccatgcctgccccagcagcccctctgcacggtcaccatcgcctgggcctgcccacagcactggtgctcacctctacctcctgtcctcaggccgtgcggcacgacatggccagcacgcagaaggagccctcccgggacccaggaccccccgtggtggactccgcggcacatgcttcccaaggtggtcccacggagggtgttactgggcaccagtggactcgccccatggcccgttcctgggagatgagggccgtggcctgcatgaactaccagatgagtaagggaaccccaggcaggcggccctgccacagcccccaaagacactggcctcctgctccagcttccctgtcctggccccacctgtcctgttgctgccagcagggcccttgtttgggattatgaacaaacctcacagactttgaggacctggatggtcctgcattcacggcatcaacactacccgcgctgctgttagacactccgccattcctggttctctccgaaccgttctttgtacagtaaatgtaattcagctgtggtccccacgttttgctgtgtctggtggggtgggtctggcagtggcggtgccccgtgccaggggccagtgctgcttcatacccggcaaactgacctctggcctttgttttgcctgctgttccctgcgctgaccgggctgacctgccgcggttggctgggttcgcctcaaagtgagggctggagctgggctggagcagctgggcctggtcacggccattctcctcttcccggtggatggaatcccagctgggctgtgctgagccctcgctcacagtccccggcagcagatggcctggggcggactgtccccaacagcagcaggactccagagggccaggtcctccagtcagtcggcccgctcagcagagccgcctgcacgctggccaatctggtgtctgctatgcccggcccaggggggtgtggacgccccggaggtcacagctgagctggaacggggcactccagttggtacagggaccagac

SEQ ID NO: 9846 - DNA, 1071 bp, Homo sapiens
agggctgttgctgttctcgggttctcgattggtcagcggcagcagcacggggcggctgcgcctgtgggccgtgggggctgtgtcggagctgaggtgcaagggctcaggcgccaggtgagctgttcacccctacgtgttttggctgcacgtgggtgttggtgtccctgactggggcttgcagccagtgccccgcccccgcaaaggccgccctgcagaccggccgcctgctagcccctccaagggacaggcttgggtgtggcctgggcctcactggctgctgtcgagtacgggcatgggcccagaagccccagctccatgggctttctcttcttccaccgggagggcacagccaggtcctgagatgcaatgctgagggccctgcctcggctggggacccagctggctcttgtcatcggccttgagacccattgttctctccttccctgcaccctgaggtccagttctgtgttcatggaacacgagctggtgctggacggggctgtggtgagtgccagcttcgatgacagcgtggacatgggcgtcgtgggcaccacggcgggcacgctgtggtttgtcagctgggccgagggcaccagcacacgtctcatcagtggccacaggagcaaggtgagggacttccagcctgggcagaggcggggcagccgaacctggtgccctccctgcctgccggctccatctccaccagcccagatgattccaagtcctgccgtcactggctcgcagcggccgccttggggttcccagcggggaagtcttgggtgtgcacgtcccctcaaagccgtcccggttgtgtctgcacaagcgagccgcctggcaggccttgcaggtcttctcaaactgtcctttccctgctattgctttgcgtttttttgtttgtttgttttttgttttttgtaattgtcaaagaaatcacatcagtccgggcgtggtggttcatgcctgtgatcccagcactctgggaggccaaggcaggtggatcacctgaggtcaggagttcgagaccagcctggtcaacatggcgaaatcccatctctactgaaaatacaaaaa

SEQ ID NO: 9847 - DNA, 1164 bp, Homo sapiens
gggacacacacgggggccggcattgctcctttccgccatgtggagttggccggggccagaggcacatgctctggtttggacagcccggccctgggggctggaataggaaatgcctgcgtccctttaccctgcccaggggccaacacccccagcctagctacggcttcccccaggtgaacgaggtggtcttcagccccggggagtcccactgcgccacatgcagtgaggatgggagtgtgcgggtgtgggccttggccagcatggagcttgtgatccagttccaggtgctgaaccaggtgtgtggggagtgcccgggccgggggcgggatgggggcctgctcagtggggggcctggcatgggcggggccgcctcctccctctggcctgggtgtgtgtcctcagggcccctgtgagtgctgaagtttccccactgtgggtccccagagctgcctctgcctggcatggagccccccgtgctgtggccgccctgagcagcagcggctagcggctggctacggtgacggctccctgcgcatcttcagcgtctcccgcacggccatggagctcaagatgcacccccacccggtggcgctgaccactgttgccttctccaccgatggtgaggagttgggtgtgttggggatggtgccgtcctgacctggcccaggtccagtctccgggctgggggctcacagggtgacggcatggtcccaggtcagactgtcctctctggagacaaggatgggctcgtggctgtgagccacccctgcacagggacaaccttccgtgtgctgagtgaccaccagggcgccccaatctctaccatctgtgtcacgtgcaaagaggtaaagcagccccaagagctggggagagggggcctgggtgctggtgggggcaggcaccatcttggcagaaggcacctgtcggccctcacccactccattcccagtgtgaagacttaggggtggagggcacagacctatggctggctgccagtggggaccagcgggtcagcgtctgggcctccgactggctgcggaaccactgtgagcttgtggactggttgagtttcccaatgcctgccaccacggaggtaaaccatgctcctggcactgtgggtggggccggtacccatccaccccaccgcagcatgctgcgcctttg

SEQ ID NO: 9848 - DNA, 1203 bp, Homo sapiens
agggtgacactgctgctcatgcccccagcgctggttcctttacccacctgagaagacgccagagttccaccccaacaagaccacgctggcctggctccgggacacatacccagccctgccaccgtctgcacggcccctggagtgtaccatccgggctggtgaggtcagtggctggcaggagagggccaggccaggctagaggcccgcagctaatctctgctgcacccccttcctccaccaggtgctgtacttccccgaccgctggtggcatgctacgctcaaccttgacaccagcgtcttcatctccaccttcctcggctagccaaaacagctggcaggactgccggtcacacaccagcacgtcccacctcgtgctcacggattttattacacagatagtggcggcaatggcctcagcccagcccaccctcacctgcttttccagcccacaaagggggacgatcacggcccagcaaaagcgatgctgagaggggaaacagtccagagtccaacagcagaacttgggggaagcggtcggggtggccaggaacataaactatgtataggggccgggggcttctgcccagggctcccctggaccaggacgccaggtagggcagggaacctcagtagtcctccacccagccattctcagagatgaatgcgtcaataacctccttcatagccaagttggggatgagctgttcctgggtcagggggctccgggtcacggggtcaaaatgacccacacgctgcagtgacaagaagggcagagggcagtcatggggcccaggaccatgccactggccctgctcccccagccgcaggcctcacctgcaggtgctcctcgatgtccttgcggtcgtaggtgatgccactgggcgtgatgcacggctcccgcatcagctcaaagctgatcttgccacacaggtagtcggggatgtctcgcttctgtggcacaggggcacacggtcagaggctgaaaaggggcactgcacgagcacctgccagccatcggcagcaagcgacacacactcaccttcctcttctcatccacctgagaaaaaagctcgtccatgtccgccatgtacttgtcctgtgaagagttgagtgctgtgcttgggggagacaccccacctccctcctccatggggcacagacccaacacaaggcggggatgctcccacgccacgtgcacacaca

SEQ ID NO: 9849 - DNA, 1186 bp, Homo sapiens
ccagtgggattgagggggctgggtcccccaggacacgggcccagaagagccccacgggcttcctgcatcttccaccgcaccatacctggagccctccgaggggtgtcaggggaaacaggccaccgccaaagccatggcccgccgccgagagcccaggccccacccgcacctcctcacccatccagcctgacccacgcggcctctcctcctccttgccgctgtgtggggcagtcccctgtccgccccaaaacccggccttggtccctggccaggctgagagaattgggcagggagagggcggaagggctggcgatcgcttggagtcattaacgtgatcccagctgactccggtcggcctcaacccaggggtggcgcaggcaccttgcaagcctcgagctgtagccaccctcaggcctgggaagaggcctgggccgacctcacacctcagcccttgcacccggccgggctcagttcaggcctgggcaccgagcttcaccctgggtgggtctcctcaggtggagtctgcagagtggacccagccaagggtcagggtcagcactgggtcagcgactccaatcttccagtggccagcacaccctagacaccccgaggagggagggctcctttctagcctgcccccccacccccacttcacccctccccagcttcccaaacttctgtctgcccaaatgggctctgaccgtgctctgtcggcccgagacatttggaagtcctgggggatgctggcaaatctcagctgttgctgaggagggggctgggaccccttcccatcccaaccttgagccccaggagataccgcgcccacacccaatcttgggacactccctatctggttggaagagagtaaccagtttccagagagccagagagtgagagagagaaagagagtgagagagagagagaaagagagagagagatgctgttgaatcagaaacagatcaacagcccaaagattttcctgtccctggagtgccagccccaggaagctccagggctgagtggtcaggagccagtttctccagcccctcctccccacaacccctagtggggaggggcagctgtccatttgcccaaagtattaatgcaactgaagctgtgatatttccaacgactgtaggaggaaaaattaaggggagagaggaaaacaaaaccaaccaacccctaa

SEQ ID NO: 9850 - DNA, 1202 bp, Homo sapiens
cagggcagacccacgggccgcccaccccgcccaccacccccaagacggagctgcagcaggcgggcgccaagccggagctgaagctggagggacgccggccggtggacagcgggcgccagaacatcgacttcagcaatgtggacatctcggagctcagcagcgaggtcatgggcaccatggacgccttcgacgtccacgagttcgaccagtacctgcccctgggcggccccgccccacccgagccgggccaggcctatgggggcgcctacttccacgccggggcgtcccccgtgtgggcccacaagagtgccccgtcggcctccgcgtcgcccaccgagacgggtcccccacggccgcacatcaagacggagcagccgagccccggccactacggcgaccagccccgaggctcgcccgactacggttcctgcagcggccagtccagcgccaccccggccgcccccgccggccccttcgccggctcacagggcgactatggcgacctgcaggcctccagctactatggtgcctaccctggctacgcacccggcctctaccagtacccctgcttccactcgccgcgccggccctacgcctcacccctgctcaacggcctggccctgccgcccgcccacagccccaccagtcactgggaccagccggtgtacaccaccctgaccaggccctgagggcccagccgcggggagggactcgcaggcgtcagggggcagccttgtcccggcccagtgtgtgtgaccagggcgggaggggccccagtggctgagctccaagtgcctgctgaagtctgcagggaaacacgcttgctgcccgtggccctcggcctccagatggccacacctctgccgacgacggaccagctccctctcccttctatctttctttttgaggtggtgggattattccacaaagaagggctgccgtttggtccctcttccgtgaggactggcggcaccagcaccttcgctttgcatctcggtagaggagaaacggcagcacagcccaaggaccaaaggagggggtggcaggggccttgcagggcgctgtgaggtccaggccggtcttggcgccgagagcccctgcactcaaggccacattccctcgacaacggctgcacgggctgtccgggatccggggtgtctgtccgcagactgggatgagtctactcgagcatctccgggacc

SEQ ID NO: 9851 - DNA, 1560 bp, Homo sapiens
aagtgctgctgaggtttctgtgctccccgcatctgcgggctgtagagcgctgggcagctaagatctgcataggtcgggattggcatcgagaccctggcaactgcaccggtgccagctgtcttgggggccacaaggccaggtccagaccagggctgggggctgcctgaggactcctatccgggcagcctgctggcgggggttcccctcttcagtggccaggtcacagggatggagctgcgctgtgcatagggtgccacctcaggtgtctgtcccttgtgtcctcaggaggcagccttgctaccacccgtggcaaacgccaggtgctttttctgggagagcccacagccgtggccctccagggcttccccgacccttagcgccaggtagagggccctgggcagcctgtgtctggaattcttcgtcctgaggccacctgagtgtggtctgtcctggggaggctgtgcgcctcagcagccgtcctgacgctgagccctctgcaaaggttgggccggccaggcctcttggggctgcctgagccactgcaggaagtggcctggctgggaagttgggtgccggtcacctcccagcaggaaggcacagtggacagagatgggaagccctgggggacacagcccggtgctcccagccctccaacctctggctcccaacccagtctccccatcctagcgagcttggccctcctcagtttcgtttcaagccttggggctggagctggccctgctgccctggcaccccccggtggctggagctgggtccccgtggcccaagtgcagggtcccaagagggcagggcggggctccccaaaggagcaaagaatgcagggagggcggtccagggccctgggaaggggagctcggcaccctccaggtccgtgtgggactccagccgctgttggctgggaatcgaagttagaggtgacttccaaaggccccccgagccggcagtgccccccaccacccctccagcgactctgcggtgccagtgccttgttggcttttccggctacgcaccctgcagtcactgagctctcggtctgacgtctgatgtttgtggtttgtttataacacggggccttacctggggaattcagctggtttgaatatttgtagcccgctcccagaatgtcttattttgtaatgactgaactacatttagtaatagttacacatgtatatggttaatacatatggaaattcaatatattttgtagttaacgtattctgaagtaacggatgtttctcgccaatcgtagtgacttcagctaacgaaatgttcttttgtagtaccacggtcctcggcctaacgaaggacgtgaaccttgtaagaggagagctctgaaacgcggtcacctttgtttagtggaagggaaagtgtgttcccggcatgaggtgcctcggaattagtaaagaattgtgggcaatggattaaccactgtatctaagaatccaccattaaagcatttgcacagactgcggcctgccgggtgtgtcctttcctgccctgtccctggctcccctgggctttgggggtgggagccca

SEQ ID NO: 9852 - DNA, 1662 bp, Homo sapiens
ggctttgcttgttactagttttttattgctagttacaggtatgtctaagctcatataagctccatggttccttcaaaggtttgttgttcatggttcagaagccctggaccttgaatccagccggcattcgtcccccatgtccctggcctccaaccttgctctgccccttcaccctcttggagatgcttttctgtcgggtgtcctcacctgtgaggcaaggaatgagagcagctacttcaccccgttgaagtgcggctgctaaaatgaaatagtgcattggtgtgaaagcactctcagacgtgtacgtggctacttgtatgtataagtgaagtgctgctgagacgttagtgatcaggtcaatttttggcagttgggacgaggggaggcttgcttttgtttgtatagttgagagtggcttgctaaggtgcagaaggtttcctgagcttggctcacacttaggttgctggcacttctttctttgcttcttgtcccattgtgtggcttggagaagcgtgggacttttcattaagttttaatattaataaaatgcaaatttattagaatttgtgctcctcgtgacatatccattatcccactttagcaagcaaatatatcttttttttttttttgagactgagtctcactctgtcacccaggctggagtgcagtggtgcgatctcagctcattgcaagctctgcctcccaggttcacaccattctcttgcctcagcctcccaggtggctgggactacaggcgcctgccaccacacccagctaatttttttttttttttggtatttttagttgagacggggtttcaccgtgttagccaggatggtctcgatctcctgaccttgtgatcctcccgcctcagccccccaaagtgctgggattacaggcatgagccaccgctcctggccacaagcaaatatatctttaagcaaataataagctaagctgtgatggtggcttttaggagaggagtaggaagtgggtctcctttgcatcacagaacttctcggccactgtctgccttggagcttcccgggaaggaaggctgcctgtccgctgctctctgctttcaggttcctcagtgctttgggaggcacttcactgtgcccaggacatcctctgacaccagtctttggagagacctctgctcagtcgttgcttccattacccgtcagaaaagaaggccaggtggtggcagttgccccgcaacagtctttagctcaccttccagaaagatgctcagaggagaatcctcttacattctggagaaatctgcatctggagtggtgagcatctgtcagggaggaaacgatcaatacttcatgtttcaatttttcacttggaaatgatgtaacttctattatgcctaaggaatacttagctcaatcactggcagttcctttggttgattacttactgccctggccagtttcaatctcagtgggcctgagactcttacagtgaatttggaagaaaggacttgtggagaaaaggaaagtctgcttgtttggcttttctgcatgcaagtgtgttttctttctctgaagaagacactcttattgacttcaatgaaaaatgcttttttttctagttcagtttcaaatttaaatcttcttgcattgataaagcgatggtagctgggatttagtg

SEQ ID NO: 9853 - DNA, 1186 bp, Homo sapiens
gaatgttcagtggcttccagcttggctcggctcccacactcccaacagtggctgtaaaggaagccccctgcggccacatcctgctgtgagggcatggcgggcgggctcgacatgtctgcttttgccctcgccctcgcagggagaggttcgttccggcccatccagtcttctctgaccaaagcagctctgtctcggccgatcgtgcccaaggtccttccaccccaggccacgagtcacctggccagtaagtctgtacctgcatggccacagccactgagtgagcctctgagggatgtttttgtgaccaggttttttgaatgttttcttctccaaatcataatgtctcattacccttcaccaagaacatctaagcccttggctcttgcattgacatgaggtgcgagggagaagctgttccccgagccctcttgggacatcttatgggttgtcagtagagcagagatgtgcagcgtcctttttgttgccaggtgctatcgacttagcagctacaagtgccggcatcctttccgggaaccccctccctgccttggacaccgagggcttgtctggcatctctccactgtcttcagacgaggtgacgggtgccatctcggggcaggactctactggaactcaccaggatggagacaccctccccaccgtgggggtgagtatgtttagaagggcttttcagcattaccaccaacttctggtgtggacgccaaagccatggggctgagatcacgctggactccagctctgcctttggaggagagtctctggaccaggggtgccatggcataagcaaactctgtgtagtacagagcaggagaggcctccggagccactgacgaaaggtggggacaggcttgccatgtggcactggagaactcagagctaagacggtgtggaaacatagctccatctgagagtgaccataaccaaggtggcagcccacagcgctgtgctcggacaccactgagcatctctttcatctgggaagagagcagcctgtatggccttggccattgctcctttccaaggctctgagcacctggtttctctggcctcccacggccacttcagagctgccccaaggagggtggggtgggctgatgctgttaagactccagggagcccagccctgcctgccacaaggttgacttcctgataggactttacttca

SEQ ID NO: 9854 - DNA, 1374 bp, Homo sapiens
gtgtagttgctgtgcactaggagctgtgatctccctctctgcagggaggccccagcccctgctgcttgctttctgccaaacctgtgctatgcatcagctgtgccctctgtggactgtaacgggcaggacagttgggtgtggcctgggctcatgcctggtggtgtcacatcccaaggcagcaagagcatggataccgatcacagggctgctgcggagtcgtggggccctgggctggtgcctcccctccctagaggttttgttcgtactcttaacagggagtgggggcaggaagagtcctgtactatgcaggttgtgtggactttacatgggaccctgctaagctggttgaaaatgtttttcttgtgttttaagaattaggagacatggaagaggaagaacaaagtcccctctgtagttggtttccttcctgtgtccctttgcaagcttccaggcgatctaaggtgtcatttctccctcctggggtgacccttaggcgctaatatgattacagcgaagactttcctgataagttctcaaactcgatgtgtgactgtttggcacttgagacaaacctgcctttgcagggaaagtgtctctcacgggcattggtgtgggcgtgcctgacatacgtgttcagtcccttgcatacctttgccttgagacttctgtgtctccttcccatttgggacacccaggtgagggcccagacatctggatgtggtcagacctcaccaaatatatgccttcgtggtggtctccctccttgcgccctcttgggtggccagcgttcctactgcagacggcccaacatccagtctttccccaggacagagctaacaagggcccctttgccttctcatcctcaggagttccaggcacatgagtcaccgtccatccacatccagtgtggcctggagctgctacagaggtgttgggcaggccatgcctgtgccgccatctctcccttcctgcctcatttcatcccccgcagcagccgggattgattgtgctttcctaacccccttggacctactctccctcctccccaccattcctcttcccccacatgtgtggcacgctgcagccctcaaggccagccctggcccctccactgcttctctccccatccacaatggagaaggtgaaaagaggagggaaaggcctttggtgtggacaagcatgtggacgccctccgtcctgcagtcttgccagcccaccacagccactgtagaccacaggcaggccgtgtactgcaccactgggaggacgtggagaggacagtgaacttccaggcaagagcttccttcttttgtctcacgagtttttcttagagctcttgcctgagctggcttccctccttcagacattgacatg

SEQ ID NO: 9855 - DNA, 1261 bp, Homo sapiens
tgcactgtgccagggacaggagggtttgtgaactgcctgtcagggtacctgttagcccctgacaactcagtggggtgaagttttggaggtcagagtctgctttcgtaggctctttagacagcacctaccacttggttctccagcgtagactcctgggagcagccaactgcagccattgccatccagtggggagatgggttagggaggaggacgggctgactcctctcctgtaataaagctgacaagagttctagaggattctgcttctctagtaactagacaggtgatacgcatttgcttgccacattaagggaaaatggtgtcatttgttgcagaaaaacaatggatacattttcttctggcctaaatgaatatttatgtgcaaacataggcaactgttaaaggctggaattttcaaaagatccaaacagagacttcctgcatcttctgcctttccaacagaagcggtgatcgtctaagtatgagcctgtggcttcctttgtgcatttgagcatgctgtaattaagatgagatcagtttcttagaaaaagctttcctgaatccctctgacgttgcctgggatctttctgttgattcgtcttttctggagattgggacagagcatctgtggtccagggaagttagtcctctggcctcaattctgttgtggatgtgcagtgataagcgggcattgcgtgcctcgggggatgcctagttcgtggcttcctggctgttttgtccttctgtgtcttgtagctgtagggtgccagctcagggagtggggtgttggcggcgtttccgcggttggcctccttgctttgccgcacctccaggttctgggcatgagaggccgtggcctcatttctggtggataacctttttagtttaatagcatctttaattagatcacagcattgaattcaaaatttcttctgcaaagaaagttgtggggcataagacaccgggaatgagggaggaggaagacagttgtgttttctctttaaaccttgagctctagccgatgcatttgtcaggaaatacagcactttgtcttaagaaaacaaggaaggaggccgggcgcagtggctcacgcctgtaatcccagcactttgggaggccgaggcgggcggatcacctgaggtggggagtatgagaccaccctgactaacatggagagaccctgtctctactaaaagtacagaattagccgggcgtggtggcgcatgcccataatcccagctactgaggagacttgaggtag

SEQ ID NO: 9856 - DNA, 2836 bp, Homo sapiens
ccttctactaagagaagccactgctccacccggagccagaccagaaactcaagagatagggtagccatgttttcatttccttttgcccaaatgagcggggtgggaagagggttagtcttatgtgagcctggctgctcagcgtctcctggccgtcatgacagctgcttggagacccgtgccttccagatggctgggagatgcctctgtggggatgaaatggggcacccctggccatcactcatgtgtagtccaggtttgagaggaactggaaggggggtgagggtggggaggtggggcagggcatggtccttggatcaacagcccgccagctgattggatgtctaggaatgactgaaagaaaccaaaacagcctgtccactgctgctgtgggatggaggaggcgtaagcagaaacactaacagtatattgacctcttagcagaaccgcttccattctggagatcacggctgctaaatccagcatccccacttcattttacccccagcatattgttctgtagtcttttcttgaaacatcttgattgcttttcctcggcagctttcaaaaaaccaaataataatagttatccgtcttctacttcatggaagattgttttggtgccctgaccctctgaagtgcccagttcctgccatctgaaacctcggcctgatctgatctcatgttggaatctgcctgtctttcacacagggctggtcttggtcctttacatgccagttttgcttgtgaattcttgcttttttcctctcatcagccttaagtttaggcgtttgttgttctccagtgatgtagacagttcccttcacaagtcacagttcttcccataaatgaggcccgctgacctctgcgggactttaaaaatctattcagatatttccgagtaagtggcttgtttaaattcttcctgtgtctttctttattccttaattggttggtggaaagaagagatgcttgggaaccttgggttcttaggtttggattctttaataatatctaaaaagctaaattttaaataccagctttacataaatgattgttgactctggtctgtttctgacacctttccagaaaaaagtcaattgttcaggtacaccaaagaggaagaagagctgtggaggccaccctctacaaagctttatagaacttctggatctaactcacaaacaagcttccagaagagactagagaccttaggccaggagatgaaggagttcagtagcaaagtcacacctgtccaattccctgagctttgctcactcagctaatgggatggcaaaggtggtggtgctttcatcttcaggcagaagcctctgcccatccccctcaagggctgcaggcccagttctcatgctgcccttgggtgggcatctgttaacagaggagaacgtctgggtggcggcagcagctttgctctgagtgcctacaaagctaatgcttggtgctagaaacatcatcattattaaacttcagaaaagcagcagccatgttcagtcaggctcatgctgcctcactgcttaagtgcctgcaggagccgcctgccaagctccccttcctacacctggcacactggggtctgcacaaggctttgtcaaccaaagacagcttcccccttttgattgcctgtagactttggagccaagaaacactctgtgtgactctacacacacttcaggtggtttgtgcttcaaagtcattgatgcaacttgaaaggaaacagtttaatggtggaaatgaactaccatttataacttctgtttttttattgagaaaatgattcacgaattccaaatcagattgccaggaagaaataggacgtgacggtactgggccctgtgattctcccagcccttgcagtccgctaggtgagaggaaaagctctttacttccgcccctggcagggacttctgggttatgggagaaaccagagatgggaatgaggaaaatatgaactacagcagaagcccctgggcagctgtgatggagcccctgacattactcttcttgcatctgtcctgccttctttccctctgcgaggcagtggggtgggattcagagtgcttagtctgctcactgggagaagaagagttcctgcgcatgcaagccctgctgtgtggctgtcgtttacatttgggaggtgtcctgtatgtctgtacgttggggactgcctgtatttggaagatttaaaaacctagcatcctgttctcaccctctaagctgcattgagaaatgactcgtctctgtatttgtattaagccttaacacttttcttaagtgcattcggtgccaacattttttagagctgtaccaaaacaaaaagcctgtactcacatcacaatgtcattttgataggagcgttttgttatttttacaaggcagaatggggtgtaacagttgaattaaacttagcaatcacgtgctcagagcttttgcctgtcagttgtgtgtgtcccttatagtcccttcccccacagctcttgctgaaagagtttgccttgttttgttttgttgttttgtatttagccagaggatgccaaaattagtcttctcaaagctttgagtagagtaagtgtgggaataagccagtttttttttttctgtttctgtaacttaaatgaacgggtttttttcccttgtatgccacttgtcctaacatgtccttaaggtgtttaacctgcctctgacctggcttgcaatgcataggtgaggagaagcagagagcttgtcatatgcaagtcctgtcaagaaaacaggtgggcatggtggctcaggtctgtagtctttgggtctttgggaggccagggtgggaggatcacttgag

SEQ ID NO: 9857 - DNA, 1175 bp, Homo sapiens
caggccctgaagcgggactttgagggcagcctccaccttgctggccacatgccaggggccgtgacctctccctgcacactgcctgcccctccctgcagcggggagctgggctgctttggctccacggtatttggttcaggatgtcccttggcagaggctgtgcccaccaacagtcagggggctgtgctgggctccacggtggcctctgcagcaaggagccgtttcaggcgtctgtccagcagggagtcgctggtcatgcctgtgccccggcggcactccaggtcccggtctgtggaaccctcagtgactgtggcagcagagcagcctctgggtcgagcaggggccagctgtggcctccaagcccaggggcatagccggtgccaggaaagccacccttcccagctgggcacccagtgccgggaaagccacccttcccagctgggcacccggtggccgggaaaaggcgaggatgggcccaggcgggcctccctgccgtgacctcccccaggacaagcctggggcactgtgggggccgctcaccctggacagagacatcacccatcattcttccactcagcgactgcacgtcctccgcccgtcgagagcagaagcgcgagcagtaccgccaggtgcgtgagcacgtgcgtaacgacgacggccgtctgcaggcctgcggctggagcctgcccgccaagtacaagcaggtgcgggcgggcgctgcggggaccgggcggggccccgcagaggcggggcgggggtaaggggcggggcgctgtggggcggggagagggcggggcagtgctagggggtgggagaggacggcgggtggggcggggcctggcaggttcctagtgagcctcctgggcaggggtctggagggtcggagaaggagccccgcggctcccacgcccccacctgcctccagtcttgaagtggctgtgccgccagaagctggcagccctacctgtctcagatttctggagggatgggtaggagccagggttcgtgcccacggcgcctccctgctccctgcagctgagtcccaacgggggccaggaggacacgcggatgaagaacgtgccggtgccggtgtactgccgccctctggtggagaaggaccccaccatgaaggtgagcccgcgaggaccccgctcaggctggctgggcgagcggga

SEQ ID NO: 9858 - DNA, 1232 bp, Homo sapiens
gggcgcaggcggcctgacccttccgcaggcctccgaggagctgctgcgtgagcactacgccgagctgcgtgaacgcccgttctacggccgccttgtcaagtatatggcctccgggccggtggtggccatggtgagtatccgggaagcgggcgggcggctccgggacccccacccccgcgtgataccgcgcccgttcctccgcacaggtatggcaggggctggacgtggtgcgcacctcgcgggcgctcatcggagccacgaacccggccgacgccccgcccggcaccatccgcggggatttctgcatcgaggttggcaagtaaggcccgccccggggacggtcccagccccgtccggcctccccctgttcagcctgcgtggtacccgtgccggaggtctctttcccacgctcacacgcgcctcttccgcgcaggaacctgattcacggcagcgactcggtggagagtgcccgccgcgagatcgctctctggttccgcgcagacgagctcctctgctgggaggacagcgctgggcactggctgtatgagtagcccggcagatgcgcgtcacagaggctctcacactccagcctcctccagggcccaggtgggcgggcttctggccccaccccacagcgcttggagcatccctttggacgggctgctgaacatccacctgtctggacgttgcatggagggtggcgcaggcctctccaatccctggcgtacagggtttcctgcccgaggagctgctccaggagcctgcgcggctcgcctggaaacgtgccaggacactgtcctggtgcccagcccaacgtggtccaacgtttttttataataaagtcctcgttttcgtttcgatttgggcccaggaacaggcagctacgacgttaagacatttattacatacagagcagatatgtgggtttgcttgcagggccaaagcctgaggagaatcgtcacccctcccccagccgccccactgctcagcccggagtcacttcgagatcctgggggaacagacgagggagcggacatacatcacagtggaggtggcagggtggtggggagaagccggcagcgcagcggctgcagccctcggtggccagcggggcttgtggggcagctccccaagatctgtgcttctctggttgggggtgggtgcgggggctgggctgccctcataagggcctcccagacaggagtgcagtgggcctggaaggtaggaatagg

SEQ ID NO: 9859 - DNA, 1235 bp, Homo sapiens
gcgtttctcttgcaggagaagtacagcatcggggagcccacagtgccatccaccctggcagaggagtttacctacaaccccttcatgagagtgaggtgaggcccagggcaggtggtgggcgcgggcccctcccctctggcagtcccactgctgcacacacagccggtacgtccgagaccccagatggctgaggctgccttggggagctgtcacaggtgcagccgcagagcccgagcactcttcttgaggggggtccggcctttcctggcaccttggccggggtgtgagtccttctggaccctggagttcagaacctgtcagaaggggagtggctgccgcctccccgccctccgtgtcctctgagggctgggctcggccagcacgagtcgccttcctctgcagtggccctggctcctccggtgggcgtggctcggcacagcctgcagcccggtgctggcctccgcagggagaagacggtgcagcagcacgcaggtgagacggacccggtgaccaccatgcgggccgtgcgcagggagaaggaccagttcaagatgccccgggactgaggccgccctgcaccttcagcggatttggggattaggctcttttaggtaactggctttcctgctggtccgtgcgggaaattcagtcttgatttaaccttaattttacagcccttggcttgtgttatcggacattctaatgcatatttataagagaagtttaacaagtatttattcccataacttccccttgcagactgttttcttctggcctttaggcctctgcttgtcccctcgggcctccttcctcctccgtgagccactgcagtccccccacccacgcttcaggtcaggcgtgagccggtgcctttgctgtggccttggctgggtgctgatgggactgtcaggcccactgctgcggtcggtacctttgcagcctgtgcttgtggtctgatctgctcaggcccccggcagggagaggtggccgcgtcttcttcctggaggcggccagatcgcgcgacctccaggcagtgctcctactcggcagcacccacctgcctctgcttgagaaagcacaaaccgccctctggggaagcagccagctggggagtgctctcggcctgtgaccccgggagggctgggtaggtggccacatgtcctgccccggctctgggtgtggctggtggcagagggtctatgagggaagggcaggacaaaggcaacccctaaggc

SEQ ID NO: 9860 - DNA, 1136 bp, Homo sapiens
agacttttcagtgggttatctctaggatgatcagtagttcagcacttaaaaactgcagagaaaactgaaagttatgttccagataactttccgttgtttaccaaattttcttagatttggtcatcatcaggaagcatttgtaaaaataaaaatctccacaaattactggcccatctcggacttgctgaatcaatttgataggattaatctccagtgaagctgtgtttacagggcattccaagtgattcttatcaggaaatgtgaaaaacactcctgtacataatcggttaatttaaaattttacttaataagtgaacaagtaatgaagatttcacctgtttacttagggtatctacccagacccatcgattctgagttcgggagatgattttgaaattactgttttccaaataaaggtgctcccttctaagtggcttacaagggtaatttttttccccccagtaatgacgaggagggatatttcctccttgtggggcttcagaccttagtctttgacctttggccttctgagcactgtgctgtgttaacacagttaatcagcaactgtacttcccaaccggagataaggaggctttgtggaagttgaatagcctgggactgctgcttttgctcttgcctgcaccctcctctgaaaaaacatccaggcaagatgcacagcatagctgtcaatgcctggaggagtcctttgggcttcggcaggggttcctgttcgcgttcacatcatctgctggcccctgaagaaagcctaggacatctgattgagtagtaacggtccccatgtattgaacacagtactgttaggcaccatgccaagcagtttattctgtatttccacgtgttatgtaaccagcaaccaagccataagcttagtatgatcactaccatccccattactcagatgaagacagatctagaggctgcgaaggctggctaaagtcactcagcttagtggcagagccgagatgtaacccagctcccccaagaccagaacgtgaagttttgaccacaatgcaggctgcatcttgtaagtagatacataagaagaatcagacacttaggtatgctgcaaccccatgcttaaattataatatagtatgaggaagtgccataattgg

SEQ ID NO: 9861 - DNA, 1166 bp, Homo sapiens
aaaagcgacaagaaggaactagtcagtgtggcctacgcatctggcagccccccgcgagacccagacaagggctcccgcccaggagcgcggactcgggagcctagacccgacccgatgtccgcggattcccgccgcccacgcagaggcccgctgcagcgaccaacaggactcacgtgttttgtcggaaaagaagaacgagacctactgggaagcagcttttatagcacgccaagcgccgcgagatctccgcagccccgccccaagcgggagcgggccgagctcctataagacaacctgtgattggctccgcggtgccccgccctcaccgggctctgagtgctcttgcccgtccggccccagccgcggcccgggaatctacgtcacccgaaaagcgactataaacgccggcgcctccgtccccagccgcggctcgggaatccacccgaagagtggctataaacgtccgcgcctccattgcgctctcctcttcacttaggtaggtcctgccgcgttgaccactggcgtctcgctggtggtcttcgagaccggcgttggttgaaaatcgcccccggctttggccgtggccgcgggtgagattcggcgcccagagcccccgggggcctcagctcaccgcgcgctgccccatgtgcggcggtgaaacccaggccccgacaggcgctgccgcctcccccccgggtgcggtcgctcgcgaggtctggcccctgactcctgaccccgactgcagacccctaaccttgttctttctccgcaggacactggtcctcccacgcctgacaccgacgtcgccaggaccgcggggttgggggaacttggctgtcccacgtctttcaaataaagctgttttgtctaactcactgcatgcgggtgttcttggggccccgactcgcctatcagcctggcggcaagtgcatatgttcacgctgtggcggggagaaccctagcgagatgcctcctcttctttcctggctttggacacaagggtaggatatgggaggttggcaggtgatgtgtaaggtccgacgcctcttaagtggaggagccagactacgaacagtcttgtggccatgcgcatctcaagtgaactacactggcaggtaaaatgccttggtccaaagggctccaggtggagccagcagagcactagc

SEQ ID NO: 9862 - DNA, 1166 bp, Homo sapiens; identical to SEQ ID NO: 9861

SEQ ID NO: 9863 - DNA, 1191 bp, Homo sapiens
cagggccagggagccggtcccctctcccgtgggttgggggaagatgctgcagcccgtggacctcctacccctttactccctcacccaagtgcccttcccagaggagcggactcctcctgtctgtcctcccggctctagcaaagtctgcgcccagcacccgagccccaccctgcccccggggacctggctggtgggttcctgaggatggtctccatctcgggaccggggcaggcaggtgagggtgggggatgggaggtgggcgcggcggagggagaggagggacccggccccgcgcgcatggacccagtggggggcgcgggcgcggccccgccccgtcccgcgcgtccccgccgcggccggcgcgcgctcccgggaggcggcagcggctgcagcgttggtagcatcagcatcagcatcagcggcagcggcagcggcctcgggcggggccggccggacggacaggcggacagaaggcgccaggggcgcgcgtcccgcccgggccggccatggagggcgcctccttcggcgcgggccgcgcaggggccgccctggaccccgtgagctttgcgcggcggccccagaccctgctccgggtcgcgtcctgggtgagtggtccctgcccgggcccccgctcccgcccctgcctcgcgaccttcaggcccctaccagccccctgccccctaccccctgccccctgcttctcgccccccgacctcactcactctcatcctcgccggcccctcccccgccggcctcaggttggggtgacgtcaccgggcagggcgcgcccacctgcgggcggaggaggggccggcggcgccggagagggaccttgagaggtcaccgccggtcgcctctacccctacctcctccccgggtctaatttcagtccctttccgcagcccttactccgtttttcctgttctcgtgacctggaagcagggacggggtggggacggaattctccgaggggcaggagggggctacgggaaccgagaagcgcctccccttcccccgcacacacaccctcgggtctccttggcagggagcctgtcccctggcccccagttccagctgtgagttgagggaggagaggctctgggctgggagggcttcctggcggcggtgtggaaggcaggtttgggagcagcctagcccactggggcgtccctgggagggccctgctgctcc

SEQ ID NO: 9864 - DNA, 2025 bp, Homo sapiens
gtggccctgctcccggcggtgacactgaatgtcctggggccgtgggcggctctcggtgtcttcctaggcagctgctgcagcacgagtgcccgcggtgccccgagctgccacctttcagcctcttcggggacctggagcagcacatgcggaggcagcatgagctcttctgctgccgtctgtgcctccagcacctccaggtgtgcccccccagcgaccccggagagagcctaggcggtgggtggtgcaagggatgtggccacacggctgggaggggcttgtccacctgctgcttctggccccggatggccccctgagggtcaggctgcacgtggcagggaggcctctggctgctggcggggccctctcccgccccttgctgctccgccactggcctgtgggaagaggcaggaggcttggggtcccccagcctgtgcccagcctcctgtgccttgtagatcttcacatatgagcgcaagtggtactcgcgcaaggacctggcccggcatcgcatgcagggtgaccccgatgacacgtcgcaccgtgggcacccgctctgcaagttctgtgacgagcgctacctggacaatgatgagctgcttaagcacctgcgccgcgaccactacttctgccacttctgcgactcggacggggcccaggactactacaggtgggccgggcagcagacagacagatgaccctccctccccgagggcgtggggctaaccgggctgcagccctcctaccgacaccccatctcctgccagcgactatgcctacctgcgtgagcacttccgggagaagcactttctgtgtgaggaaggccgctgcagcacggagcagttcacccacgccttccgcaccgagatcgacctcaaggcccacaggacggcctgccacagtcgcagccgcgccgaggcacgccagaaccgccacatcgacctgcagttcagctacgcgccacggcactcgcgccggaacgagggtgagcaggcacctggcctggatgcccccaggtggggccgcatgaccatgccctgctctggagcctgagatgagaccgagctgtgggtgcaggagctgacctcccaccctccggccaggctggagcgcccgagcaccccttgtgtgccaggagctcttgctccctcagggtctcgggtctgctgccctgggtgcccggggcccttccctggaccaggaggcttttactgagcatctgctgtatgcagatcccacctggggctcggggaccctcctcctctcccttcccactgctcctgtggcttggcacccaggtcgtagaggcccgtggctggcgtggaccctgcgaggctcctgtgccactcccgggctcatgtgcactgtgggtaggaaagcctctgccatccaggcctgagcattggccgggtgtggccttgacggcaggcctgttcctcctattgtcgtcccggggtcccgggaagtgacgggctgtctgctggccgcaggggtcgttggtggcgaagactacgaggaggtggacaggtacagccgccagggccgagtggcccgggctggcactcgcggagcccagcagagccgccgaggaagctggaggtacaaaaggtgggggaccttgcgtgccgctgacattctcctgtggtgaccgtggccagtggccaagctgggagtggggatggggtcagggattgtggccagagttcctggggtcctgagtggcagtagggtctgttgagggtccttggtgggcacaagtttctctctcttttctccagttctagccacagccacagatcccagggttggggtgggtgaaaggggcctgtgtcaattgggcggtcaccgcagctgtacgaggaagcaccgccccggcagccctgcagggcagaggcatcagaccccagatgatcgccccacacactgggcccaggcactgcccgcctgaggcattggtctcgggccatgctcagcctgaaggctggcctccttgtcccagggaagaagaggaccgagaagtagcagctg

SEQ ID NO: 9865 - DNA, 1597 bp, Homo sapiens
aggaggggccaccgtctggggtgtgggactagggctcactccagacaccccacccaccgtgctcaccccaggatggcagtgcctggaagcaagatcccttccaggagagcggcctccacctgagccccacggcggccgaggccaaggagaaggctcgagccatgcgagtcaacaagcgcgcgccacagatggactggaacaggaagcgtgaaatcttcagcaacttctgagccccttcctgcctgtctcgggaccctgggacccctcccgcacggaccttgggcctcagcctgccccgagctcccccagcctcagtggactggagggtggtcctgccattgcccagaaatcagccccagccccggtgagcccccatcctgcccctgcccaccaggtactgggggcctgtggcagcaagatagggggagagagacccagagatgtgagagagagtcagagacagagacagagagagagagagagagacacagagagagacagagagagagcgagcgagcgcgcggcagccgcggggcgagggcctttgctgctctgccggggcctgctgactgaaaggaatttgtgtttttgctttttttccaaaaagatctccagctccacacatgtttccacttaataccagagacccccccccttcccctcccccttcccctcccccttgggacgcgctctaaataattgcaataaaacaaacctttctctgcaaaccatttcctccccgccccctcccctcagcagcggccgtcctgagtgggagtccctgggacttcccagtggccaagttggggcgcccagcctcttcgtggggaccttgggtaaggccagggaggcctgatgtggccgtaggagctgcccctgcccacctgccctggtgtgggggtccctaggccacaccctgctccccacccagctaccctgtgcgcctgtgccctgctgggggcctgggctctccgaggggcctgaggatggaggccccacgtccccgaggagggcggcctctggacaggcccctcattccgcgcggcagctcccaggcctggggaacgtaggtgtgtgagagcggcacccgggaaggacgcctggcctctggctcagccctgcttggcgggctcccccgtggacaccctgttgactttgcacttccctcccgggccccgcacccccgaaccgaccaccgatcgaccggcaccgctgttgcctcgtaagccatagcgcatgcgcgctctcaggataaacaggccctgcctgggacccacacgcctctgtcttttctgagcctcctccccgtggggtgagaggggtggagggatgaggctgtttcagggagccccctccccgagtctcagcagctggaaacggtctcgttcctgagcccgtgccctgcatccatctgctcccagccctgctccatctcccccgctgacccccatgggaccccctgctgtgtggcacatcctgggcccatgcccatctctcttatttggcagactcagcctcccaccttcaccttccctgtgaagccatccggccccacacaacacccacacgggccaccctttgcccaattcaccctgcg

SEQ ID NO: 9866 - DNA, 1273 bp, Homo sapiens
gcaccaccacacttcagcctgggtgaaagagtgatactgcatctcaaaaaaaaaaatttgttttaaagggtagtgtgatgattcacgaagcaatcataatagtagtggccaatggctgttcagtagtgatgggccagatacgatcgtgttgggtttttttttgagaccaagtcttgctcttgttgcccaggctggagtgcagtggtgaaatcttagctcactgcaaccttcgcctccgaggttcaaattattctcctgcctcggcctcccgagtagctgggattacaggcatgcaccaccgcacccagctaatgtttgtatttttagtagagacggggtttcaccacgttgatcaggctggtctcaaactcctgacttcaggtgatccgcctgccttggcctcccgaagtgctgggatgacgggtgcgagccaccacgcccggccacatacgattctaagcactgagataattcatttaagcttcacattactccagtgagtcaggtactattattgtcctggtgttgtagatgaccaaacatacccaaaccagacctccccaccccacagggggaggctgatgcctcaagtgtggcccagggcaacaaaccagggtgtgtcgagggcggggggcggagcctggccagggaatcacccaggacccgccgccaccccggtccctgtcactgcacaagcaggtacgcaggtaccaggtgctgctgtcactgatgctctccagccaaaccaaagaccaggtgacggcgggcgccatgcagcgactgcgggcgcggggcctgacggtggacagcatcctgcagacagatgatgccacgctgggcaagctcatctaccccgtcggtttctggagggtgagccctgcctgtggcaacgggggccgggtggcagtggcctgagagagacctcagaaggctgaggggggtggcgacggtgcaggaagtgagggtcaagcatctcaggctcggggggtccccctgaagccccccccaggccgtggggccctgaggcctgacgcccagtcccagcagctccttggccttcctgttcgcatcctcccttccttcctctgcttccccgcctcgccgcctgcccacccttcctcaccgccaaggctgcctgcccacccgcctttccctttgtttactgctagcctctcccggtgtgtcaccccctcctgtccagagcccctcaccctccaggagccctggggaggctgctccccaaccccgccgagcactggatggtggtgggcgg

SEQ ID NO: 9867 - DNA, 2401 bp, Homo sapiens
ggatacctgtctcctcctggaagcccgttgcaggccaaggggtcccatggccctcagtccatccacctcctcacctcaggccggcctctgctgggtgggacttggccaggggttggggtggtagaggtgctcggtgaggcttaaagccattttctagcacattctgtatcatgagcaaaatattgcctaggggctatgaaatttgtatcagaatgaactcccataagcctcttccctgtcactgggtgtggagctcaggcagccgctcgcctgcctgagggtgacggtggaaggccacatggggatcccagacctctgtgtgcttgccggaggcagcctgcgggcagaatgcaatctgggcctgtctgtgtggcctccgcctctctgcatgactacaccgtttcgccaggaggccgtaacctagtgctcccgtgggcttcggtgagggggatgtcggtctctagcctcctgagtctgctccgaccagtaggcctggtcttccccacccagcgtctccccgttctctgggacaatgtggtccacgtgattctcaagctgaggctcgctgggccgcccacgccctgttggggtctttccgagcgaggtcctcagccgtgcatgcgttgagctttggcccttggtgataggtggctcggcccgccctacctggcaccctgaccctggtcacggcctctccctccagcaggatacagacgtccctcaccagtgccagcttggggtctgcagatgagaactccgtggcccaggctgacgatagcctgaaaaacctccacctggagctcacggaaacctgtctggacatgatggctcgatacgtcttctccaacttcacggctgtcccgaagaggtccaggcggcactacagggctgggcgggcctgcgggagctccacgggcaagctgggtttcacgctccctgtcttctaggtctcctgtgggcgagttcctcctagcgggtggcaggaccaaaacctggctggttgggaacaagcttgtcactgtgacgacaagcgtgggaaccgggacccggtcgttactaggcctggactcgggggagctgcagtccggcccggagtcgaggtgactgcaccttcctttcctccgcgcctgccagcctcgacaccggctgtcccgagcccaggcccacgtggcaccctcgtaccagcctggggactaagtccaccctgtgcgtgggattctcttctcagctccagccccggggtgcatgtgagacagaccaaggaggcgccggccaagctggagtcccaggctgggcagcaggtgtcccgtggggcccgggatcgggtccgttccatgtcgggtgagccttggccccagccacctccacacaggcaccggggctccctcagttgctgctggtcccagtgttcaggaaggccccgagcccaggggccggggtggctggcttcaggcccggcccacgtcctgactctggggtgagccttccacagctcaccccagagccgtggagtggtggagtgtggcccgcttgctgcagaggggcctgctctgggtgctggtgtttcctgcgggttttcagctcggctcagtcctggagcccttctctgctccagcgagccgtggtctgactgcaggacaggttctgggtccctccctgtggccctgggttcactgaggccagcactgtggtgggccgtgccccaagggcagagctgccaccgtctctggctgcctgtggcactagcttgccaggctcggggggagcattcagcttgaggctggtggttttgcatcaggtaagtggtggtcaccagtcctctgccctcttcttcagggggccatggtcttcgagttggcgccctggacgtgccggcctcccagttcctgggcagtgccacttctccaggaccacggactgcaccagccgcgaaacctgagaaggcctcagctggcacccgggttcctgtgcaggagaagacgaacctggcggcctatgtgcccctgctgacccagggctgggcggagatcctggtccggaggcccacaggtactgggcggggctggcctgagcgccatctttctgccagtcacccacagagctgtggacactcaggggcgattgcagacttggccctcttgggatatttgggggtaacttttgttttttttttgagacagagtcttgctctgtggcccacgctggaacgcagtggcgcaatctcggctcactgcaagctccacctcccgggttcacgccattctcctgcctcagcctcccgagtagctgggaccacaggcgcccgccaccacgcctggccaatttttttgtatttctagtagagatggggtttcactgtgttagccaggatggtctcaatctcctgacctcgtgatccgcc

SEQ ID NO: 9868 - DNA, 1150 bp, Homo sapiens
ggggggctccttaggggaggcagggctctgcgtgggtgtgcctgcaccctgggaactggctctgaacttgggggagatgttcttccacatccctcgtgcacagacggtctgcactttgcagccatccacctgggccggccctggctgctgggcagcctgtggtctcaggggatgctgatacctctgctcacgcagtgtggggcacagctggtggcagtgctgctgcgtcaacgggcgggggccgtagcctggtgctcgggctggtctgtggccctgggatggaggacagatagggcctcaccacctccaggtcaaccccaggtgggctcgagggtgcctgctgacaggggttctctttgggatggtcctttctagtcgtcctcagtctccagccaggaggagaagtcgctccacgcggaggagctggttggcaggggcatccccatcgagcgagtcgtctcctcggagggtggccggccctctgtggacctctccttccagccctcgcagcccctgagcaagtccagctcctctcccgagctgcagactctgcaggacatcctcggggaccctggggacaaggccgacgtgggccggctgagccctgaggttaaggcccggtcacagtcagggaccctggacggggaaagtgctgcctggtcggcctcgggcgaagacagtcggggccagcccgagggtcccttgccttccagctccccccgctcgcccagtggcctccggccccgaggttacaccatctccgactcggccccatcacgcaggggcaagagagtagagagggacgccttaaagagcagagccacagcctccaatgcagagaaagtgccaggcatcaaccccaggtgggcctcttgcttccgggcggggctcctgacacctctcctgcgggaacctggtgcctcacttgccccaggccgagcgggctggggtggggtcctcgcctgtgccctagggctggctggaacccctgggagggcggtggagtgggagatggccaggctctgtgttcctccctgtgggctgtggctgccctggccaggccctcacctgggtgcccaccatcccctccctgtgcagtttcgtgttcctgcagctctaccattcccccttctttggcgacgagtcaaac

SEQ ID NO: 9869 - DNA, 1247 bp, Homo sapiens
agggtcccctccccagctcccttgggaaggacacagcagtattggacggtttctagcctctgagatgctaatttatttccccgagtcctcaggtacagcgggctgtgcccggccccaccccctgggcagatgtcccccactgctaaggctgctggcttcagggagggttagcctgcaccgccgccaccctgcccctaagttattacctctccagttcctaccgtactccctgcaccgtctcactgtgtgtctcgtgtcagtaatttatatggtgttaaaatgtgtatatttttgtatgtcactattttcactagggctgaggggcctgcgcccagagctggcctcccccaacacctgctgcgcttggtaggtgtggtggcgttatggcagcccggctgctgcttggatgcgagcttggccttgggccggtgctgggggcacagctgtctgccaggcactctcatcaccccagaggccttgtcatcctcccttgccccaggccaggtagcaagagagcagcgcccaggcctgctggcatcaggtctgggcaagtagcaggactaggcatgtcagaggaccccagggtggttagaggaaaagactcctcctgggggctggctcccagggtggaggaaggtgactgtgtgtgtgtgtgtgtgcgcgcgcgcacgcgcgagtgtgctgtatggcccaggcagcctcaaggccctcggagctggctgtgcctgcttctgtgtaccacttctgtgggcatggccgcttctagagcctcgacacccccccaacccccgcaccaagcagacaaagtcaataaaagagctgtctgactgcaatctgtgcctctatgtctgtgcactggggtcaggactttatttatttcactgacaggcaataccgtccaaggccagtgcaggagggagggccccggcctcacacaaactcggtgaagtcctccaccgaggagatgaggcgcttccgctggcccacctcatagccaggtgtgggctcggctggagtctgtgcaggggctttgctatgggacggagggtgcaccagaggtaggctggggttggagtaggcggcttcctcgcagatctgaaggcagaggcggcttgggcagtaagtctgggaggcgtggcaaccgctctgcccacacacccgccccacagcttgggcagccagcacaccccgctgagggagccccatattccctacccgctggcggagccgcttgatgtggcggagcc

SEQ ID NO: 9870 - DNA, 1150 bp, Homo sapiens
atccgtcgtgcgggggtccacgggccatgaccgtgaggacgtgatgcagccctgcctccctctccacaggtcaccctccacggccaggatgtcctcatgctccctggtgacctcgttggcttgcagcacgacgctggccctggcgccctcctgcactgctcgccggctcccggccaccctggtccccgggccccgtacctctccgccaacgcctcgtcatggctgccccacttgccagcccagctggagggcacttgggcctgccctgcctgtgccctgcggctgcttgcagccacggaacagctcaccgtgctgctgggcttgaggcccaaccctggactgcggctgcctgggcgctatgaggtccgggcagaggtgggcaatggcgtgtccaggcacaacctctcctgcagctttgacgtggtctccccagtggctgggctgcgggtcatctaccctgccccccgcgacggccgcctctacgtgcccaccaacggctcagccttggtgctccaggtggactctggtgccaacgccacggccacggctcgctggcctgggggcagtgtcagcgcccgctttgagaatgtctgccctgccctggtggccaccttcgtgcccggctgcccctgggagaccaacgataccctgttctcagtggtagcactgccgtggctcagtgagggggagcacgtggtggacgtggtggtggaaaacagcgccagccgggccaacctcagcctgcgggtgacggcggaggagcccatctgtggcctccgcgccacgcccagccccgaggcccgtgtactgcagggagtcctagtggtgagtatggccgaggctccaccaccagcccccaggcaggtgcctgcagacagggtgctcacacagggcgtgaggcctggcttcccagtgagggcagcagcccagttactggggacgtcggccccgggcaggtcctgctggctggctcctcgggctacctggtgggctttaaattcctggaaagtcacggctctgacagtggctccgctaactcattccactgtctcatttcacaaaatgaatttaaaactctgctccctgacctcacacgagcccccgtgagtctctcacgccctctgctgtgttctcgcctggctaaagcgag

SEQ ID NO: 9871 - DNA, 1271 bp, Homo sapiens
ccgcacttccgaaactacgacttccggcggcctcgtcgtcgcggggcgggaatggcagcttcagaatcactctatgttgcagatcgaagtctgattggctttgttcatccgtcactcaccgttaggcttcacggactctgcataagggaggagcttcgggtctgggtctgagagaccgtctccaaaagaaatgccacggtacgattggtggaaacaacgcggcagggagcggagcgtaccagcggcgggggaaggcgggcacttccgccaggatagcccaatgacagaggtgggacagtttctataaaagcttgagcctcgcccgcccctgtcttttcggggtcgagtccgagggggaagaggtttgttaatacgttcgccatgtgctacgatcttgggacgaactgagccacgagcgtggctttgagggccgtccgaacgctgcaggccggccaggtccctgggcgtccaggcctggcctacgcaccactttgtcccttagcgtttaaaggtttcttcccgaatctcaggccctcagctacctgcaggtaagactgggccgggcttgggttcccttattctcccagtctgtgatgaattgctttgacttctgacacctcgtatgaaaactgcacgtgcagtctgattatttagcaagactgaggcttgagggtgcgcactcctgacggggagctgagagtggaaacaggtgttgcccgaaacgaaggagtggggacttaatgtctgtattttggcgctgactttcaggtttcgtcgcgagccggctgcaagttttgaacctaagtaaacctcaatccggagggcctagcggtaaggtgggcgctgtgtctattgaagtgcttagcaataaagaaaggtagtgagttgattcggttttctctcaagtgtctttattttcctattctggcaccccagaggtctggctgatccacaggcaatcttggaaaagggtacagacatgaaaacggaagctcgttaccagtgacttttcatctcttgggattgccttctccatttctgcccgtgattttttttttttttttttgagacggagttttgctcgtttcccaggcgggagtgcgatggcacaacctccacctcaagcgattttcctgcctgagcctcccaaatggctggaattacaggcgcccaccaccacgcccggctaattttgtatttttagtagagacggggtttctccgtgttaggctggtctcaaactcctgacctcaggtgatctgcccacctca

SEQ ID NO: 9872 - DNA, 1177 bp, Homo sapiens
agttgggctccggtgactcaccctgcaggttctttctctggggtgtggctggtgtctccccgctgcagcctggtgctggctgggtcctgaccgcacctgtcgtggcaggaaacacattcgtcgtgccttggctggtccctgtgtgactgcgtcccgccacgtgggccacaccctgggcctacccaccaaggcccagccttggccccagggacattcagcctggaggtgactggctgtgactcaggacccagaggagtagagggagccaggcaggggtccctccacctcggggaagagctggatgggctcttcgggagctcagaaaggctaagccttgagggacggtgacgcagagccgcctgcctgcccgggcctctgcatacctgggatcggggtgaaggacctttgcctcctagaggcctgcctgagccggggctggtggtggaaggctgctgcggcggccccacggtgccccacagcaggtctgcacacttgcagcagcccgtctgactcacaggggcctgggctccatctctcaagcccctcatttgtgctccacccacaggaggtgcttcccaaggaccgtagatgcctctctagagcatgagctcaggcaagagtgcccgctacaaccgcttctccggggggcccagcaatcttcccaccccagacgtcaccacaggggtaagggtgtgcccctctgcaagcccaacatccccaggacccccagcatgccccagggatctggtgttgcctgcagagctcccagcgcagtcccgtcccgagctggggtctcaggggagctcggtgggggggggtgtggtgtgtgtgtgtgtgtgtgtgcgcgcgcgcgcgcgcgcgcgcacgcgtgcgtgtgtggttggggcgtgttagtgctgtgtggcgcggcctggttgcatggttaagcgtgtgagtgctgcgtggcgcggcctggtcgcatggttaagcgtgtgagtgctgcgtgacctggcctggtcgcatggtaaagcgtgttagtgctgcgtggcgcggcctggttgcatggttaagcgtgttagtgctgcgtggtgcggcctggtcgcatggttaagcgtgtgagtgctgcgtggcctggcctggtcgcatggttaagcgtgttagtgctgcgtggcctggcctggtcgcatggttaagcgtg

SEQ ID NO: 9873 - DNA, 1099 bp, Homo sapiens
tggctgtgccagggacaccaggatgcggtcctggcccttctgtatcccagcccacacctcaacctcagcttccccctctgtgagtggaggctgtcagggaactcacctggcagaggtgcctcaagaggcaaataaaatggcacccccagctgctgccaggcggccttcagagtgatggctgcgtgctggccatgagcctcagctggctcaattggggtgctggggagcttgtagaggccctgaaagaagaccctgcctggggtaggcagggctggggcaggggctaccgggctcagcgctgggactgtccagatgtagaccgagcccagcgtccatgctcctggcactggtttgaccttgagagggaacccaagcttcccccgtgccatccctgcatgctttcctgcctgcctggccctggggagggctgtgagctacaggggacccacagggtcgggtatccagcatgggccccacctcccccacatctgctgagggagcccccactgagacgccagccctcttgccttgcagctgacgggaccagcacctacaagcagcactgcaggacaccctcctcctccagcacccttgcctactccccgcgggacgaggaggacagcatggtaggtccctacccccaggagcccgtgtgagcctcagcctccccccatcctccctcctgggggaaccaggtcccaggaggagttgacagtgagctggtgaggcacaggagaagaagagcacctgtggataccctgaggcctcggcagacatggcaagtctgtgagaaaggaggctcctgtggctggactgtgggtggcagggggcagccagtgagggcagctgggtcagagggcctggcacctgcaggccaggatgaggcatatttggctccatcttaagggaggtggaaaccacagaaagttcagtcaggaggatagcacaataaaatacatgctttgaaagcttcctttgctgctgggtagggaatgagcggggttgctgggtccaggcagggtttgaggaggggtcctgatgaggcggggggaaaggtgtgtggacctaagctgtggggacaccagaggcaatggggtgg

SEQ ID NO: 9874 - DNA, 1102 bp, Homo sapiens
tgggcctggtgtcccccaccagcaaggccagacaagcagccaggcccggggggcacctggagcccagccgtcgctccctgccagcattcctggcccttccatcctgcggtcacggcctcggctgtccaggattggctggtggaggtgccccctcacggcccacattcccccacgggaagcaggaagcagcccgggtatatggaattgaatagcaggaagtctctccatttacacaaagagaggtggcaggcgtgagcgggcagcccagcaccccggcccaggccgcccaggcgggcaggcagggacctgggttgcatcagctccccacgcccacccacggcccccgtggacgaggagagtacccgcagggaccggggtggccccaggggtgctgctgccctcgcgcttccgccgggctgggtcctgtcctccccgaggctctgaccccgtgcggagccccccgacaggcgcctctccctccacacagccccccatcagcactccccgccgctccgactccgccatctctgtccgctccctgcactcagagtccagcatgtctctgcgctccacattctcactgcccgaggaggaggaggagccggtaggtgtgggggactcggcgcagagcggcttccagggctgtcaccgcagccgtggcacggaggcaccttcccctccgccatgcccgcccagctcacagggagagggcggctggggcctgacgggaactgcagtgcttgctggtccgtggtggggactcgagggaccaggccgggtcccctgggcatgttcccccactcccccttctcagggctgcccgggaactggcagcgggaagcacagggctccagcagggccctttctagtctcaccccaggaaggaggcgggcgagggcggccaaggctgggcggctgaactcatcctccggggttgggccctgcctctggggccacagacctcgctctccctcctgggccccgatcaagccccccagctctaagcaggcctctctcaggacgtgaccctgtcctcagaggacagccaggcctggagcaagagcgcctgggtgcctgggtggtggcggggctgagggtggcc

SEQ ID NO: 9875 - DNA, 1231 bp, Homo sapiens
agccaggctgcacactcctggactgggctagcctgcactgcctgggaaagtcggccgagggcccaaagctgctgaggggtctgaggctggtgcccacccccaagctagtgtgttctctgcccctccctgcccgcgtttcagggcctcggtccatagagaacaccaccaccatggccaggtggaagggtttattagtccctgccagcagctgtcctccctggtgcaggtggcctggccagcccactggattggggacgggccaggctgggccaggtcgggggctcagtctgggaggtaataaaagcagaccgacacgcagatgttgctcgggaagcagatgtcgatgcagagataaatcagccgctgtctccggggccctgtggcgagggtgccgtgaatctccaagggctccgcccccagctcctcaaaccatcccgagggcctggccttcccccacagcggtcctgactcaccctctgctcgccgggcccagtagatgggggtcctcatgcacaggcgctgcaccaaagcccccgcctgggcggggtccacttcgaggctcccctgcactgccagcagctcctgggtgtggtgggtgtcctggctggggacccaagcctcttggacctgttgagaaggctctggtgggcggtgggacagggctgctccctgctcctggcttggcagggccgggtaccctccaacccccagtgatgtccccaccctcagctcttgtcagcagcctgggcttagggcggagagagcttcctgttccctgaaaccacagctccagcctgtcccgtactgggctgcacacaggaccctttgtctagcccctggcccgggcctgcgcccagcaggacggctcaccttggaggtatccaccagcagccgcagggtctcccgatcactgtcctccatcaggcggaggaagcagacctggtgctcctcagggcggtaacagatgcagccctggggaggcaggggggtgaggcggggccccccagaccgacacctgccagggtgacccctccctgcccactcacgctctgcccgtcgaacagcaccgcccagctgtggttgctctgaggtggggtcactgtgatggtcgccgcgttccgggccacgtccaccaggatggtttggttgggccggggcatgtgggggctcgggagggtcattcgcagcgtctgcagccttggctggcagtgggagttggagttcagccggg

SEQ ID NO: 9876 - DNA, 1185 bp, Homo sapiens
attgagtgtctttaatctgcagaataaaaaaaaagaaattgaaaaccagttacccaaattaataggtggggcttaagcatctgctcggctaagtggcttcaaagagtgtaattggagttaagcaaaggcattcattgttaaccttgtaagtacacgtttgggggacgattttgtttacagatgcttgtaatcgaagatgcacttttaggcttggaaggcgttgtgggctgggttctgggccttgggtggggttggcaggggcaggctctgcacctgtccgggattcaggtaaccagggcctgccgatgggactgaggcgggtctaggggtgtgtgtcctgtattttattgaaaaactcattcagggatccagcccctcagggggcagagggactgattattctgactgttgggagaggcttgcatggaccagagccccatcagtatgactgaaagtccagcggagccttctgtgtccctgtgcctcccagcagggtgggagtggaggaggcggctgctcccaggtggcatctccctgcccttgggtgcaaagtgctgccctcaccactctcccacctcccttacttccttgaaaaccactctgatgtcacaactgagtgtctgttccgtttcagatacccagggctgctgcccagttctgtaaacgcagcccagctaaagctctgctgtctcaagtgtgcatttatacccaggtgatttggacggagcagctaccatggcgtggacgccttcactgaactccgggctgcagtgcagggagctcagagcagtgctgctaccagtttttaactttgaacaactgtgtcaggcaatggatttgaattttaagtgtattaatagctgtgctctgtgtcgtaggcaaaattccactgaaggagcctctgtgccctgcagccggcagcgcggctgaagcatgtgttggccaaggaatgcctgtcatccaggtgccctgcagccagcagcgcggctcaagcatgtgttggccaaggaatgcctgtcagtcatccagggctctgggaggggacgagagttatgtccccaagaacaggaagtcctttacaaagcatccagtctcttcctgtcctccccttccctaggctggggtaggggttagagactggtggcccaggaggtcacctgccttgccctggattccctcttcagt

SEQ ID NO: 9877 - DNA, 1248 bp, Homo sapiens
cagagtgagaccccatctcaaaataaatatatacacacacaaaaattagctgggcgtggtggcgcgcgcctgtagtcccagttgcatgggaggctgaggcaggagaatcgcttgaaccctggaggcagaggttgcagtgagctgagatcgtgccactgcactctggcctggagacagagtgatattccatctcaaaaagtaaaactatggggaattgcccagaaagaagctagcttgcccctacagcctgagctactctgatgtggtttctcctcttcccgcaggtcccgctccccgaggcgcaggtcccccgtgcgccggagatcacggtccccgggccgccgccgccacaggagccgctccagctccaactcctcccgataaacaggccactgaagctctcgcccctgtaacttataccccacccagctcagttttgtcacttttctagccaaaggaagaccagtaggaaagcaaacccttgactctggcaggatttgcaggcagcaggcagcacccctctgccagccgggccccggctgcagaagtgctgttggtttggatgctgtgtgcctgtcaagattccctccggttttctggctagaaagctcatccgtttccggtttctaagagtcagttcagtggcagagccaccagggaaaagtgaggctcttgggggtggtttgaccctgcttacctgggagcacacttttcccttccccgatgacctgggatggtggccaggccgtgcccttgctgttgctgggcagtgtccttttggaaagggagctgccccaggctttagtgcagctgccaaccctgttaggcctggcctctcgaggcctcttctgacctcaagggtcacaccccctcaaagatcctctcacccatggtagttgctgctcgtggttctgtctgtccgtgcaccgatgcacacaccgcaccccaccactgtactctgaaattggcgagtgagtggagagccagctctgcggagtcatcacgcagccatggttgtgcctgccgttcatggtggtctttcaggttatcttggcaacatgtacattgcttttattttttttcttttttgctttcattgtacagtcagtactataaaatttctcttttgagttttatacctttgtagcattttagatgacattgtgtttgtactttgttgtgtagagtggaagaattgtgttgaataaacccaagatcggaatgcaaatctagttctgggttcactgc

SEQ ID NO: 9878 - DNA, 3314 bp, Homo sapiens
ccaagctcctttctgttccctcattttatgaaagatattactggtctccagaacagagtctaataagatagttaaggaaagtagtaggtatttaggacttaaatatgatctggcggaaagaaagaaagtgaggtttttgcttgcctgatggcattaaaattaggaagccatcaagtccatctagcattgtggttggcggccctccagggatcctgaacactcggtggcacttcacaatggaattaggaatggccaagaaccaccccccaaaaggggcccctgtgtggctccctgctcctgctaggacagggaccactcagtgtgacattccggggcctgttggagatactcagaggcgggggagtggtgagttctcggctgtgacagccccccaagcgctctcccactccaccctgttgtttgcccctctgtctggatctctcggaacagctggttttctctttgtttccacaggtgaaatatcacctacggttcagttacacacggagaaattacatgtggacccaaacaggctcctttttcctgaaagagacagaaggctggcacactacttcccttttcccgcttttcccaaacccaggaccaagggaacctacatcccctgatggcggagaacctggtgagaagctcggttagggttcgtgttaccagcccgggctgttgactagtgacagtcatatgggggcagccccactttgcaaaagtatttcttgaagaaatacttttcaggacatttggcttggttccaagtctttgctgttgtgaatagtgccgcaataaacatacgtgtgcatgtgtccttatagcagcatgatttataatcctttgggtatatacccagtaatgggatggctgggtcaaatggtatttctagttctagatccctgaggaatcgccacactgacttccacaatggttgaactagtttacagtcccaccaacagtgtaaaagtgttcctatttctcctcatcctctccagcacctgttgtttcctgacttttgaatgattgccattctaactggtatgagatggtatctcactgtggttttgatttgcatttctctgatggccagtgatgatgagcattttttcatgtgtcttttggctgcataaatgtcttcttttgagaagtgtttgttcatatcctttgcccactttttgatggggttgtttggttttttcttgtaaatttatttgagttcattgtagattctggatattagccctttgtcagatgagtagattgcaaaaattttctcccattctgtaggttccctgttcactctgatggtagtttcctttgttgtgcagaagctcttgagtttaattagatcccatttgtcaattttggcttttgttgccattgcttttcgtgttttagtcatgaagtccttgcccatgcctatgtcctgaatggtaatgcctaggttttcttctagggtttttatggtttcaggcctaacattgaagtctttaatccatctcgaattaatttttgtataaggtgtatggaagggatctggtttcagctttctacatatggctagccagttttcccagcacaggaaggggaacatcacacactggggcctgttgtggggtgggggggcggggggagggatagcattaggagatatacctaatgttaaatgacgagtaaatgggtgcagcacaccagcatggcacatgtatacctatgtaactaacctgcacattgtgcacacgtaccctaaaacttaaagtataattaaaaaaaaaaagaaagaaatacttttcaggaacatttactcttgtttataggaaaagtaaaacatccagtataactggtttctgaaagactaaaataatccttgaagatagcaaaggccctttctctatatcctggaagacgtgctcttgaatgaaacatttgtatttcagctttttttcttttttttttttttcagacagaatcttgctctgtcgccaagctggagtgcagtggcgcgacctcggctcactgcaaccgctgtgtcccaggttcaagcgattctcctgcctcaacctcccaagtagctgggattacaggcgcacaccaccacgcccagctaatttttgtatttttagtagagacggggtttcaccacgttggccaggatggtctcgatctcttgacctcatgattcacccacctcggcttcccaaagttctgggattacaggcatgagccaccacacccggctgtacgtcagcttttaaaagctcccgtttgagttcatggggcttggtttacattttctttttctgccgggccttctctgtgtacagacttactggcatttttagctccgtggtccttgtgcacctgatccatggtttgacggaatcagtgtggtgttcatggaagccagatcttggttactctgatgccccatcagtgtgtgtcttcgtgtggacctgggcaggtggttggtacgtgtgcctcctctgaagcatggtcttgtcttggaactgagctagggacagccaagaagtgactcggacccaggactaggcttagctgtcaggccaagaaagaccccactgcaggttctgggtggaagtccagggtgttctggagaacgtcgtatttcacgggtctggcaggagacagaactcatggaagtttgccatggaagtcacagcaacgtcccatccctccatgaggcatgattctgagacacaagtgccaggcaggcaggagacagcatgcatgcagccagcgcttagcgatgtcccttactggtgccagggctgtcaccaggctaatgctctagggcaagattttacatctagaactaagatgaacaagacctggtgtggggtgtgtgaggccccagagcgatgcccttgacaggtcacccagcctggagctcaggagaagctatgtccagctgtcacacatgatgcttgctgcctgcagcaggggactgcaggaggggacactggctgctgagactggggcccaggcaggagctgctcagctccctcctgtttttggggaacaattccctaagcttggaagcaagagaaaaccaatctcaaaggaaaagactgacagatttcagcatgtacaaactggaaatttgccagacacgaaaagacctaatggtggtttaaaaaaaaaaaaaaaaaagcacatagcagactggggaaaacctttgtggcaaatgacacagagtaaatatcttttgttagagaaaaaaagttttgttattaagaatagtcggttagtcctcagcaagacagagaacctgagggggaagaaaagtt

SEQ ID NO: 9879 - DNA, 1153 bp, Homo sapiens
agctctttaacccggggcggatgtcgcgtcccgcgcagggagccccggcggccgggcgcgcggtttaaatgcccggcgggcgcccgagcccctcggagccttcccccgcggcgacgttttccggccctttcctggggcaacgatcgggtcccggggcagcgatccggcgatcgggtcccggggcggcgatcgggtctcggggagccaaacaccagcgcctcctggtcggggaaagggctgcggagcgcgtgggggcgaagcgatcccgcagcccggccgggccctgaccgagcctcagtccagcggggccgtggacctagctctgtggaaagcagcgttcggccccgcgcgcgttgaggcacaggaaacacgaactgtggtttcagctattatcatagtatctgtcctggagccggagaatgaggaatattttatggagaggtctatagaatctttgagaattcgtcgccctggaatacgtttggcttttgcagctgatttaattgctaacaggaagaccccggtcaagagaggggagccgggagcaatcgctaggaagtcctagcaaggcggggagggatttgggcccacagaggggagtggcgcttcctttcaggactggaaggaaggatggatagaaaggtagatttgtagatggggaggcaggatcctgaggttcctgtctgagggcttctgtttccctgtgaaataagggctaaggtcatctgcttagagtgaggaaggggttgctggagtaggagttggaaaatccggctgtgggaagaggagagagcacatctgagaagcatgtccgggctgcctgcctggtgggtggaatgcccgtctcacctttaatgattgcatctgtacacaaacctacaggtctaggtttgtgttgggacctgagcaacaaccttactgcgtagctgtcaactccgcattctacaatagagggcacactgagactctgcagagctgagacttggacgcacactgccccggcctccaagtctgtggcttctctccagggccgacccttctaatttggacttgaaaaccagactcttcaagcccacagatctttattgaacattatgcaccttggtcacgtgtgcaaaaagcaaagctatccagcaaaggccccaggagtttt

SEQ ID NO: 9880 - DNA, 1116 bp, Homo sapiens
atttctctgtttttgggtggctagctggtaacttctgaaaatagctgtttttaataatcacagtgtttgctgggatgaagctgtgatgaggcaggtgctcctattcctgggtgtaaacattggcagaagcctttcggagagcactggggcgtatggccagagacttaacacagcttccccaggcattagccatgtaagaaactgagacctgagccacggtggaaaggccactgacatttcattatatatcttttctcatgtcatctattacttatacaaaaaggaataataattaaaacctgagccatccttgttcccgaagcttgtgaaggtttaagttaagtagggcagtgtgtccacatgcatttggtgcctgaatgggcctttgcttcagaaatggaaaactgcaacatggctgctgtctcacgctcatgtttgtcttttcttcctcagctgtctttagccaaagcctgtgcaaatgcaaaccagcttggactggaggtgagagcttccagtgagatcgtctgccagctatttcaggcttcccaggctgtcagtaaacaacaagtcttctccgtgcagaagggactcaatgacacaatgaggtgaggcattcaggccggggcttctaatcagagcggcgcggaagccagcctccaggggaagggagccctttccacttaaccccagttacctgtgacagggcggcatagagttcccttatcaccctttttttttttttgaagtggagtctcgctctgtcgcccaggctggagtgcagtggcgcgatctcagctcactgcaagctccgcctcctgggttcgagcaattctcctgcctcagcctcccgagtagctgggactacaggcacccaccaccatgcccggctaattttttgtatttttagtagagatggggtttcaccatgttagccaggatggtctcaatctcctgacctcgtgatccgcccgctttggcctcccaaagtgctgggattacaggcgtgagccaccgcgcccagccttgggtgttttttaaaaccagtaatgccaaagttatcgtggactttttggaagaaaatatcctactctgctttcttcagttactttttttttt

SEQ ID NO: 9881 - DNA, 1100 bp, Homo sapiens
ttattatgatgattattttttgagacagtgtcttgctctgtcacccaggttggaatgcagtggtgtaatcaaagctcactgcagcctcaacttcctgggcttaagcaatcctcccaccttagcgtcccaagtaactgagactataggcacgtgccaccatgctctgctaattttttattttttaactttttgaagagatagggtcttgctttgttgcccagggtggtctcgaactcctggctgagctgtcctcctgcctgggcctccccttttttaaatgccccttgtcagccacaggcagctggctccattatgaagcctctgtttgtcaccaaagcccaacgccatggctccctccctaccttgaggcctcctaaagccttgggtccctccgccccacccctgccccaggaagtgggctccaccctgagaccccttctcggcgttgcaggtttatcagtaaagagatcctgaccatccgggaggccgtatggctcacggacaacacttacaagtacgaggacctggtgagaatgatgggcgagatcgtctccgccttggaagggaagattcgagtaagcagcggttccattttccttattaatcttcgttgtcgctgtgctggagggtgggggtgggcattcagctttcctgctgtgggagggcctcatggactcagagagcagctgtctctgctgtgcccaaagccatggagcaggaggccacggttgcaccacgtcgccatctgcgctggtgcgctacgcgtgcagcatcggcgtgaacatcatccgggccagaccctgcgctgggcctgcatgcggcactgcaccaaggagcccccgagcgctgagagcccacaccccgtcccggctgtctaggtccccactgtggtggattacaaggaggtcctgctgacgctagtccctgtggagctgagaacccagcacctgtgcagcttcctctgcgagctctccctgctgcacaccagcctgtccgcctacgccccagcccgcctggctgccgcagccctgctcctggccagactgacgcacgggcagagtaaggagtggcccttcccagggatgcctgtgtcggggaag

SEQ ID NO: 9882 - DNA, 1293 bp, Homo sapiens
atgacttccctccccaccaaccttcctgcagtgacagctcccagcggcatcctcgatgtcaccgtggtctacctgaacccagaacagcattgctgccaggaatccagtgatgaggaggcttgtccagaggacaagggaccccaggacccacaggcactggcgctggacacccagatccctgcaacccctggacccaaacccctggtccgcaccagccgggagccagggaaggacgtcacgacctcagggtactcctccgtcagcaccgcaagtcccacaagctccgtggacggtggcttgggggccctgccccaacctacctcagtgctgtccctggacagtgactcgcacacacagccctgccaccatcaggccaggaagtcatgtttacagtgtcgtcccccaagtcccccggagagcagtgttccccagcaacaggtgaagcggataaacctatgcatacacagtgaggaggaggacatgaacctgggccttgtgaggctgtaagtgtgtcagcacatttgccgcagtggatgtgtactgagggggctggaggcgaagggtgggagcatagcataggaacgctgcatagaccatggaggcctttgcgcagagagcagagaggatgacttgcggccaccaagtttctgtctccgcgggagtcccgtgcaagccatcagaatgttgaaatgagggtgaagagctcagatccctctctttggaaagtttagcctggaagcagttggccacactgtgtggagggcacctctctgtcccttccgtgtctcactgtctctggaagcttcagcccatgtgtgtcctggtgttcccagccccaccagagccccgtgccgggagctgacagctttcacgcttaaggcacgtgtgacctgggtagtcagacaccacttgagcccctgcccacatctgctggtttggggcttcagtggggagctgacagctgtgagcacaccactgtcccctcatccacctcggcctgcatggggcacccacttccttctgggtggggcttccatggtaagggggcctgcgtccctgcacactgcgaggactgccttggccacaggcccactccctacgacacgtgactcgttttagagctctgtcccagaggcgttcgtatgtgacccacagatggcgtcaatgtgaacacctctctttgtgctgaatttctgggccattcttttcctgtcttatttctaaatttccttcttccaagatgaaaacaaaagaaaaacttaaaacagaaggtattaaaaaaacaagagattc

SEQ ID NO: 9883 - DNA, 1523 bp, Homo sapiens
ttctcttgcgggcctccttctgcctgggcctgtctgccattcgtgagtgagccctggccttcccgtcgtgtgcaagtaaggggtcatttgtggtggaagaagtggtctagacttctccttccccctaggcaccgcctgctctttccacagactcaaggcttctcccaacaggctgccgagcccttccccccagcctcctctgttctttgccctcagaatgccttcagagattccattttgcctggccacctgtggggtattagcttgtggctgtcactcattcatccaaacaatcttgattgagcgcttactatgtgccaggtactggtaggacagcagtgaacaaaatgggatccccgcccatgtggaacttaaattctagctgttgctgcttgcccttgaagccctgagtttgtccaccaagccctttttctgcacccagctcctttcctctctctccgtcaagacctacacaggtctttgggcagcctgaccagcaggtgtctggaaattgagaacacggtattgctggcctaggcctttcctgcttatccctggctcttcgggataaacgtggcttactgtggctctccaggagctgacctctgacttcacttggccaattcagacaactgcttttttttttttttttttttttctcccctcctcaagacagggtcttgctctgtttcccaggctggagtgcagtggtgtggtcatggctcactacagcctcaacctcccaggctcaagcaatcctcctgcctcagcctcctgaataactaggactacaggcacaggctaccatgcccagctaattttttttttttagagacagggtctcgccatgtggctcaggctggtctcaaactccttgttgcctcaaacgatccacctgcttctgcctcgtaaagggctgggattataggcatgagccaccatgactggctcaacttctgacttcatttctgccttctcagcatgctttcctccaggacctggcttcacctgctgtgccgacctaaacaagccccctgccctccagtggcctctgctgttgccacaacgccaacctccagctgtgtccccagctcctggcccttggcctgcctggcactgacggattggtcttaaaccgaatgaggtccacaaacctcttgcaggcccccgtcccagcttccccttttttttctcatgacaaatgtcctgttctttcttcatcatgtccttcaagaagttgtcatttgctccttttctgtatttcctgtgacttcctccctgctggcgagtgccttgtattttatgcttgtgtttctgcaactgctttctggccccccactctttctgtggctgctgagcctagtgccgctcacaggtctgccttctgcagtctggtcaggcttggcctccggactggagtccagggtgctcatggtattccgctcctggtggccatccctttcttccctgtgctcctcttggtgcctcctccccctgccagccacatgattcttcctgctgcc

SEQ ID NO: 9884 - DNA, 1214 bp, Homo sapiens
aggatgtcactactgcaatccatctgtggccgattttttccaagagccaatttccttgttttggttgcaagaacctggctctgcctgcatgtcagctctctgccctccctgctgccgtggctttcaagcgcttggcagaatcttgtacttcgtgtccacaatggtactgaatttgcatctgcacagtcagcagagataacaagtgttgaactgaccttgccacatgcttagtgagtgatttgtaattaagtttatagactcagaaggtatattaggacatttggaatcagtagcagagcaaagcctctttgaaaaaaaccacgtagctgattgggttttacaagagtgcatttgtctcccccttccacccgtggggccccaccttcaggtcttagtggttcacaagagcccagcagccaggctggctttttcattgtagggcgtggttgtcccagctggtgtagatttcaggccgccccccccaactccctgcccacagtgttgcagattgcctggctggcagcaagtccagaccacccaaatttggttggattcttcatttctccactgtagttggggtccattgattgtgcaggggaacgtgcaggaggtttttctaggcaccgtgttcagtgctgcttcactctaccagagattatggccaaattgcacggaatttggtttcttgccctctgaagcctgagggcccccccttgcctggctggttgacagacccggggtggtcactgctgagacttcagagatcgcagctgctgtgagaatacggtgaaggtactttgttctggaagatgttgtcatacacttttccccagttattttcaaacttgacatgagcctatgttgactcactgggtgggggtcccttcttacgcagcacacgtggcaagtgcctgaatcggggctggaggcacttcagagcctctgaggggccaccacttctggcccaaaattgcagggttgtagatgaggctgcctgtggagaactggtgtgaggaggaagctgtttccaacaaagagcactttcatctgttgagatggctgtggtgagcaactgaacgagcctacgtgtgtacctgaattttccccgtaactcatttcttccatatgaagaaacaccaaactatgtacagagaactttttacaaaaggcagaccttttttaagctgtgtaacccacatagcctaaccacctgg

SEQ ID NO: 9885 - DNA, 1844 bp, Homo sapiens
ggagcacggcggccgggtgggcgctgcctcttgggggggcctcgctctgttttttccaagtgccacgtgggactgaggcagacactcccagtcagcccgctcgatcctgaagatcgtgtgaaggaagcgttcttggtgctacacacagtctggaaaagcagcctgggcttcactggcaggaagcggccgcagccgcgtcagtgtccagcacgtcgtggcctctggtccgaccaccaggccctagtctcggtcagggagtctgctctgcctcccaggcgggatcgctggtttctctcgacctcgcagagctcctgacaaaggcggcttctgcgtcgtcactgcttcccggcgccattccgaggccgggccttcttctgacacgggctccaaccccacctgaccaagcccgggacagtcaaggcttctcaatttgtattttccaggcaagagaactttgtaccccttctctgtgtggatagactccccagcgtttttcctctggaaatgcccacagggcttgccgcgtggagactgatctgttccatccgttagcgcgaggtagcagtgtcgcctcgcccctcccactgcgggctcacggggagctggcgtctgtcagtgccttgtcacgcctggcatagaggttgggctggaggcctgtccactggcttctggagctgaaggtctgcgtcacggtgaaaattcgggatgtttacagagcatcacaaatgcctctctctcgccgctctctcattttctttgtataactatgcagccttccctctctttctgggatgtttgggacttcactcgacctgcacgggctctgcccgacatgccgtgggagctgctgggattcctttagaaaccgctgcccgcatgctttgaaaacagacctttctcagctggctgtggggacctgtcagagtctggggactcggcgtgcagggcgggctccaagcgctttgcttccggaactccggcttcccaaggggtactgtgcagactgaccaccggcctcccgcctgcaggtcagaggctctgacactgtctggtttccaatgcttctggagacttcctgcctaggcctcatcctcctctttgccagtcacctgattaaccaattctccagcattaggacttacctccttctttttgtaaggtctcttgtatgttgttaaatgtttggcttaaacaatttataaaagcctttctagaaggcagacttagccccagcagagcctgggaggaaggcggccgctggggctcctgggcatcctctctggggagctgctggccgcttagcgttgtttgatttttgaccttgacatagtagataggcttgtggtttttttaatttaaagatattaagacttaattcactaaaatttattctaaggggatatttatacttttatacttttttaggtatcgtattttatcagcttacagtttaatgcctaagtttcccctggaaatagcaaataaaattgtgtatttatgaatgcgcgtagtagctgtttatggtcttaagatgcaggggaatgccaccccgggtcgctcggaccaaggtgctgcccctccaagccgcccagccccactggccgcggcggctcactcagggctctgcctctgcctctcagtcgatggccagggcggagctgggccatccacggggtgccggcttggccagggtcactggatcagagctgcacggcccatccctgcaccccactctgcctggacccctcacctacctccagcagatagcatacccccatcccgggagaccggagaccatgtacaagggcctttttttttccttaagagacaggggtcttgctatg

SEQ ID NO: 9886 - DNA, 1161 bp, Homo sapiens
aagggacagtgtggagagattttagaggaacaagatccttgtttgcctagggtggaaaaagaagaaaatttaggtgtagggagggattatttagaattctgtgcaagggcattgagagaaaggctgtaagaactgggctgtgatttggtagaaaggaaatttggaagggcaaagaagtggttttcttgggagaccaggaggatggtggagcattatacagcgaagacttagtgtgaagatcaatgttgaattagggatgaaggagagcagggacttgggtgtggggcggtaagtggttagtttggggccaggggcctgacccgtgtctccccgctccccctcaggagcggtggtgccccccccgggcacggggccatgtacaacgggatcgggctgccgacgccccggggcagcggcaccaacggctacgtccagcgcaacctgtccctggtgcggggccgccggggtgagcggcctgactacaagggagaggaggaactgcggcgcctggaggctgccctggtgaagcggcctaatcctgacatcctggaccacgagcgcaagcggcgcgtcgagctgcgatgcctcgagctggaggagatgatggaagagcaggggtgagggagagctgggggagagtcaagcactgaatgagtgcagagctgggggtgttaggtgggatgtatagggagcttagggtggttgaaagaggcctggcaaagagttgtggtaggggaggaggcagatgagctctagagaagtgaaaacagttaagggacagtgcagagtgggaaatgagaaggctgtgtgtctggggcatagatgggagcctgaggtactaaatggaggcacgtgggagaagggaggggccattgaggaacaaaaatgtgttttaaggaagagatgggaaagcagagaccaggtagaggagctaggtaagctgataggtgttgtcattggtagaaaagaagaagataaatggatgtaaggattgaggccttggaaagtagcataggcaggaaaagaggaattagaagaatacgtgaagaagtgggaatcatgggctgggaagggaaattttggaaaaggagcccattaaggcagaaaactcttttagagcagtggttttaaacttcagcaatggtgatccttttatacagt

SEQ ID NO: 9887 - DNA, 1286 bp, Homo sapiens
gtggtagagaagtctgaagaacccgcaggccaaatcctgtctcatttgtcttcagaacttaaagaaatgtccacaagtaactttgaatcatctcctgaagtagaagaaaggcctgctgtgtctttgactcttgatcagagccagtcacaggcttctttggaagcagtagaagtcccttcaatggcctcatcttggggtgggccacatttttctccagaacataaagaactgtctaactccccactcagggagaacagctttggatcacctttagaatttagaaactcaggcccacttggtacagaaatgaatactggattttcttctgaggttaaagaagatttgaatggaccgtttcttaatcagctggaaacagatccatctctagacatgaaagaacaatcgacaagatcctctggacacagcagttctgagttatccccagatgcagtggaaaaggcagggatgtcttcaaatcagagcatctcttcacctgtgcttgatgctgtacccagaacaccctcgagagaaagaagtagttctgcatcttctcctgaaatgaaagatggtttacccagaactccatcaaggagaagcaggtctgggtcttctccaggacttagagatgggtctgggactccctcgaggcacagcctgtctgggtcctctcctggaatgaaagatatacctagaacgccatctagagggagaagcgaatgtgattcttccccagaaccgaaagctttgcctcagactcctaggccgaggagtcgttctccatcatccccagagctcaacaacaagtgtcttaccccccagagagaaagaagcgggtcagaatcatcagttgatcagaaaactgtggctcggactcccctggggcagagaagtcgttcgggatcctctcaagaacttgatgtgaaacccagtgcatcccctcaggaaagaagtgagtcagactcttctccagattctaaagccaagacaagaaccccacttcggcagaggagtcggtctggatcatctccagaggttgacagcaaatctcgactatcccctcggcgcagtaggtctggttcctcccctgaagtgaaagataagccaagagcagcacccagggcacagagtggttctgattcctctcctgaacctaaagctccagcccctcgggcccttcccagacgaagcagatcaggttcatcaagcaaaggcagaggcccttctcctgaaggaagcagcagtaccgagtcctctcctgaacatccgcccaaatccagaactgctcg

SEQ ID NO: 9888 - DNA, 2546 bp, Homo sapiens
gagccagccgaaaaatcgaggtcttcacgccgacggcgctcagcttcatctccacgcactaagacaacctcaaggagaggccgctctccttcgccaaagcctcgtggactccagaggtcccgttcccgctcaaggagagagaaaacaagaacaacccgacgtcgagataggtctggatcttctcagtcaacctctcggcgaagacagcggagccggtcaaggtcgcgggttactcggcggcggaggggaggctctggttatcactcaaggtcacctgcccggcaggaaagttcccggacctcctctcgacgccgaagaggccgctctcggacacccccaaccagtcggaagcgttctcgctcacgcacatcaccagccccgtggaaacgctctagatctcgagcctctccagccactcaccggcgatccaggtccagaacccccctgataagccgacgtaggtccagatctcgaacttcaccagtcagccggagacggtcaaggtccaggacttcagtgactcgacgaagatcccggtcaagagcatccccagtgagcagaaggcgatccagatccagaacgccaccagtaacccgccgtcgttcaaggtctagaacgccaacaacacgccgccgctcccgttctagaactccaccagtgactcgcagaaggtccagatccaggactccaccagtaaccaggaggcgatctcgaagcagaacttcgcctatcactcgcagaagatcaagatccagaacatctccggtcacccgaaggagatctcgatctcgcacatctccagtaactcgaagaaggtcccgctctcgaacctcaccagtgacacgccgccgctctaggtcccggacacctccagctattcggcgccgctctagatctcgaacgccactgttaccacgcaaacgttctcgaagtcgctcaccacttgctatccgccgccgctccagatcccgtactccacgaacagctcggggtaaacggtccttaacaagatctcctccagccatccgcaggcgttctgcatctggaagtagttctgatcgttcacgatctgctactcctccagcaacaagaaatcattctggttcacggacacctccagtagcactcaacagttccagaatgagctgcttcagtcgtcctagcatgtccccaacacctcttgatcgctgcagatcacctggaatgcttgaaccccttggcagctctagaacacccatgtctgtcctgcagcaagccggcggctccatgatggatggtccaggtccccgaatacctgaccaccagagaacatctgtgccagaaaatcatgctcagtccaggattgcacttgccctgacagctatcagtcttggcaccgctcggcctcctccgtccatgtctgctgctggccttgctgcaagaatgtcccaggttccagccccggtgcctctcatgagtctcagaaccgcaccagcagccaaccttgccagcaggattcctgcagcctctgcggcagccatgaacctagccagcgccaggacacctgccattccaacagcagtgaacctggctgactctcgaacgccagctgcagcagcggccatgaacttggccagccccagaacagcggtggcaccttcggctgtgaacctggctgaccctcgcactcccacagccccagctgtgaacctagcaggggccagaaccccagctgccttggcagctctgagtctcacaggctctggcacaccaccaactgctgcaaactatccctccagctccagaacaccacaggctccagcctctgcaaacctggtgggtcctcggtctgcacatgccacagctcctgtgaatattgccggctccagaaccgccgcagccttggcccccgcgagcctcaccagtgctaggatggctccagcattgtctggtgcaaacctcaccagccccagggtgcccctttctgcctacgagcgtgtcagtggcagaacctcaccaccgctccttgaccgagctaggtccagaacaccaccgtctgccccaagccaatctaggatgacctctgaacgggctccctccccttcctctagaatgggccaggctccttcacagtctcttctccctccagcacaggatcagccgaggtctcctgtgccttctgctttttcagaccaatcccgttgtttgattgcccagaccacccctgtagcagggtctcagtccctttcctctggggcagtggcaacgaccacgtcctctgctggtgatcacaatggcatgctctctgtccctgcccctggggtgccccactctgatgtgggggagccacctgcctctactggggcccagcagccttctgcattagccgccctgcagccagcaaaggagcggcggagttcctcctcgtcgtcgtcgtcctctagctcctcctcttcttcatcatcgtcgtcgtcgtcctcctcctcctctggctccagttctagtgactcagagggctctagccttcctgtgcaacctgaggtggcactgaagaggtgagggagctt

SEQ ID NO: 9889 - DNA, 2630 bp, Homo sapiens
aagccccaagaagccaccccctggcgagcggaggtgagtgctgtcttgcctgagttgaaaggtgggtgggggagtgacttgtccagagaaggggccctggggtgtgagctccccgctgggtgtctcacgtggccttgggcatctggttgtgggggaggaggcacttgctctcctctccccatgctcgttgcaccctgttctggcgaagggctgcgccatccacagcggcgctcaggccaggaccagggggtccttggtttcttcctctccctccctcaacacatagcctgttcccagggttctagctttgtctccctgttgctactgccagggctctggtctggccaccatcatcttctcccgactctgtccacagcctcctccctgtctccccgtctccacgccattctcttccacatgtagccagagggacctttctaaaacgcacatctggctacttccctccactccacaaatccttcgggacgccctgtggcctgcaggacaaagccccacctctgcgggagtggcgtgtgaggctcttcaccaacgggccttgcccgccctgtgttctcctcctgcccgcccccacacatgccctgtgctccagccacacccagcgccttgcagtctaaggagagcccatgcctttggacatgctgttccttctgcctggaatttccttgtccgcctggtgaactcctcgttctgcaagactccgctcaaaacagcaccttcgagaagactgccctgccccttccctgccttgccccatgtccccctcccttgggtccccagagccacgcacatccagccctgcttcccacacacggggccgtgcgtgcctttcttcaccactgagctccttcaagggcagggactgtctttatctttgcatcccccgctgcaccctgtgcctgcccactgggcactcggtggatggtgtgcgggcggatgggtgagtgagcggacaaaggtgggtctgaggctggccctgtgtggtgtgaggtttggtggtcaggacctgggcgggtggtcctgagtgctggcccgtgtgcttgaaagggtgtggtgctattgggtcctactgtgttccccaggtcccgcagcccccggaagccaatagactccctcagggactctcggtccctcagctactcgcctgtggagcgtcgccgtccctcgccccagccctcaccacgggaccagcagaggtaaggccaactgcaggtgtcagcacccagcctgtctggccgccactgctttctacaaagaagaaagctttgcggttgtggctatgtggtgcctgaggtggtgccaccctgtggcctgatgtctgtcctgtgttgcagcagcagcagtgagcggggttcccggagaggccagcgtggggacagccgctcccccagccacaagcgcaggagggagacacctagccctcggcccatgagacaccgctcctccaggtgcgtgtcctggaaggctgatgcccccttccgggagccagttgtggtggtgggtggcggccccattttgggagtggcccagaaactggccttgagggctggggtgggaactccctgttgacccatatcttctcttgcaggtctccataaattgtctttgggggattccaccacacccaatgctctggagccacaaggagtgtcccttcttccccagcagagccgtgggagggtccttgtctgctctcctttgaaccttggcagcccttggatggagggctccctttccctccccttttttttttctttgttcctgtgaaatgttaatctccgtgagttcttcctggttcatgtgttctggggggtttggggtgggagggaatgcagatgggagttgggggaggggaggatacagttcaggataccccagcctggagtcagggccagggaggcatggccccacttgtatccagaagttcccaggggtgattgtgatggtggttgggactggaggttgtataaggtgttcttggaaggaaggggcaggagttggaattagttggtccctactgtcccccatgaggttgtgaacccctccccccaacttttcatgtttcttaaaggcattttggttttttaaaatctgtacagcaagagcaactttttctgtcaaataaaaatgagaaatgcaggaactgggtctgtagactgtttattaaaggtgtgttaagggggcagccacttccctccgtgattacagcccccagcgtgggtggacctgtgtgggtccgtcttggggttccctcgttgaacatgctgtcaaaccaggacactggctccagcttgtgtttctgctcttggccatcgtctgggagtggacatgcaggctatgggggtggggggcacttagaaggagaaaggcctaaaactggaatctcttgtccctgaggctggctctggtctttgtgtctctcccagtccttccctttcctccccctggcgtggttggtgtggctggctagctgctaacaatggcttgggtctcagggcaacccaggtccccatggtgcctttaagcagcaggctgggccaagttctcagccagggtctcaggatctgggagacaggacagcacaggaactgccaagcacaagccccaaaagg

SEQ ID NO: 9890 - DNA, 1242 bp, Homo sapiens
ccactgtgttgtgtgtcctctgccataggcaaaggatggacgggtgggcaagtctgcccttggcccaggggtgccacttgcccaggcttatgcagatgagtctaggcgtaacgcaggctaatggcgagaacagagcatcctgcctcttccagcaacacgacgcaaatgtcctgccatatccgggcctgggagaggccacaggctgcagctggccccccagcagcccttccagaggccccaaccccaggtgtctccgtccactcttggtccaggttacgtctgggccaggtgactgtaacagcccaggcatggggaggggtctccccctgggcactggcatggagatgtgacggagtgtggtttcacggcggccaactgttgctgcaagagggatgtgaacaagtaccagctccacacggtgagatggaaaataggatttattgggggaaccgtacaagcagaggagaagcaggggtgcccaggctgtcacagccttgcagtgcatggtgggttccgtggccaacttgccaggggacaggcctgttgctggcactccccccacaattacagggtgggagtgaaggacctcgcggctgcggacaggtccttgttagtaaggaggaggctctgcagtcccggtggggtcatcttgcctctccggactgctccctctgactggtgaagccacactctgtgaagctgtctgacagaaggggacacgcctttgctgcccaggatggacctgggccacccaggatgccgctggcctcagccagggcacgtgtgcccagcgctggctcctgctgacccctggactggctcccatctcgggaatgacgcctgccgtgggaatcgtggagagggggtttaatttaacttggaaggagcacagaaaggaaagtgtggagtgcggagcgaggcctctggtttggccagctccggttgctggggatggccacaccctggcagcaggcggccagagaccaggaaggcctacccagcacctgtccagaagagattggtgtgggttgacctggcctatgcggggcagctcagtttgaagcaggaacttccccaaacgtgcccaggctccaagacagcagcattcactttgcaccgtgctgagcagagcggggcctcgccaggtggaaagccctaggaaggctgcgtgctctgcaaacccaggggtgctgtggccgtacagcaggggcgtccgtgtccaggcagctttgtcatgtcttc

SEQ ID NO: 9891 - DNA, 1181 bp, Homo sapiens
tcagtgcaggtcggccctggctcctccgtcgctgggtctccacagacccagcccgagggatggaggtttgtctggttttgttattaccctgggcaggggtctgagacagatgccagctacaccaccgtgccccgtgtgtgaacccttaatggggtctgccaggttgtccccctatgtgattgtgccacttgtggctcaccctcactgtgtgcgtgggtaccacctcccttccaggtgcgctccaaggaggacggccggctctatgcggtaaagcgttccatgtcaccattccggggccccaaggaccgggcccgcaagttggccgaggtgggcagccacgagaaggtggggcagcacccatgctgcgtgcggctggagcaggcctgggaggagggcggcatcctgtacctgcagacggagctgtgcgggcccagcctgcagcaacactgtgaggcctggggtgccagcctgcctgaggcccaggtctggggctacctgcgggacacgctgcttgccctggcccatctgcacagccagggcctggtgcaccttgatgtcaagcctgccaacatcttcctggggccccggggccgctgcaagctgggtgacttcggactgctggtggagctgggtacagcaggagctggtgaggtccaggagggagacccccgctacatggcccccgagctgctgcagggctcctatgggacagcagcggatgtgttcaggtggggaccggggcacgccaggtgtttggcaggctgtgggaggcccttcctgggacggaagctccattccccaggagggaagctccaccctagcccaggacacccggcctcagagccacaaggctgagacgccatccctgccctccagtggagagcgtctctggtcaggctgcctgtgagcctcgaaccctccagagccactttgtgtaacctgcctcctcacagctccacaggagaaacaattgtcactccatttacagccagattaagggccttgccggagcccactgctagcaagtggcatagctgagactggccctaggtgctgggttccagggtccacactggtaaccactgccctgatcatcaggatagtaatacctgccagcagtaactgtggtgcctgtccatcagggcactgggaggactcaccactgtggcttgtgggctccc

SEQ ID NO: 9892 - DNA, 1145 bp, Homo sapiens
gtgattctccggtgtcagcctcccaatgtgctggcattacaggtctgagccaccaggcaaggccctggcacttttagcgctaaaaagggaaaagtctcaggcgggccaggatgggctggtcaccctagatccattgcgcccttgatttccagatgggacccctccccacccagccacacaccctgggggaggagacctcctgctgtctcatgccttcctgcgaacccctttgtcccctgcaggcccctggttctggcgcctccagccctccggacagctggtgtccccgcgacccgcacggctgcaccgcttctgggaggggctgcccgcccaggtgagggtggtgcaggccgcctatgctcggcaccgagacggccgaatcctcctctttagcggtgagtggggccggcggcggggcgcgctggggccggcgcggggagcccacccctgacctcccggcctccaccctgcagggccccagttctgggtgttccaggaccggcagctggagggcggggcgcggccgctcacggagctggggctgcccccgggagaggaggtggacgccgtgttctcgtggccacagaacgggaagacctacctggtccgcggccggcagtactggcgctacgacgaggcggcggcgcgcccggaccccggctaccctcgcgacctgagcctctgggaaggcgcgcccccctcccctgacgatgtcaccgtcagcaacgcaggtggggagcgcggtgacctgcgggttactgggcctgggggtggggagagggatgtggggaatggggacatggaggccaccctgcggggatgggggtccttgggcatcagggagcggcggggcggggagggaccgggactcaagctctgctcctccaggtgacacctacttcttcaagggcgcccactactggcgcttccccaagaacagcatcaagaccgagccggacgccccccagcccatggggcccaactggctggactgccccgccccgagctctggtccccgcgcccccaggccccccaaagcgacccccgtgtccgaaacctgcgattgtcagtgcgagctcaaccaggccgcaggacgttggcctgctcccatcccgctgctcctcttgcccctgctggtggggggt

SEQ ID NO: 9893 - DNA, 1189 bp, Homo sapiens
acggccccaccatccgctcaagacacaaaggacagctcaagcccaggctaggcccgaacccccgccctctcaatcaccttgctctggccagaccgaaatttcaggcctacagggcactgttggccgaacccacattttgttaccgattttctttcgagttccggtgtctcccagtcttctttctgtccttcttctcggaaacattacgtccccctggggtcaccctaagactctacttcagcaggcaaacaggcccggagctcacggaggagaccccgccagcggaagcggaaatggttgcttagagaaaaggaggaaaactacctctcgcagctgcccagtggctacaggtcctcggttaaggtgttcaattggtcaacacaaaagaaggacttccccttcgggagaacttcgaccaatcaaagggcaggatggcggagagggctgagggcgggtcgcttccggcggcttttcccgcagctcctgcgtaaaggagcatgagagcgtgggagttttgcagtggccgtggcgttcttcgtcgcgtctcggtcgggcgtcgctttctgcagctcctgtcagggagcgcgaggcctgttattaaccgcggagcggtaagtgggcccctttcgaggccgggccaagaggaggagcagtcggcgtaggtttttaagggggggttcggagggaatcgagggaggctaggggtagtggaggaacttggcagcggaattggtccctttaagaactgttctctccccccgcagctttgtcacgaagtccctgtggcgtcttgaagaaggcattccccacccgccaaatggcgtccatgcccccgacgcccgaggcccaggtgagtcgaggtacctttttcgtccaagtttattgctgctttcggtctctgcctgaccccctcctttggaggagagttgggcatgcctgttgtggtaggagtgctcctgagccccaaatagccctttgaccaagtgttcttcgttccaagaccacacacataatggtttaccaacttccttctttcagaactaccaactgggagcagggacctgtggaggaatctctgagagagtttctcaatgtcttatctgtttgttttgttttgtttggagatagggtctggccttgtcgctggagtgttgcttgtctggctggagtgcagtgctgatatcatagc

SEQ ID NO: 9894 - DNA, 1395 bp, Homo sapiens
gcagagccggaaggggccgtggggactgcagagtccaccaccttatgcaccagcacagcccagaggtttggtgacttgtgccaagctaacacagcaggctccatggcaactgggctgtgcacccgactttggatccatcagtgcctttatttgtgtggggaccgagaggcgcctagtggctgcaggcagacaccatggcctggagaagggctcatgctcctggagcacccaggcccagctgtgtggcccataggcagggtgtggggtgggcagagtgtctccgccgggccttcaccctgccctgctcttctctttcccacaggctcttcagctcccctccctgcttctggaaacctctgcctgctgccctggccctgcccccctgcgcatgcaccgtccccagggctgacccagtgtggctgcattcactgggaggggcctgccctcactgggcctctcccactccgctgcctgttcttgcagctccttcctggaaagctggaggggactttctcctgcaagggaggaacgcaagtattatggacacacttgaccgtaaaggcacaggagcctcggaacaagggggcgcaataaagggaatggcccgtccccttccagaaccagcccaaagaagcctggggggtgaggagtggcccccactcctccatgaggggctgatgaggggtgggcagcctgggggaggctttcctcgcaagcacagagctctgaggctcagccccctggcacaggcggtcacgcatcaggacggttcctactcctcagcaccttccgtgcagttaccagtgccctgggaggtcacactgcccgtcggaccttggcatgctccattcagctgacctgctgaggacaggcatcgccgagactccttgggtcctccccgccctccctcatgctgccacaagctgctgctccaaggcctggccacatgcagacaggaggaagctgagctcgacattaggcctcaaggctgccatctgtcttgtagggcctggccttgtgggcagggggcagtcctgtgccttgtgggccctcagcctctgagggcagagatgctgtcagtgccgcaggtgcatcacatacttctagcatcctctccaccctgcattccaaatgctgcttgctgcctgccctgccctccgatgcaggggtggggtggggggcggagtcccgcccagcatagctgcagtgtcacaaagccatggcagagggtcctagcggcgccaccctgccccagcctgaggaggagggagagggaggaacaaccctgggcagacggggcctcagggacctgtgtccttccgcctccagagctgcccagccacgggctctcagggtgctggggcagccccaggtcccctcttgaactcagctggg

SEQ ID NO: 9895 - DNA, 1226 bp, Homo sapiens
ctgcaacctccacctcctgggtccaagcgattctcccgcctcagcctcccgagtagctgggattacaagcgcccatcgccatgccatgcccggctaatttttttgtatttttagtacagatggggtttcaccatgttggccaagctggtctcgaactcctaacctcaagtgatccacccactttggtctcccacagtgctgggattacaagcctgagccactgtgcctggcctgtttttgagtcaggggtcttgctctgtcacccaggctgaagtgcagtggcgcaattacagctcattgtagcctcgacctcccaggctcaagtgatcctcccacctcaacctcctgagtagctgggactacaggcagctgccaccatgcccagctaattttttttttttagtagagactgggtcttgctatgttgccctggctttgggcatacattcctttgtatgtctaataccccactgatggtatgccacattttgcttatccattcatctactagtggacacacgggttgtttttaatttgtggttattaataatgccacttaggaatattgatgtgcaagttttcgtgtagacatgttttccttcttcttggttctgtacttaggagtggaattgctgggtcatatggcaactgtgtttagcattgtgaggaactgcgagactgttttccaaagtgactgcaccattttaaatctccaccaacacttgttattctgtttttgttgttgttgttattgttttgagacaaggtcttgctctgtcgcccaggctggagtgcagtggcgtgttcatggcttgctgcagcctcaaccttcctggctcaggtgatcctcccacctcagcctcccgagtagctggaaccagccacaaacagctgcccacattggtgacttgggccaccacaccctgctaactttttttgtatttttttttttttttttttgtagagatagggttctgccattttgcccaaaccctctgtgttttttgttatggccatcctagtgggcgtgcagtggtatctcactgtggttttgacttgcatttccctgatgactaatgatgtcgggcaccttttcatgtgcttattggccatttgtagatcttctctggagaaatgtctgttcacatcctttgcccttttttttttttttttttgagacagagtcttgctctgtcgcccaggctggagtgcagtggtgtgatctc

SEQ ID NO: 9896 - DNA, 1255 bp, Homo sapiens
agtcccccaacaaaggctggtctaggtgggggtgatggtaattttagaaatcacgccccaaatagcttccgtttgggcccttacattcacagataggttttaaatagctgaatacttggtttgggaatctgaattcgaggaacctttctaagaagttggaaaggtccgatctagttttagcacagagctttgaaccttgagttataaaatgcagaataattcaagtaaaaataagaccaccatctggcacccctgaccagcccccattcaccccatcccaggaggggaagcacaggccgggcctccggtggagattgctgccactgctcggcctgctgggttcttaacctccagtgtcctcttcatcttttccacccgtagggaaaccttgagccatgtgttcaaacaagaagtggggctagagcccgagagcagcagctctaagcccacactcagaaagtggcgccctcctggttgtgcagccttttaatgtgggcagtggaggggcctctgtttcaggttatcctggaattcaaaacgttatgtaccaacctcatcctctttggagtctgcatcctgtgcaaccgtcttgggcaatccagatgtcgaaggatgtgaccgagagcatggtctgtggatgctaaccctaagtttgtcgtaaggaaatttctgtaagaaacctggaaagccccaacgctgtgtctcatgctgtatacttaagaggagaagaaaaagtcctatatttgtgatcaaaaagaggaaacttgaaatgtgatggtgtttataataaaagatggtaaaactacttggattcaaagatggttcagattggctaatgacttacagttagctcaacggctcgtcattataggattgcagatgcgggcccggtgcggtggctcacgcctgtaatcccagcactttgggaggccaaggcgggtggatcatgaagtcgggagttcgagaccagcctggccaagaaggtgaaaccccatctctattaaaatacaaaaaaattagccgggtgtggtggcaggcgcctagaatcccagctactcaggaggctgaggcagagaatcgcttgaacccaggaggcggaggttgcagtgagccgggatcgtgccactgcactacagcctgggcaacagtgagattttgtctcaaaaaaacgattgtaggtggtgctggccgggcttggtggctcatgcctgtaatcccagcactttgggagtctgaggcgggcagatcacatggt

SEQ ID NO: 9897 - DNA, 1230 bp, Homo sapiens
gctgtccagcgaactgtccctggtcggggacaccacgggggacacgctagagaagtttgtggagggcttgtagcattgtgagagcatcaccttttccctttcatgttcttggaccttttgtactgaaaatccaggcatctaggttctttttattcctagatggaactgcgacttccgagccatggaagggtggattgatgtttaaagaaacaatacaaagaatatatttttttgttaaaaaccagttgatttaaatatctggtctctctctttggtttttttttggcgggggggtggggggggttcttttttttccgttttgtttttgtttggggggaggggggttttgtttggattctttttgtcgtcattgctggtgactcatgcctttttttaacgggaaaaacaagttcattatattcatattttttatttgtattttcaagactttaaacatttatgtttaaaagtaagaagaaaaataatattcagaactgattcctgaaataatgcaagcttataatgtatcccgataactttgtgatgtttcgggaagatttttttctatagtgaactctgtgggcgtctcccagtattaccctggatgataggaattgactccggcgtgcacacacgtacacacccacacacatctatctatacataatggctgaagccaaacttgtcttgcagatgtagaaattgttgctttgtttctctgataaaactggttttagacaaaaaatagggatgatcactcttagaccatgctaatgttactagagaagaagccttcttttctttcttctatgtgaaacttgaaatgaggaaaagcaattctagtgtaaatcatgcaagcgctctaattcctataaatacgaaactcgagaagattcaatcactgtatagaatggtaaaataccaactcatttcttatatcatattgttaaataaactgtgtgcaacagacaaaaagggtggtccttcttgaattcatgtacatggtattaacacttagtgttcggggttttttgttatgaaaatgctgttttcaacattgtatttggactatgcatgtgttttttccccattgtatataaagtaccgcttaaaattgatataaattactgaggtttttaacatgtattctgttctttaagatccctgtaagaatgtttaaggtttttatttatttatatatattttttgagtctgttctttgtaagacat

SEQ ID NO: 9898 - DNA, 1153 bp, Homo sapiens
ttttttttaattttttttttttttttgagacggtgtttcggtcttgttgcccaggctggagtgcaatggcgtgatcttggctcaccgcatcctccacctcccgggttcaagctattctcctgccttagcctcccgagtagctgggattacaggcatgcgctaccacacccagctaatgacatgactcttaagacatgctagtgttcgtgctgaatgccccattaggttaagatcatagaaacgtggcagttggagagctgtaaaggttgcttagtttctcatttccatttctgtttaatttctagattttggatcattgtttgacttggaaaatgatcttcctgatgagctgatacccaatggaggagaattaggccttttaaacagtgggaaccttgttccagatgctgcttccaaacataaacaactgtcggagcttctacgaggaggcagcggctctagtatcaacccaggaataggaaatgtgagcgccagcagccccgtgcagcagggcctgggtggccaggctcaagggcagccgaacagtgctaacatggccagcctcagtgccatgggcaagagccctctgagccagggagattcttcagcccccagcctgcctaaacaggcagccagcacctctgggcccacccccgctgcctcccaagcactgaatccgcaagcacaaaagcaagtggggctggcgactagcagccctgccacgtcacagactggacctggtatctgcatgaatgctaactttaaccagacccacccaggcctcctcaatagtaactctggccatagcttaattaatcaggcttcacaagggcaggcgcaagtcatgaatggatctcttggggctgctggcagaggaaggggagctggaatgccgtaccctactccagccatgcagggcgcctcgagcagcgtgctggctgagaccctaacgcaggtttccccgcaaatgactggtcacgcgggactgaacaccgcacaggcaggaggcatggccaaggtaagtgaactgaagcactttcaatacttcctacctaaccgcgggctttccctccgagtaatgcgtaaaatgggaccacgtggcccactcctgtttttcctcttgggctctccacgtgccactcatgcttggaag

SEQ ID NO: 9899 - DNA, 1188 bp, Homo sapiens
gctccctgcactgagcgggtttaggggctcgcccacatgcatgcaggccaagacagcaaatgccagccgggcacgacgcccgtgtgcccaggcctcgggggtctcagagccgcctctcacccccgaccctccacccaggggtctccccatcgggagtggaggtgttggtcctggaagctgactcatcggagagggaaataccaaataaacatccgaggttgcatttatttatttatttatttacccggaagcatgtgcgctcccgggaggggtgctgggtcctcagggtggggggtcatagccacaggggagggcagttcccaggaaggtaaccagatgtctcttttgtgttttggccacctggggccgcccccaacctccccaccccaagaggggtctgagtgggacctcaaagcatggccagtgcaattctgaggctaggggaataggagaagcccaccagctgcccctgccacccacgggggctcctccctgccggggtccagctcagaaccacgggggtctgtgccggcagcaccggtgccatcttggcttccacaaattccagaagtttcttggctgcctcccgctctcagatggcacagggcctatcagtggcaggatttaatctggggagcaaattccagctctgaaatggagttctcacaccgtatctagggacagaggcatctggatgcaaacgcggggtttgttaggggcggaatcccgagggtggtgtgggggagctccgtccgggcagttggctgctggtcctgtctgattatgttttgccatattgagtctgaagtttgtgtggaagtgagctcgcccgagttgtccggtcggagttgtagccagtctttcaggggaccccgggacgctgatgaggcccagggtgcactccttgtcagtcttgcccgttgtccctgtgcattttgctttccgctgtcaaatctcactgtctcgttttcacaccgcatcagtccccatcatcactactcctccccagagacatacagattgccctccccggcatgaagaagtcacaattctgacccgccacctctccaggggcggtgcctgggatggccacccatcaggacagccagagccagggtcccggcgtcctgagagtccagggcacctccccccattagctgtaaggtttcctgtcaggtgtgactgtca

SEQ ID NO: 9900 - DNA, 1197 bp, Homo sapiens
ttcaaagaacagaattccacactagttgttatctaggaatgcggagtgagtgatagagggggttttggtggcgttatattctaattttgaagtaagtttaaatttacagagatgctcccaaacagtataaagaattcccaaatactcttcacccagattccctgaattaacattccgacatgtttgtctgtctgtctctccacatacacacatcccttttttccggaataatttgagaatagactgcagagagtgcctctagattctcctgtgtgggtttcctaaaaacaaggacgctgtcccggatagcctgcaccgacctgcccaaatcaggacgtgggcactgtcacaccatgccaccaaatgcagaggccccggagcccgcccaggaccacaggcgccgtctgtgtcaatggctctcgagtctccttcaatctggggctgttccttcgtctctgtctttcacgaccttgacatttttttaagagaacaggccagttactttgtagaatgtccctcggtttgggctggtctcatattccttcatgatgagaatcaggtggtaggttcctggcaggagagtccctgcagggttgtcacgacaggaacgcacacaggtctgatcagtcccatttctggagaagttaacttatcatttggttgaggtggtgtctaccaggtttctccactgtaaaattaatttgttggtattttgtaattatcagttaaaaagtactgtttctggtggggagattttttggggactcggaaaatatcctgtttctcattaagctttttgcccatttgttttagcatcctgggatgattcttgcctgagggaattagtatgagcattgccaaatggtgatgtttctagttgcattgtttcttttgcattgattagttggcattccactgcaagctggagcttgcctgctgtctttctctccttcctatcaatacactcatagactcctattttacccattgggttataattcattaccattatcatttgcttcgatacccagattgtcccagatttggccaaaagcagcgcctccaagctggcccctgtgttcttttgatgtgttcatgtcattctttgagcacatctttacttcttcttcttttttttttttttttagatggagtcttgctctgttgcccaggtgggagttcagtggcgtgatctct

SEQ ID NO: 9901 - DNA, 2006 bp, Homo sapiens
ggacactcgacaactaagaacaggagttcccaggaaggacaaggatctgcctcccccactgccacttctctgatgtgttcctcaaagctggctcgagggctcgatcccttcatcggacccaggaggggactggttggtgtatccaggtaatttactcttggaagtgactgtagtgaaggtcgtggaagggctcagagggttaattggtttgcagtgcgtctttgtctattgcatgtcttggaaaactcagatcccaaaggcgctgggtttcagagaggacagtggagaccttgctccttttccttaggccgccagtctctcaaatttcagaggaggctgtttccacaactcccctgtggaaacacttggcagcggagttgctcctttgcagtttccacaccatggcttttcctttcctttcttctccattccctgatgcatcaacacttacttggagcaatttcctaggagtcagaaccagcaccagccactcggtgtcggtggccaccaaggcttaacattgaccttcccgcctgaccttgatgcagatgtccactgaacacaccgcaggaaagccagggccttcaataccaataagtgtgaatatgtgtgtatgttgtccaagagagattagggagatcacatagactctagggagtagagaacttgtaacagtcttgcaaggctagcatgcacggctccacagcaggtggtggggagcagaggggcaggacctgcagggaagaagcagcctttggatggtgaaatgtgcatggtgcacagtctgtgcatgcccaggagacccagcccgggctgcctcgaggggctcctttgtacacagccagccgcttctcttgggaacaagctgtcctgggggccttacccacgaggcaggagtcaggatgcaccagctcagcaccaggaagtcatcctggacccaggacagtggaaaggcaggcagagggagaggcactctgaggtcaggcagggtaagccagttggcagtcaggttaggtctatgaggagaacctcgagttaggaattcccggttctcagaattgttatcactctggtgcatgctgtcacaggggccgttgcgtttggctttgtggagggcctggacccttccacaagaacacccgaggttccagggcactcaggacaatgtttccaaggaacgagtcgaccaggaaagaacagtgagttctgcaaggggcatccacggagcctgtgataggggctgatgagatggaatctgtcctggacttttcttctcattaaccaccctccgcaaaccccagaacccctcgcctcatctctgtactgtctgccctcttgggggatgggccctcccactttcccctgcctgctcctccatgctgtgagctgctttggcagatctgtttttctgtgtagtcaggggaaaaacaaaaaaagatgcacaactgtgtgggcattgtcatagctgttggtgtcaccactgctttgggggaaatggctgggatgaggctaatacattcatgcaatatttatattttcagggggctgcgttatcagcatgctctccctgccttgggcttttctttccgtcatgttttccttttcgtgttccttctctgatttctcttgtctctgctgctcacaggcctgcccatcagtcagtacagatactcagtgtctggtttctggccagctccgtggagggggctttaagcagaattctgactctttggggtgggggattaggaactgggggaaacttaatgatccagagattcccccaagaggagtgtctggaaggatctgtgcctggacagtggcagaacctttccagtgttcttttggttctgatttcatcagtctcaataaagttccgatctctctttaacaccgcgtgctttctcatggtctccagctaggttactctcttcatcctccttttatctggtagagttaactcatgtgtaagttccttggggagagactggaaattaagaaattgccca

SEQ ID NO: 9902 - DNA, 1099 bp, Homo sapiens
aagacctgaatcaggtgatcgagaacagactggagaacaagattgccttcatccgccagcacgccatccgggtccgcatccacgccctcctggttgaccgctacctgcagacttacaaggacaaaatgaccttcttcagtgatggagaactggtctttaaggacattgtggaagatcccgataaattctacatcttcaagaccatcctggcaaagaccaatgtcagcaaatttgaccttcccaaccgcgaggcctataaggacttcttcggcatcaatcccatttccagtttcaaactgctctcccagcagtgctcctacatgggaggttgctttctggagaagattgagcgggccatcactcaggagcttccgggcctcctgggtagcctcgggctcgggaagaatccaggtgctctcaactgtgacaaaacagggtgtagcgaaacaccaaaaaatcgctacaggaagcactaggtggtggagcggtccttgggttcctgttggtgaatcagcttgtgtcctaactgtctgagaggtcctggtttattaaccctttgagccacactggcaggaattattacacagtggagagttgggagttcattgaggccaggggtcggggcaggtgtgtgggtctagggaggagagtggaaactgtgaattcctgtgtgcttgtcttgttgcttcaatgaggaggcctgattgaggcaagtcagcctccacctgcttttcctgggtcctgtcttggaaggacagagagcagctaaattctagtgtatcttaaatcagtgagggtcaaataagctaaaagcagctgaaattcctttgttccctgtgagctgggaaaacagcgaaggcctgagtcgtagagattgtcaggtccattttggcttctttccacacccacagtctcgcgtttgttccccagccctcggctgcctcttaactttgggttgactttcaacagtgaatagtctcttgggtctgaatatacctgggtttgtttttgtgtttttgagacggagtctcgctctgtcggccaggttggagtgcagtggtgcaatctcagctcactgcaacctccccctcctgggttc

SEQ ID NO: 9903 - DNA, 1196 bp, Homo sapiens
ccgtagctgaccactctctagcatgtggatcagtggctgttaaataggatttcttttgcgtggccttacaacttcctccttccagtgcaggcgtgtcaaggtccttaacctgccgagacttcaggtcaagttattgcaagttctgggaagactcagcttcccagctccaccgcctgagcccaagggatgctccattttatgcctgtcacccacgccctgtgacccatgtcatgtgatcccagggctgcaggggttcgggggaagagaatccagccacggccctgccttctggggcctggcagctgggacagcagtggcgcagcctgagcctctgcacagccttctggggtccgggcttcttccccatcacaccctcctagttgccctggtgactgtgtgacccctctcccccctccaccgcctgctgccacggccggccgtataaatagaggcgaggagcagctgggctctcttggcagtcaccatgagggcgctggtcctgctcggctgcctcctggcctcgctcctgttctcaggacaagcaggtagggcccctcccagcatgacccagcccagactggtcccccacgcttcctccaaggttttctgtctaccatgggttgggtagggggtcggggctgatggcaaaccctggctcttggctggtgtcttcttacccttctcttttccccgggcctggggcctcagagaaagagctgggtgctggagaatagcagcacagttgcggggccctcaggaaggccagaggaagtgggaacggcaaacagagctgagctgtgagccagggtcagagaggagtctggccagtagatgtgggaaagagggccctcaaagtcgagacgggggagcctctgagacggacaaaatagcacagtctgggagctggaggtcgttgaggtgaccctcccacctggtgggatataaggcggaggccccactcgggtaagagaactgggtttgcgtggacagaaggggatacagtgggcaaaggtggggaccgttttgggagcagtgagatagaattggaattggtttgggataagatcggaaatagagttggcggttgggctggaaacagcattggatgcaattcagaagaggaacggggcccgttctggagtagagcctctgctcggggtgggggcttccatcagaaaaggggcttggctctgtgt

SEQ ID NO: 9904 - DNA, 1099 bp, Homo sapiens
tctctccttagagaaactgcctaacaggttgcttcaaggattggagagcgtgtaagcaaaactgctcggcatccaccgggtgctggcaacatctaataacaatatttcccaataataacagtaactattgttactagtaggaataagtcaaattaggaggcgcgatttaggcggaacctggaaggcggtgggcaggatccaggacattccaaggcaggcgtgggcttcctgagccaggagccaaccctccaggagccaggggagggcctggggccggaaggtgcggcgtgcgagcggaggacggaagctcgccgccagggtccccgtccctgccccaagtcgtcaccccctcttggggagcgcatcctggcggaggggcaagtcccacacgggctttgttatgaatgggaagctgcagccttcagcccgcggagggaacagtgcgggtctgggggaatagcaggggacccggcagcaaccagcagacctccccgcagcgctggcagcctgcgcccgggggccgctgccgttcaggcccgcctccaccctcccctccctgccggggcccccggcttcctagggcggccccagcatccgaggcgccctttgccgtcccgtcgccgggtccaagattcccaggatccggagtcccggccgtgcggccagctaagcaaggcgggagggaggaagctggccggcctccgaagtcagccccgagttacatgtgggaagcggtggctgtgacgcaagtttccagggggccctgggctcggctcgaagggagcacaccggagaggctccgctccgtgcagctgcaatggtgaaaaagcagaagccccaagcgcgaaccccaggccgccttccttgctgccgctgcacgcccgacccagccgcgccccctcctccctgcgggccggccgagcgcgcggaccctgctctgggccagtcgctgctggactccgggctgcacgggctgggctccctgcgcggtggctggcctttttttttttttttttgcaacgcttgccaacctgtcagctgatggacctcatcacccatagtggcgcatgtagctcggccgcagctcgctccattcacg

SEQ ID NO: 9905 - DNA, 1257 bp, Homo sapiens
gcactgcaccaccctgcaggtgagaagccctacgtctgcccctacgagggctgcaacaagcgctattccaactccagtgaccgctttaagcacacgcgcacccactatgtggacaagccctactactgcaagatgcccggctgccacaagcgctacacggaccccagctcactgcgcaagcacatcaaggcccatggccactttgtgtcccacgagcagcaagagctcctgcagctgcgcccaccccccaagccgccactgcccgcccccgacggcggcccctatgtcagtggggcccagatcatcatccccaacccagctgccctctttggaggccctggcctgcccggcttacccctacccctggcccccggcccccttgacctcagtgccctggcctgtggcaacggtgggggcagtgggggtggggggggcatgggccctgggctgccaggccccgtcctgcctctcaatctggccaagaacccgctgctgccctcgccctttggggctggcggactgggcttgcctgtggtctccctccttgctggcgcagctggtggcaaggccgagggggagaaggggcgtgggtcggtgcccaccagggccctgggcatggagggccacaagacgccccttgaaaggacggagagcagctgctcccggccaagccccgatggactccccctgctgccaggcaccgtgctggacctgtccacgggcgtcaactcagctgccagcagcccagaggcgttggcccctggctgggtggtcatcccgccgggctcggtgctgctcaaaccggctgtggtgaactgagcccatcctgcggacagttgtggtgcccccccggcagctcccggcactgcccccgacgaacggaaactcttctgtgaaatagcaataatgtcctactgcccgggcagccccagcccagcccgccgggagcaaggatggtgctaggtcattcatggctggcctcccagcccccgggtggggacctggcctgtcatgcagggagagctgtgctcctgggtgctgaagcctcgctcctgtctgtcccccaccacctggccctcagcttctgagaggctttcccctgcccgacctcctcccgtttccctctcccaccctggcacctccctcacctagtgaccacccatggcaagttgccctctcccagcagagggggtgggtggggtggcatctgccctccctgctagcaccaggctcccccttcctgagaggagcccccag

SEQ ID NO: 9906 - DNA, 1549 bp, Homo sapiens
caggccaggcctgcagtaccagacgggatagctggccactccacccctgcaccccagggtctcctccctctaccttttggggcaccctgggagcgtgggaagcaggtccgagggcccctgagctggcaaggggaggtgccaggccagctgtggtgccaagatactgagtgacctgggccctggctcagggagcatgtggggccaggcccagcgccccgtcttcctccttctacccccgctgggcctggcctgggcagcgccccctgcagaggcctttgggtccttggtcctgtaacaggaagggggaggctggctggggacgaccgaccacaggctgggacacagctcctggtctgggggctccaagtgacagcatgcaggggagggggctcccagtcagtgctgtgttgggagctttctggaggctgtggactgaaggccttgagggaagcagtggctggaggagggtgctggacccatgacacgttgcttcctctggcttttccctgctgggccgctttctcagaggcacttccccacccctaacacccagtgggcccccccaggttctgtgccactcagagggaccctggcaggggccagaaccacttaagggtggtgctggagggccttgtgccccagtcccatcccaggacgccctgagggatggacgcagccatgcaccccccatctggggcctctccctgctccctctcccacctggcagctgggagttctggcttctaggcctgccctgtcaccaggcctctgagtggccaggcccttccacctccccatctgtaaaacgaggcagctgcccggacagccttggggtccttagtggccctgcaggtcctctggcagctctgctgaccccaccctctcccggactgcccttctgtcccagaggggtcaccctgacccggcccaccttgccactgggctttggactccagccctgacagggcccagccacactggctctgcccctcgaaggggctatgagcaaggtaggagggagctggtctcctttcttcgggccccacccaggccctgagcaccccccacccctgtgagggccccaggccttaagtccctggcggggtcatgggtttgcgacttgagcagagcggaggaacagggcactggaaggccgacgagctcagcatgcgactcggtgacggaccaggctcggcagggccggtgtactttttgtggttgtcattggtgtgttgttgcacattccaggacgtcagtattttaacaggttctaagtgcctttctatcgtagcttatgttttcctcctcttggctccattgctgttagcatagagttttaaaaaaagagataagctaatgactataacaatatattcctccatgggagaggaagtttataaagaaacaataaaagtgagttgcaaagatggcttgtatgtcgtggatgtgccaggaacccggccctgacatgaggccaccactgccctgagcccctgcaggcctgatccgggctttctccccgaccctgcaggtgcccctccctctcaat

SEQ ID NO: 9907 - DNA, 1219 bp, Homo sapiens
agaaccttattgcattccccacgaagagtctggtgggggccgtcccgaaccctgaagaataactggcccctcgcctgcccccaccccctgcccaaaaccgaggtggcctgagggagcctcctccagcctcctcacacccagggaggctggaatgaggaaaagcgggggaggccggcggcccagcgcggagggaaagcgatccggctgactctggaatgtggaaaccgataaaaggaaggaggctgaggccctgcccctcctggtgcaagcaggctcccccaaacacccccacccacccccaaatacacagccctgctccagtcacgcgcacacagacacgcccacgccagacacacgcccactgggcagtgctcctgcagacacacacacacacacacacgtgcaccctcccccttctccaagaactcacgcaaattccacagcagtgaggggagctggttttcttggcagcacagagccttgggctccccagcccagggaggggactctaagggcagctgatggggggtccaggagaggtcactaacagagttaggtggccttgctgccctcccatgagctcagggctggccagtggtcagggatagccatccctgtgggcagcctcccctctacacacctctgctcactggcaggactggctgtctggcctgctgaggtgggagctccctcctgggctcagcagggccctgctttcttgttcccagaggctgcccagtgttgtgttgggacccacttataagcccaggcaaggacttaattttctgtacttgggacttgtcccagctcccccggggctgtcagtgggggtgacagtaatgggagctaggagccgcggacccatctcctgcccggggcatctcccttgccatctccctggcccctgggctgcgtgccagaggggccttcctcgggtaagcacaggtctgggcagtgtctgagaggctccttatgctgaatcccattctcccattcccagaatatggagagagaggtgccatctggacaaatgccctgggaccccagcccccagccccatccccatctgaccctccggacccacaggtagcaggacagctgttccaacgtgcaggagacaggggcggggtggggacaggcagtgcccggcccccaggctggcatgtgtgtgcgcatcctccctccccaggcccaggggaggctagataatggtctggag

SEQ ID NO: 9908 - DNA, 1219 bp, Homo sapiens; identical to SEQ ID NO: 9907

SEQ ID NO: 9909 - DNA, 1145 bp, Homo sapiens
ggctgcagtgagctaggattgcaccactgctattgtcgttgctgttacttctgttactccggttgttctggcttgcagaaaacctttcgatgaaggtaagggtaggaagcataaattctctacgaggtaatgtcccctgaggagagaggtgaagtgtgaatctgtgaagaatccagggtgcctgtgaggtcaagcgaggatcaacacaaacattttcccagcatgcgcgacggcgggagagttcgtgagacttttggaagcacttcacgccctacacttagcattcagtttggtcatctcatccctcttctaggtgctagtcacaggcccaccccaacctcataggatgtgtttgcacacagggccacttaataaatgttatggctgccttatttgctgtgaactcttgtctgtattcctgggccttggtagacctgggatgcccagtggctctgcctttcactgtaggttttgagtgatgaggtgaagaggaagcagtacgatgcctacggctctgcaggcttcgatcctggggccagcggctcccagcatagctactggaagggaggccccactgtggaccccgaggagctgttcaggaagatctttggcgagttctcatcctcttcatttggagatttccagaccgtgtttgatcagcctcaggaagtaagttcctcacttggaagaattattcaaattttagactaagtatgggtcaaacaaatttttttatcagtttctgtttctcagaaaggcaaggcagcttaaatggagtgatctggaggcagccattttagtagaaaataatttcagtatttgaaaaatcgcataggtagtaatgagtatgtccattctgatggtattcttaacagttgcataatgaggtagcacctaaggctttcagagcccatgagggtgtgagtgttgtctctcatctgctacagtattccaggagagttctgtccggtgggaaggcactgctgatcctctctcatttatgtccttataagacactgtcagagtggaagagagaggggatatatttatgatctaaattatgattgtggatcattcaggctgtttttaagtgccatgtacgagtatttatctgtgaacattttcagtctgttgaaagtacgttt

SEQ ID NO: 9910 - DNA, 1518 bp, Homo sapiens
ggaaaggtcacagtggacagcccgggcagtaggatgcagccccagaggctggtggcagtttcctgtccattggtaggtgacggcccctggctcaggcagagggagatggttagactcttgcagggctaaaactctaatttggaattgaatattgtggatatcttagttaaaggccatgcttacagcttagaaatgaagccttaagctgcatcaagttacgaagtgattaatttccttctcagcaaacctccgggaggttccagaatgagttcttcctgacaggttgtcttcactgggagcgtggggcccccaggccccaccagcaccgtcctcccctaatgaggggccctgccgaggcatcagctgctctgctcagttagtttttattcccggggtaccaagcagctgcacagtcggtgcctgggaggcacgtagaggcccagagagtccctgggggttctgctctgaccgtgtgggtggtgatccttgtcaggatgtacagtccttgctcccaccccatccgggatggccgcctgtccctgactattgagtcctgttgttgtaagccaggcatggagggctcctgcccttctgctgagccacagcccattgcagcactgtgctggccagacttcagctgccttgggaactgaagccctgccactgttgctagtcaggggcttggttctcccacttacactgttgacatctattttctgaagtgtgtttaaattattcagtgctaatcattgttttttcctttgtaaatgttgattcagaaaaggaaagcacaggctaagcagttgaaggttccccaccattcagtgagagcagaacccccattccccagcctctgctggtagcatgtcgcagtttccatgtgtttcaggatcttcgggctgtcgttagacaggttaatgaagaacacttctcaacagtttcctttttgttttcctttataattcactaaaataaagcatctattagtgtctgatttaggaatgtaaaatgattctgtattaatgtaaataagattatctattgcaaaaagatatttcaaacctaaattgtggtcatttcttctttgaaagaattcagacagcctctgcaggtggcttatgggggttacaggagacttggctggcctcatcctgtgctcacagccacccagagcacatagaggcagatgggtctggggtgccgacagtgctgaccctcacttggattccagagcagggtgcttgccatgacacaacagtcccctgtgagtgaatgttctagaatctggatgtgacttttttcttgggagcccatgctgtgagagctggccaatgtccctgggtccctgcatttcagtctccctcactggattgtttcccttcattctttccagtctttgcatcttttacattcaattttattttattttttttttaaatggagtctcgctgtgtcgcccatactggagtgaagtgataccatctctgctcactgcaacctctgcctcctgggttcaag

SEQ ID NO: 9911 - DNA, 1210 bp, Homo sapiens
tggggaaggaacacagagccttccgagaatgggccagccacgcatctccccttgggaggcagtgggggcccctccaggaaggggtgctcaccccatctctcctctcttcccctcacagatgtgcacccccgccaatacccctgctacaccccccaacttccctgacgctctcaccatgttctcccgtctcaaggcctccgagagcttccacagcggtggcagcggcagcccgatggccgcgacagccacgtcacccccgccacacttcccccatgccgccaccagcagctctgcggcctccagctggcccacggcggcctcgcccccggggggcccacagcaccaccagccacagccgcccctgtggactccaacacccccttctccggcttcagactggccacccctggccccccaacaggccacctcagaacccagggcccaccctgccatggaggcagagagataagggaggcccctcccccctcccggaggccaggaccccgtggggcgggggagaggacgtctctgcgggcccccttcaccccttttctgtctgcaccccttgttccccggagccctggaggggagagcgcggactctagccaggcagggacacgtctggtgccagaacacgcagctgcccacacgcaaggtcatggccccagcggccccggcacatggagtggttcagcgcggcctgggtgcctggcggacagaacttcagagaccacgcagccttccttcgaagacgcacctgcccagcccagcccaggggtgccgtggaggaccaccctggcagagacattgctgatccctggcttggagctccttgggggccggcaggcctcgacccccaccctagggaatgcagagcctctccgcatgtgtgcgcgtggccgtgtctgtgtatttctacgtgtgtcgctcttcagaagcaacctagttcctggggcagctggactttgcatgttagtgtgagcccccagccccctgcccgccgccccctccccagggccctgcctcctccccaccccctcgtcagccagcgttgctgttccttgcagagaaaaggattgtgggaaactccaggactcttcccaccgcctcccagcgcctgcctgctggggctgcctgcatgcctcccctgcacctgggggtacccgcatccacttcctttcccccttttaacaaaagagaagaacgaatt

SEQ ID NO: 9912 - DNA, 1573 bp, Homo sapiens
caaatgtggggtacacagaggtccagaaaagcatcccgggctcattgcccgggccgtgcccgctcccccatttctcccccacctccccgtggtctccaggcatcccgcacccatctcactttccccttccttccaggagctcggtcaggcaggccggggtctcccgaaaggagcactgacgagcgttgtgcccctcaacctggttttgtggggacagagcaggggcccccgcagtctgacttccgttccccagaacctgggcattttccttcttcctcagccttgttgattctgtctgctcccagtgagggaagaacagtggctcttagccagggtgcccgttagaaccacctggagcaggtcagcccccagaggcccgggcagggcacagctcccaacagctcagctctccctggtccaggacgcccctgaccgtgtctctcgcctctggcatggctttgctctgcccccgctcccagctcctgtctgtcactaacccttcactctccacctggggccaggcgggactgaaagccagggaggggctggttgaggccagggctggggcggttcttggcagatgccctcgtgcccgtcatcccaggcaccagcgtgggcatttgggcatccagccccgtgctggagctgatggctgaggcagggagggcatcggtgctgccagggagctcttggccaccctctgagggtgggggagtctcaatcccccaaagaacagagtggacaggaggtcatcaggaggagcgtctggggagcaggtggtccctgggcatgagccccctcacgcaccctgtccctacagaactctgacagcgtcccacctggctacgagcccatctcgctgctcgaggcgctcaacggcctccgggctgtctccccggccatcccctcggcccctctttatgaagaaatcacctattcaggcatctcggacggcctgtcccaggccagctgtcccctcgcggctatcgaccacatcctggacagcagccgccagaagggcaggccgcagagcaaggcccccgacaggtgagcagcagccaggccaggtgcatggcagggtgtgtggtggcgcgcgtgcggagcgggtgtctttgtggtttcaaatcagtttgtgatgtgttctgtgtggcgattccccagaaggactcggagaccccgtatcaggttagactcatgggtaaagtttattacggcaaagaacgcagcagacgaggcaggaagagcgtccgggcagctggaggctttgatcccccgaccagggccacaccggcgtgcaggcgcatacgtgctctcgagcaggaaactgcaggggtcggtgctgtgtctctgctgaggggagcccctttgagcctctgggttcccagacttcattggggggctggccacgtaggcccactctgccggtgaccagccagggcagccgaaactcaggacctgacagtgacccaggcacactcactgctcttgccgttcgcccgtgacgagccacggggcacggtccctctccaggcgatgagtgcatcatccatcactcatacgacagccttcggag

SEQ ID NO: 9913 - DNA, 2415 bp, Homo sapiens
tacatacactaagctgtcgacaccccgccctcacccctccaatcccccctctgaccccctcttcctcacatggggtcgggggcctgggagttcattctggaccagcccacctatctccatttccttttatacagactttgagacttgccatcagcacagcacacagcagcacccttcccctgaggccggtggggaggggacaagtgtcagcaggattggcgtgtgggaaagctcttgagctgggcactggccccccggacgaggtggctgtgtgttcacacacacacacacacacacacacacacacacacacaggctctcgccccaggatagaagctgcccagaaactgctgcctggctttttttcttccgagcttgtcttatctcaaaccccttccagtcaaggaactagaatcagcaacgagagttggaagccttcccacagcttcccccagagcgaagaggctgtagtcatgtccccatcccccactggattccctacaaggagaggccttgggcccagatgagccagtacagactccagacagaggggcccttggggccctccaacctcaggtgatgagctgagaaagatgttcacgtctaagcgtccagtgtgcacccagcgctccatagacgcctttgtgaactgaaaagagactggcagagtcccgagaagatggggccctggctttccagggagtgcagcaagcagccggcctgcaggtgagcatggaggcccggccctcaccgcctcgaagccatgccccagatgccactgccacagcgggcgctcgctcctccctaggctgttttagtatttggatttgcattccatcccttgggagggagtcctcagggccactagtgatgagccaagaggagtgggggttgggggcgctcctttctgtttccgttaggccacagactcttcacctggctctgaagagccactcttacctcggtcccctcccagtggtcccaccttctccaccctgccctgccaagtcccctgcatgcccaccgctctccatcctccctcctctccctcttcctcccgtggagacagtatttctttctgtctgtccctttggcccagacccagcctgaccaacgatgagcatttcttaggctcagctcttgatacggaaacgagtgtcttcactccagccagcatcatggtcttcggtgcttcccgggcccggggtctgtcgggagggaagagaactgggcctgacctacctgaactgactggccctccgaggtgggtctgggacatcctagaggccctacatttgtccttggataggggaccggggggggcttggaatgttgcaaaaaaaaaagttacccaagggatgtcagttttttatccctctgcatgggttggattttccaaaatcataatttgcagaaggaaggccagcatttacgatgcaatatgtaattatatatagggtggccacactagggcggggtccttcccccctcacagctttggcccctttcagagattagaaactgggttagaggattgcagaagacgagtggggggagggcagggaagatgcctgtcgggtttttagcacagttcatttcactgggattttgaagcatttctgtctgaacacaaagcctgttctagtcctggcggaacacactgggggtgggggcgggggaagatgcggtaatgaaaccggttagtcaattttgtcttaatattgttgacaattctgtaaagttcctttttatgaatatttctgtttaagctatttcacctttcttttgaaatccttcccttttaaggagaaaatgtgacacttgtgaaaaagcttgtaagaaagcccctcccttttttctttaaacctttaaatgacaaatctaggtaattaaggttgtgaatttttatttttgctttgtttttaatgaacatttgtctttcagaataggattgtgtgataatgtttaaatggcaaaaacaaaacatgattttgtgcaattaacaaagctactgcaagaaaaataaaacacttcttggtaacacagctgtgccgcaggagtcctgcttccctcgtcctcggcgagatgggtgggaggagaaggcagcggcggggccggggtgggttttcgggacctccgcgtccggggtgagacggacttgggagtggcggcgaggtccgcggcagggttggaaccacgaccaatggagccaagcgggccaatagggaggaggagcggggacagactgtcctgccggccaatgagtgagcgcgagtggagcagagcgccctatcatatcctgggggcgccccgggagctccgcccccaagcgggcgccccaggctggtgccggccgcgtccctggccagccggagcaagcctgactcgtgcagccgccggccgcgtccctggcca

SEQ ID NO: 9914 - DNA, 1199 bp, Homo sapiens
gggagaggggaggcctccagaagctgtgacttttctttccaggtgattgtgtccaggggggggcgctttctggaagcccccgtctcagggaatcagcagctgtctaatgacgggatgttggtgatcttagcggctggagacaggggcttatatgaggactgcagcagctgcttccaggcgatggggaagacctccttcttcctaggtaacacgcctgcacctgtcaggcctggagcctggggccacatctcctctgtttcacactgatgacagcgtcagtcccacacggcctttctgccggggaccctggggaaggtttcctttcacctgcatagtcagtgcgtggaaggaggaagagccagtctgtcgggggcaggtgaagggggcctcccctggagagaggtgggtctgagcagaggtgagggtggacagagaagccctgtctgtggcattcttgggctgtgaccgtgagtctttaccctgggcaggtgaagtgggcaatgcagccaagatgatgctgatcgtgaacatggtccaagggagcttcatggccactattgccgaggggctgaccctggcccacgtgacaggccagtcccagcagacactcttggacatcctcaatcagggacagttggccagcatcttcctggaccagaagtgccaaagtgagttgtttttggcccctcttcttgcatttggtgtttgattagagcagggtactaggtcagggatttagtgagcgtgaaagatgcccctccccagtcagtccctgaccctggccagaggaggttcagaaacacagtgggcgggatttggggatataggctgggagctgcagccctcaggtgtctaagggtgagtgaggagccaagaggcctaggctatgtggaactgagccctgagtatgttttaggtactgacacctggtggaccgtaagtagtttttagtttcaggtccttggcttttgtctgatactggctttttctcctcagatatcctgcaaggaaactttaagcctgatttctacctgaaatacattcagaaggatctccgcttagccattgcgctgggtgatgcggtcaaccatccgactcccatggcagctgcagcaaatgaggtagggtagatgtggcccaagccccaaggcccttcagtttctttttctttcttttttttttttttttaacggagtctc

SEQ ID NO: 9915 - DNA, 2590 bp, Homo sapiens
ggagtagtgtacacgaataactgctggctggtgtctcatggcttgtttgagctctagaacactcagcatttggggacttttgctatttaggtgtctcccttgaagtttggttactactgccttaaggaaatcagagagcatgaaaaacttgcgttctaatttttcttactcttttccaggtgcttctcagcttcacgggaaagggcctgctgtaccacggaaattgtgaccgcttcagaggcaaggcttgccacttgggtctgggtggaatcagaacgtgcaggtctcccaggatgtacactcactgcgccctttctgctgcttggtgttcttctggaggagcgtgagttctcagcggagcgcttctcggcacttctgatgtgcctcccatggagggagccgggcccttgctgctcaggaggtgcagactgccccgtgctctgggccttgcagctctgtcgctagacggttgttagaggggcagctctaggctggggcttgcgctgggccgtggtgggaggcacagtgtttacaggctctggtggcagagcagttggcacacctgtgggtgaatctgcctgatcccctggcatttggtcagagtacctcagagcaccccactgctcaggggctccttctggctgcagtaagctccctggatggtcacagtgccgccccatccccaggctgtgtgctcaaagcggacaaaactcaggccagagccacagctgggagacctgcactgtccctgcgaaatactaagaacacctagggtgtgctcactgtgggggccagtttctcctcggaacatgacaatgaagctcttttagagaaaagacctttgtagattcaacaattatgataggatttttacagacacctattttgggctcagttttcatcattaccattaaatgcattggatagaaggggactgttcttcacacatcatattataggaagacataattccagtgcctttatggtggagcagaattcgacaacacatgtccattcagccctctgaatggatctgagacgaagacctttttaaagatatgtctgtattgaagagaaagccagttttgagttttttacacttgcacatcattatctgtgccgtcctgactagaaggttgtctgggcccccaaattccaagtcccagtatagccagggctcccattttgtttttccagagttcgtggaggtggactgcagagcccagagcccttcatctctctgagggtcaaggataccaggggtcccaagtcacagatagacattccagtttgtattcttaggaatcattcttaggcagtgcggcagaagcaggcctctgtgaagtgtctgccgggtagaaataggccttgaagtcctggggctctccaggcagtggggttatgtgtcgactgaagggtgatgtgcagaagagcttggagagtggatcagagagactaggacagttactgcagagctcctaagtcaccactcaaccagtggctgtttcacaaggatttgagggcacttgcctgtcttgtgaggtctgtgccacaaggtgagtctgaactgactgctccagctaagtgatcaggcacgttgagagtatacggtgtcctcagcacatacacctgtgggaaaacggaccgctcttggctcctgactcccagggtacagcgcccagtaactcatccttcattcagaggtttgctggccttcccggtttcccaaggagcaagacctctgtccgccctttggcccggcctctgctctgtctcctttttttacataagaaccaatccgtgtttcacattgggctaagtggattccttatccctttgttatatatattttttgcaacttggatttccagtttgtttacagagtagtcttaggtagtagcaaaagagccaaagaagagatttgtattgctgagctcaaagccaagcagaggccggcagtggaggctgagcagggactctccaggcttctctgcccataaacacccgggtcccaggccctccttcctttccctttggtgctccctcctccccacgtaccattgcgcgtgcagctggagcagaataccctcatttttaggaatctagtgatgcctcttgcctcagggaaacgtttctttgatggggagtttgagatttcttttccttgtttatgctttatttgtggtaatgaaagagcgaatgactgaacagccatggcaaggcagacctacaggcgaggccgcagcagagggtggggcagagcagcctcggggtctgggggctgcaggggtttccctggcgcagcgaaagtctctgagcacttaccgggcgtgaccgtttcttaggtgtgagaggggctgtggcttttgtgcagcgactatgttggtgttaggggtggtgtggagattgttaatcttgtataaagcaattcaataaattgtttcaaggtttccaaaacattttttctcactcttttctttctaccatgtggaagtaagtagttcttcctgtaggagctgttacagatggaatatccattttggctgaaagccaaggggggggggcgggggagtaagccttgcatgcaaaa

SEQ ID NO: 9916 - DNA, 1354 bp, Homo sapiens
gacaaagacctcgagatcgacgagctgcagaagcgcctgggctccgtggccgtcaagcgggagcagcgggagaaccacctgcggcgctccatcgtagtcatccaccctgacacaggccgcgagctgtccccggaggaagcccaccgtgccgggctcattgactggaacatgttcgtgaaactcagaagccaggagtgcgactgggaggagatctcagtgaagggtcccaatggggagtcctcagtgatacacgacaggaagtctggcaagaagttctccatcgaagaggccctgcagagtggcaggctgacccctgctcagtatgaccgctatgtcaacaaggatatgtccatccaggagctggcggtcttggtatctgggcagaagtaggcacagctcttgcaactcttcgtaacggcagacgctggccctctcctacgacgcagtgacctccttggtgtcgtcctctcccttgccctggtgcaggccaagcattttatacataccctcgctgccaggctgctcagagtcccgcccacatatgagacaggcactggctgaagacaggcaactctcgtcccaaccatcattcaccctgagtgacgtacttcatcctccaatgactggacaactgcgatgccttttcctcccttttcctgtacactcccagcaacaaactcctcatgataactgcacacaatctgaaaaccactgaaggacaagccaaccacagcagccaagcccactccttgcagcatgggtactggtggcacaccagacagtgacactgccccacaaaggcctgggcccgtgggggctgctgcctggcatgacatctctccagatttctggcttaaaaccaactttccatccgagaagcctcctcagtagttactctgctcatgagacagatctgggctccaagccaggaaaggtgaacagaaaccacaagtgtccagccctcggtgctggagtggacgttaattgtcagccaccagactgtcccggcacctacagagaatgtttcacagttctggcatttaaatcctttgatagtggattgtgctgctgttagccttagtttcagtgctttacaagtctcgcttattatctcactggtatttaggtatacaaaacagttgattattcaccacgccaatatctgggtctctgtatctcatgtagaacataagaaaatgggaactaatagggaaatttatttatagcatgaaaataaacctggtggctggagtctgcttgtacggtccacatgtttcttcttttgcatgcaaggcttactcccccgccccccccccttggctttcagccaaaatggatattccatctgtaacag

SEQ ID NO: 9917 - DNA, 1618 bp, Homo sapiens
tgtcagaaccatggtactctgttggggtgtgaaagtagccacagatcatctgtagattaaggggtgtggctttgttccaataaaactttatttacaaacacaggctgtgggctggatttggcctgcaggctgtagtttgtgatccttgattcagacagtttagcaaggctgcaaagaacaccgacacccccttgttacccacagatgggtgagactgcgttggccagaggccgagaggagggtgctcacaggggaatgggcagcacgtagaggccgggaggtgctccagggcaccaagtgtgggaaagtgggacatgcggggaagtttccagaaactgtgatgtcaagttggaggcggagtgctgctggggtgtgaagggtctcgagtccaagtgagggagttagggacttgggaggggttgttgttgggtcggggacctggggtcagccaggtggtgacctgggatggggtggggacaggcaatgaggtaagctctgctctttatttttttgcagatgcttttctcaaactttcctgatcctgcgggcaagctaaaccagttccggaagaacctgcgggagtcgcagcagctccgatgggatgagagctgggtgcagactgtgctccctttggttatggacacataactcctgggccagaggctaaaaccccaggacccctgctgtccttcccgcagcttcttcttggagtctcagggcaaaccctttcgagcagcacctcccagtggccagaagctgaaatgacagcagtggtactgcctggtaaaagaattggttctgtgacccgggaagctttggttggccttgatttcttctctggaggcttggaaacgcttcctctcttcttctgttcttcacgccccatgcccctgctagcgtattactgttctgtgacttccctgtgacctctgcagaactcctcatcctgcgtttggtctccaggtgtcccctttctgccgtgttcctaacattttgattcctgtcttgaaaaaagcacctgctgcaccgtaagcccagggatgtggcagctgcagtgggcttggctttgtgaggaactgagtgtgtccacgttgggggaacatcatacttgatacacacgtttttatttgcacaaagaaaatgctatttttggagccagaattttcatgtctgatttatggtgattttcttaagaaccagaactgctggcagaaagggggcacccacacgcttagatagccgatgtcttattagagggcagtttgtggttcctgatttggaaattaacattctccaaacattccagtccaatgaaagttttatccgctttcccatataaaaattcttcccatgagagtgacttgattctcacaatcccgttggagtcgtgtgtgagtcctacagggtgagattcagcattgccatctccaagtgctcttcgtagggaaacagtttctgctcatgacgaggttccacttcccatctgatcccggcccggcctggaaacagagcacatgtgtttgaggatggcggtgtttggggacaggacatgagggtattgtgtggggctgctaggacaggcctggcggggtaggggggtgtccaagtcagtttactt

SEQ ID NO: 9918 - DNA, 1704 bp, Homo sapiens
tttcttcatccccaccaggtaatatgtctcatcctcggccttggctagggctcgaccacttcaacaaagccccaaagaggagtcgctacacttaccttgaaaaggccattaaaatccataactgatttccaagctggtgtgttcaaggcgaggacggtgtgtgggtggccccttaacagcctagaactttggtgcacgtgccctctagccgaagtcttcagcaagaggattcgctgctggtgttaattttattttattgaggctgttcagtttggcttctctgtatctattgactgccctttttgagcaaaatgaagatgtttttataaagcttggatgccaatgagagttattttatggtaaccacagtgcaaggcaactgtcagcgcaatgggggagaagaggttagtggatcgggggtccctggctcaaggtctctgggctgtccctagtgggcacgagtggctcggctgccttcctggggtcccgtgcaccagccctgcagctagcaagtcttgtgtttaggctcgtctgacctatttccttcagttatactttcaatgaccttttgtgcatctgttaaggcaaaacagagaaactcacaacctaataaatagcgctcttcccttcattgtgtgcattgtcggcccttcctcgggttctcctcctccagctgcctgggggctttttaataaacttgtctcacctcgtcagccactactgtctgcagcccctttgcaaagtggatgcactgaatacagtccggacagacattgtgggggtctttttattaaatcaagaacattgttaaattcaattaaggtttactctgctgccttggcagacttacgatctcaacagttcatacgagcaggtgaaaggattataaatagaatttcgttaaagtggaacagacgacaagaaagccttttagcaagagggcatgctcactagtggttagtaagctgtcgactttgtaaaaaagttaaaaatgaaaaaaaaaggaaaaatgaattgtatatttaatgaatgaacatgtacaatttgccactgggaggaggttcctttttgttgggtgagtctgcaagtgaatttcactgatgttgatattcattgtgtgtagttttatttcggtcccagccccgtttccttttattttggagctaatgccagctgcgtgtctagttttgagtgcagtaaaatagaatcagcaaatcactcttatttttcatccttttccggtattttttgggttgtttctgtgggagcagtgtacaccaactcttcctgtatattgcctttttgctggaaaatgttgtatgttgaataaaattttctataaaaattataattcagtgagttacgtggaagtggaggaagatttctactctccctggaaacaggcctgggaaaccttggcatttgtaacaaggtttcactgagatgtacttttccttctaattccgttttgcgggggcagggtctcttgtttctttttttttttttttttttttttagcctctaactagtcacatttactcttaagaaatgaaaggttttccaggagagaactgtgtacaaataaggtgactggagatgtgacctgatgtgtcacgaggcccttcggggcggcaggcgctatcgtgggcgtggtccttgcaccgtcccatcggccttgccttccagctccgtggcacggtttcc

SEQ ID NO: 9919 - DNA, 1158 bp, Homo sapiens
gccttttccatttatctacaatccacctggaacaggtgggggtggggagatgtcaggaccaacttccaccccaccccgtgttgacctctgaggaaatcgaggttttccttgtcattctgccacatcagccagccattcacatttgtgcatctctgcttttgagaccaaggggttgtccacactgcccaattccaagctgtcttcataatcatagctttacagtatgtgctttgttcgaataacagtaaaaccttaactgttacctccatattgtcattttaatgtccttaagaaagataccaatgacctttggccaatgagcaaaggtgctaacagcacatttacctacagtcttggctacagggggagagttactgttagtgttgtttaccttctctgctaatcctaaatatgctgatttaaataacttacacctgtgttggctacattataaatgaagctttagcacttgacttttctctctctctctttaaagtatttgaatcatttgtggattatgtggcagtagaacagctcgatggggacaataaatacgacgctggggaacatggcttacaggtaaattgagtgttttgtgctagtgtcctgttgtagcgttcttctttattttcaattcttttaattgctaaataaaaatttgcttgtgccttttcatgtgtttctggtatttagaatatacaaggattctgtttgtaggataattgaatggggagggagagggggatgttgggagatggagtgcagctggtttatcctgtagaagcacatccagcagtccggagggtcttgtggggttttaggcatcttgtcctttccccgttcctcaccttactggtgtcactgctccagttttccctcagtttctcctggtcacaagtgggatttcttagtaagttggactgtgtttaggttgtgtttctttatttttaaatgtatttttaatgaatttagttttctgaggatcacgactttagaatgagtagtgtgttctctagggttgtgtcccccaggtttctgggcatctgagagagcagtgagcatggtgggcgaccaggtggccagcccccgcttggatgaagggaaatgggctgtttctggctgctggtctggctggtctgttggatctgcagtgtcctc

SEQ ID NO: 9920 - DNA, 1102 bp, Homo sapiens
ctccccatggagttgcgtaagtttttctttaatcaggtgctgttaaaaatgtcttttgtgctgcagtgaaagaagctttagcgtgcatgtaatagagatgcacatatttaatcagtaagcctcctctctgcgcttgccctgtggcacacagagtcacacctgcttgacactcgtttaacagattgattgagcagtttctatatgttagacccttggaacataattgtataattatggcaactagacagctgtggttttctgttcctaaagaatgtacactcagctttcatagaggagctaagaccggtacataaatacccagagcagagatgctccgttgttactttgatgagggcagggaggaagtcctctccgagtgtgaggaaggggggactgggggaagaggtgagcatcaccgacaactaacatggtgagcgaggagtaaagaggggtgacaaggccgttaggtgtatttgagtgtttccaaggctgggagctaacccctggagtggcaaggtgctggtgaatggtactgcgcagtaggtgtctcccccagcactggtcccgcttggtgacggtcgtgtgttcaggtcgtggcattgtgtacagagggagatgggcgtggaggtgggaggattgctttgctttctggcaccgttctctgtggcttccttttactacttggggtgggggtgggaaggtacgagacacagttaattctgagaatcttatcttgctcccaaacaaccaccaaaatcacaaaataaaaaaagctctgggagtttagaagtctgaggtgaaacttggtgaatacacacttctgtttcttcttgtgtgtgtgtctacagaaaagatgagtttcagctttttccacgttgtgctgaccttgcgtgtgataagtgtaattatgtaaccaaactctaccatgaggcatgttgggtgtgagcatgcaggtctccgttaagtgtctgttggtgctgggcttgatcagtgacaggagtgccactgtcagcaggcaggtgcttcgagggctgtgcgaatgtgggggttgcatttgcaccagttcacacactggagcaagcagaagggaatcggtgaccat

SEQ ID NO: 9921 - DNA, 1274 bp, Homo sapiens
atatatcaagtaggacagtgaaaaatgtttccttgcaaacttgtagtccagtatcagttacttcctatttttatccttaaaagaccattgcaaatcagtgtaagggtttttccagtaattactcacagcactttgttaaagtttgcaatttcttcagccatttaataatatctttctgtgaagaaactttgctgagttaaccataaatgttcattcattgactgggtgggatgtgaatggaatgttagaaatgttgtgtgaattgaagttctgtattcattatagatgtagcccttatttaaaaaagtgaattccatactaaaactaggaatgaaagtgagagatttctaaacttttgcgaaagtgggtcattttttgtttgactataatagcaggaagaattatagcaatctgtcattttacctgaaacagacaagcctatgtattatgaatactttcaagcttccctttggaatatacaagacatgcgtttggagttacctttgtttttctatcgtaaatttagattctggaattggggtttggtggtgcaatgtgttgctcacaagtggccagaactcctattcctaaaaggattttgagatggaggaacacatatttaattcccctttatgccttggttcttgctcctctttccacgttggataacaattttttggttgttttgtttaagttggtgctctgaagcttaatctcagtaccctttactctgaattgtcaaattttgataaaacgtgccattttctttggtaagagaaagcaggtcttaatgtctgccagaacacaatttatatgccttattggcttcattaaacttttagaaaactttagcatttgttacttttttccattgcgtttactttcaaatgcacctaatgaatttgtcacccagtcgcaacttttcccttctctgtcccattgctttctcctttccccgacgcacagaataaacatgaagctcagcagtagaagcgtaatgatttccctcaggaaaaacttctgacagctaggtttttcaagggtttccctgtgctagctgagatgcaaaacaaatcatggaagattgcatacctgtgtggtattttaaaaacaagttgactttttcagtttcttgaacggttaagggtggatttaaaaactagacagtttagttttggggaacagaagctctcttcgtcttaagccagattctctgattcttttagacgtcatagctccttagttctgctcctgtcgccctaacttggcatggg

SEQ ID NO: 9922 - DNA, 1224 bp, Homo sapiens
tacacgttaggtacaatgtacactacttgtgtgatgagtgcactaaaatctcagaattcatcactatataattcatttatgtaaccaaaaaccacttgtaccccaagaactattgaaaataaatagataaaaaattaaaaagtgtgctgtaaaagaaattaaaagcagcttaactaatgacacattatttctcacgtaacagaactcgagaggagttggatccagggttgattccatggcgcctgggctccgcatcagcctctcttagccttttttgccttctccctctcggagccaaaatagctgctgctgcaccgtcatcacgtctttcatgtcagtgtccagagcagtaaggcagttcgagaatggctgttgggtggcaatcacaaatgtctggggcatgtgccatgtgctagtcatttttctaggtgctgatgttttgcttcttctaatcctgagcaacatactctgggaaggtgtcatctttgagatgttaagtgatttgtctaaggccataagctagtaagtggcatgatgggaatttaagtctaggtttacctgactccaaaaagtctgtgttcattctaccaagatctagcagtgtctagatcagggtttctcaatctgagcactattgacattttgtgctggacagttccttgttgtagggggctgtcccatgcattgcaggatgttcagcagcttctgtagaacctatctattagatgccagtagcaccccctcagctgtgacaatcaaaaatgcccccacacattgccaaatgttcagatgctgcaaaaatcacctgcagttaagagccattgccctatggagtactctttctgtcaaggctcaatataaaattgcataaagctggacgcggtgactcacacctgtaattccagcaatttgggaggctgaggtaggcacacttgaactcctgagtccaggaattcaagctgggcaacatggcgaaatcctgtctctactaaaaatacaaaaaattagtcaggcgtggtggtgtgcgcctgtaatcccagcttctcaggaggctgaggtgggagaattgcgtgagctcaggagggcaagactgcagtaaactgaaattgtgccactgcactccagcctgatcaactggagtgagatcctgttaaaaaaaaaaaaaaaaaaaaaaaaaaaaaaaaaagcctgagtcctgagcctttaacctggtgaccaacatgc

SEQ ID NO: 9923 - DNA, 1166 bp, Homo sapiens
cccaggctggagtgcggtggtgcaatctcggctcactgcgagctccgcctcccgggttcacaccattctcctgcctcagcctcccgagtagctgggattacagttgcctgccaccacacccggctaattttttgtatttttagtagagacggggtttcaccgtgttagccaggatggtctcgatctcctgacctcatgatccacccgccttggcctcccaaagttctgggattacaggagtgagtcaccgagcccggccaatttccctaatctttaagcagagatggtaactagtactcacatctcaggcatgtggctggatttacataggataagttaaaacctcaaagctcaaatgccaggagtatattaggtaattcagtctttgtaagtttcctttctccataccttgcagaaccatttacataatggaggtgaagcaccttagcaagctgtgcagtgttgtatcctgtggggaggtgcctctctgtttttcttctcctggtgcttctttacaaaattctgggttccaaccatgtggaactactgagactcccaaatgcattatgttccccacattccatctgagtgtcacattctctccattgtttaagagccagcttaagtgcattccttcaataatcttcctctatatagcattcccccttccatcacgttggttctcctttcttcttcgggctctccactaaaaccacacaccaccttcattattccttatcacttaataacacatatatttgcttatattccttcctctccaacaagagtgagttcacccaggacaggaactttgatttatctgggatctccagtgcttagcatataattggaattctagaattatgtcttgagtcaataaatgtgattattattactattattatcaaataagaattttctctaaactcaagaaaaaagaaagcaatatctcagtcaaatcaatacaaaagaagcctgagtgttatcataaaatcctttggagagtggaccagtccttgaccatatcctaagaacaatggcgttaaatgtagctattactttgccttcttctgttaaaattacttattctctcctaaactattttgcctatccatattctctctgtagacacccagcattcttaagtgaaccaatagggtttatat

SEQ ID NO: 9924 - DNA, 1607 bp, Homo sapiens
ctccgggatggggtgggtcacagcaaaaggaccagatgctggtgtggtccgaagccactttctcagagacactttaatcattgagtatttgtacacttttctttagaacatatataaagggcattctctacaaatgtgccgttttaagaataaaaccccctcaaatctctcccccgaggcctgtttcacgtaaaaaacaaatgggttgtgggatcgtgggattctgctgtgtcggaagcttagtcgattgtagaaactcccgtttaagccatttctgcctgtgaagataagaaagcctagaaaagaaccaaaggggtgagtgtgcggcttcactgcagaacacacaggcttgttttcaaacaccacagtccaaacgcttttcttcagattgaggaaaaatctaaaagcaacagagctcaggctgggcttcgttctaaaatcactgcatatgacacagctgggtcaaatcaaaaagcccttgaagagtccttgaatcacccagtaagacagaatgtggggtctgtgtaaattccctgtgtagtaatatgtgcacagtatatccagtaatgtccagtgtcatgcaaaccaactttcaggttttttaattatataaaaaagagggacagatgtaaactctacgatcatcctctttgccatgaggtgcttgctctgtttgagacacacaggatctgagaccacgtgggagaagagtaaattcctgttttccctccactctggggcataaaagtgggtgggtgggaaacaagaacaaatccccttgttctttccctcccttgtctcttccctccccgcccttccctaggaccatacatatgatcagatttgcacatgttcagtgtgaggaaggtgtgacctcgccccccgacccccagctcctcacgccaagagcaatgaggctgcaaagcccagggcaggcccattgcccagtctgcttcctgcctggtcacatgcctggccaccccagggaacaggggaagcccacccagaccccgggcccctgtgccccaagagctgcatttttcagaattccccagttcctccacacgggtgccatgatccatttctcacctaatgctggtgaatctccagcccctcgaggccaggcttctgaaagtcacctgggcaggcctgcaaggggaaaagtcaaccatggttttctgtccttacacgcgagtggggcgatcctgctgatggaaggccagagaaaacccacaaagtacagaaaacctgcggaattggttgcttgatgtcttggcataaagcagtgctgttcaaatttaggacggttctacccatttcaggatgaacctggtcaaatttcaaagacttctgtctctcacttttagaaatatctattaagttaaaaaaaaaaaacaaaacaaaaacaagctgggcacggtagctcccgcctgtaatcctagcactttgggaggccaaggctggtagatcacttgaggcaaggagttcgagaccagcctggtcaacatggagagaccccgtctactataaatacaaaaattagccaggcatggtgttatgcacctgtaatcccagctacttgggaggctgaggcaggagaatcactt

SEQ ID NO: 9925 - DNA, 1206 bp, Homo sapiens
ggtctcaggccctgcagcccacaggcatttcatttcaccctcttctgtctgccccacccccgtattcagtaggtagtaccttgaaatgcttttggagtgattgggttttccagagcccatgctggtttggttgggacagacagactcagggtctagcccttgctggaagcatggcctgggcaggtcacttcaccttcttaggtctcagctgcccggtctgtgaaatggggctgactgctgggcagggattattatgaaggtcacctgatacttggggacaaggtcctggcagatgacgggtgctcagttcaggtaaagtaacccaaacctgaacctgtgaataactgaaaacaggctactccccctttgatttttttttttctgtcttgttataaaagcacgtaccagaatcaaaacacccgaagaggtgggctttattgcgtttctttcttttttaatagagagtcatggtgtcatttctgggtgtggggcatctcactgaaatgactctgcaatctcactcttctctgctctctgaactgttggtccaggccatccgggtgttcttcatgctgcgttccctgtcactgcaattgcgaggggagcctgagacacagttgccgctgactcgggaggaggacctgatcaagactgatgatgtcctggatctgagtgagttggctgctctgagtcacagcagggggctgggggacatgggacatgggacaccactctgctgattcacacgccactgggagggtcagtgtgcaacctacattttgtactattattgagctgtgaccttgagccagcggtgtgcatgtcccatgcaggttttgaagaaaaggcccctgggttctctgagatcagtttgagggttctgctttcacacagctggttctctaaaaagtctctgcagagcacctggaggctcaagcaagggtgaacaaactccagggttcctgtcctccctataaacatagtggcatcggtttggttggttttatatattaagcattttctatatgattctaatgataaaagggttctgctgctaaagaaagaaacttgtaaaaagcaaaacaccagtgtttaggtaaggatgaaggctttggaggctggagaaccacgtgctcagcccataaccttgagctacttgttccgctgtgtagtgcctcattgttctcatctgcagcatgaggctca

SEQ ID NO: 9926 - DNA, 1515 bp, Homo sapiens
ttccagcaccttcttcagtgttaccatctctaagaaggaaccagttgggaccgtgaagactcccgaccctgtggccatgatggaaatcaaaggaagacaccctctacgtcacctgccctcgactgtgtgtgcccacatgtgccgagagatggcccagagccagttcccctccagctgcaagggcatggtgtccccagagctctgagtctgtcactctccctctgctactgctgctgatctgaatatggaaaccccatggttcccttccccattcggactgggtgtgtacaagcaaggacccagatgcatcagacacagcccccaagatgttcctttctactcggccagctcgggagccagacacagcactcacagcccaggccgtgatccaccctccccaagtccaccagggccagcggcccctcacctctctggtcactggtgagaccttccacaactttcctccagacctgccagcagatgtgcccaccaggggcattaggtatccgccggagcctggccatagggtagtctcgggagccgcgctgagatcttttgccacctgcattttagaagaacatggtctctgtctcctcggcccagccagctgtcccggcaaggcctgccgagggcagttttcaacctcatgaaggaaacacagtcctgccaaggagggggagtggcgcccatggggacaggcctcagtccttagaagccctctgggtagctgtgcccacccagccttcatggctgcaggtacaaggacctttgcttccatagagaaaacgcacagctcagaaagggggccacatgggcagaaacccaaaggaaggacaaaccacgaccaccgtggccatctgcagaatccctggaagagaaggaaggcagggtggagcggggggaagaccatcatggagagaaggaccacagcatcaggagacgggacacgccacacccagcaggcagcctgtgtgttgcttaattttttaagagcaagaggggtagagaggatcaagctggccctggctggagatggctagcccctgagacatgcacttctggttttgaaatgactctgtctgtggggcagcagaaactagagaaggcaagtggctgccccaccccaaggcgtgaccaggaggaacagcctgcagctcactccatgccacacgggtgggccaccagcctgctgtcagaagtctctgggctccaactggtcttgtaaccactgagcactgaaggagagaggtcttggtcagggctggacagcatgcccgggaggaccagcagaggattaaaggtgactgggaggaccagcggaggataaaagacactgctcagggcagggcttctaccctgcatccctggccaagaaaagggcagtccccatgtgggcttgcagggtcactctcaggggcctctttcagctggggctggcaacttgcgtctgggggacacctccaggtgtgtggggtgaggatttcctataaccagggctcccagaagctttgctta

SEQ ID NO: 9927 - DNA, 2151 bp, Homo sapiens
aaaggcacttaggacccagggaacatttctcacgtgcacattcccctaagagccaccagactgcttcctgccagcctgtgcttgcggcagggagccggggcagggcagaggtgaacttgaagttcaggacttgactctcccacaggtggtgagctggtggctctctggtgagctagtgtctccacagcctgtctccaaggcctcccctatgtacatttcagtgagctcactttgatttttaatcccaccacaagcacatactaattttatttatgattcaaatgtgactcgtgcctgcccatccctgtaatagatggaaggtcagccccggcttaaccacagagcactggcccttcatggctgagctcagagctctggcctcctgctcagactaaaggcacctcctctggcctcacccaagcctcttctaaaaaccatgttgaatgaatccacgttctggaaccccgaggcgggagaagtagggagctgttcgtttaagcagcatacacctaaattgggggtttaaacattaagtaggagcttggggtggaagagggacagccggctgggccacctgagcagaaggtggtaatgaaacacctcagctgggctcttgggagaccttaggaagcaggagaggcaacacctctggctactgatggtgtggcaagttcagaagaggtggtggtggggtaggcgtgatgtcagcagaagccctgcaggctgggtgggcaggacacgtggtgggggccactgaaaccaggcctaggagggagaacaagttccaaaggtgccgactggaagaagggggtaaaagtttgctttggtgagtgagaaaaggctggggcgtgtgatccatcccctcacgtttcagaacttccaggctttctacctcgactctcaccacagccagcacatacacctaggctgtttttccttcctccacacctgagggacgcagcaacagctaggatctgcattttcaggttccgagcctgacccctggaactgaccagcgctcgattgtcagccttggcctggggttttgaccttgccagtgaagtttcggttttgaagtgattaaatgtcacttcctcatcagtttcacttctggaggttttcttatcctactccctggtgccagggacgtacctgggagtttgaatcaggcccatttgagcgtggcagccgtgttgggtgaaggtccggggctcggtgaggcactgggggggttttcgggaggaaaatgaaaatgcttctagaatgagtgaaccacatcatagctctcactgttttttcaatagctactttttttagcagacaccagagccacactcaaatggctaagtaggttatgacctctctggattatttttgaatgcccaactgttgcattcaagttttctgactaataagaaattaagcattcatccttcgtatcactgcagaagcaacagtgggggcacagggagggaactcttgacactgagccactaaaatatggactaattttttggacaaatcttcaaacggactgtgctactgtatttgtctcaaagctaccaagtttgtgcaataagtggaagggatgtcatccttcttcaataaatgctgaatgacattcaagctgattttctagaccactgagaaaatctttatttacaataaatttcaataaaatttgcataaatatattcccaatgtacaattttcacctctgatttcttcatatcatttaaaaagttagtctgtcctgttctccttattcctttcagacaccagtgtggcgctgacattggcaggtggaggggagctgccagggagctggggggtggctgagggctcaggctgcttggggtggacctctctctgggccgccaggctttcagctccatccctgccctccagtttcctctccatggtcgccaccaggatcttgagccacgtgttctcggtaaggaggttttctgaggcatcggccagctcctgcagcttgcgggccagctcctgcagctcacgtgtcttctgctcatagagggcctgcagctgctcactgtgtgcgtggagcaggctgtgctgctcttccagggcccgctgctgctgccgcagccggtgctcatctctgcgggcactggagagctgggactccac

SEQ ID NO: 9928 - DNA, 1279 bp, Homo sapiens
cagtgtatgccgaatggagaaaggaggaatttggtagggaaggaaacctttcatttcaagttttaaagtatgaactcaacagtagactcagagcttctacatatgagtctttttagccatcctctttcaaatctaggtgaagcttgtttcttacattagacacatttgtgaaaaggctttatgtaaatattgatttttctatatcaagttacatattataaatccaagagttcctcactgtgtaaaagaaccctgtgaccagtcactttttgaagggcataaatctgtcgatattatagattactcccaattcatgttatctaaagtcattttgatgtgttgagctttcttaaaatgaaacaagcattttttttttaaatgggaaagagactccagagaaatggggtcagtgttcctacaagcatgtatttttgaggtagtctgtattagattttcctgaattccattcagtaatgctcaagtgtttaatgacctcataatgtgttcactttgaatttaagggtaattgaaagaagccttctttagatttctttccatcttctgtatcttctctgaaatgtttagcctagctgttctttgtcctgcagttagtgacagaattcttagggagcttgtaaaaaacacctactgtgtgtcattgttggtttagagacttaactcataaatcagctgtctctaggctagtttcagaatttaggctttattcagattaggaaataattcttggtttcatgtttcaaaaacatagccaactaagtgtttctcagatgctgatcatgaattctctttagtattcacatgacattcttcacttcctcttccattctgcacgctgcattgcccattgcacctcaaaatggagggagttagaagaaagaaaaagaactgaaactttagctgagtgcaatggtggacgcctgtagtcccagctactctggaggctgaggtaggaggatcgcttgagcccaggagtttaaggctacagtgagctatgattgcagcactgtactccagcctgggcaacagagtgagaccctgtctctttaaaaaaaaaaaaaaaagtgaaattcaaattagtattgtttcagatgaagcaaaggactctgaagatggcagaatttgtggtaaaactgttggttcaaatcaggtttttgattattatgggttttatgtatttttccactacatataattttttcttaacctttaaaaaaagaaacttaaagaaccttaataaaggaaacaaaaaactgtagct

SEQ ID NO: 9929 - DNA, 1244 bp, Homo sapiens
agcctgtgccgcacggaggctccatgctgcccttgggggcagcatttgaaggaccaaggtcaaaatctaaatgatccttgactctgtagtttctgttcccttagatatgtcttggtccttttatgaatacccagtgacgtttaatacctgtccttggacagggtgatagaggttgttatcgccaccagctggcagggagaattatttgttgataggtgggtctgtctcaaggcagaaagatgaatcacacgatatggaagtcacctcctgcaaccacttttgttttttcaaccacttgtgaggaaatgctgtctctggagaagcgggtgttagctgcacagtggggccaggccccgctccacgcctgggttttctcacccttagtggtggggttggaacagcactgatgtgccttgagcttgccccacctcacgagctctcctttatcctctgtgcctttgtccttcacaggtcttccccagggaggtcctgaactacacagctgagaacatctgtaagtgggccttagaaaaccaggagacgctctttcggtggctgcggccacacggaggcaagagtctcctgctgaataacgagctgaagaaaggaccagcgctgtttctgttcataccttttaatcccctggccgaaagtcatcctttaatagacgaggtaagagctgtgatgtgaaaagcacctcatgaggagtaggaaagcctcatctacctggctcctctcatcccacactcagtcatttactctggcagctaatggctgccacgaggggcagctgtggctctgagcattgctctttgcccctccatatgggcaggagagagcccgtgtctaggacagggactgccgcagcctctctggccatatttattgacagctgttggtgtctggagtgagtgggaagaggcagggaagccacaccgtgcccttctagagaaggaccaaatgccctcttctgatgtggctgctgttgagcttcctgtttagggggtgaaacagggagtggcaggaacacaggccgagtttagtgtggcctaggagatgccattgtcttgggggtttggccagactgccagccctggccatcctcaggacagcagaggagagcgagcagcagcagcgatgttgggacaccttgtttctctgaaccttccctgtcgtgcagaagccagagtggttttcagaggcagcgccatcggagcctgctgttcctgcctgtcttcggcttc

SEQ ID NO: 9930 - DNA, 1222 bp, Homo sapiens
ttgccactgtggaatgctgggttttggcgggggttctgtggtttgtttcctgttgaaggggcttgattacaggtgaagattaaccctgatttccagcaaagtgtgaaggtatgtttggagtcaatgagagagagagattcaagaagaaacttaagaaaggttaaaagaaaattattgccattgcttgtctggagttgttaaaagcgattgaggacataacttactgataaagttttgagcctgggagaattgtactgtcaacaaacagggtgtggaaagacctactcatggggacagaaggaaatttcagctttgaatgtccctgaatgaccactgtacaatcctgtcaaagctactgcaactccatcccttaccctgtttgttgtttaaatggaggggatgttcaaccccaacctgaaatttttatcatgtgcttaggctttttgaaaaaatgaaaggcaacaagatgcattaattgtcaaattgtaatatgtcttgctttaaaatatcctccattacactgtggctgacagtgcctcagttacctaattctgctctttttcctgcagcctggagtactcgggtactttgagttcagtggctcaccccagcctcctggttatttgaccttcttcacctcagcattacattcattaaagaaaggtaaaaaatgattcatattaagacattgttacttcagtagaattgttacttacatcttttccatgtgttattatgaatatatattctaatttgcttgattccttttctcaacgtatttttatttattttatttttttttagatggagtctcgccctgccgcccaggctggagtgcagtggcgtgatcttggctcactggaatctgcctcccgggttcaagcgattctcctgcctcagcctcctgagtagctggagttacataggtgcctgccgccatgcctggctaatttttgtatttttagtagatatggggttttgccacgttggccaggctggtctcgaactcctgacgtcaggtgatccacctgcctcagttcccaaagtgctgggattacaggcatgagccactgcgcccagccgtcagtgtatttttaataattacattgtttagtgttccatcattagcaaacaggaaatactgttctgtttcacatatagtctcgcaaatgttttgctttttaaaaatatagcttgaggctgggcgcagtggctcatgccc

SEQ ID NO: 9931 - DNA, 1194 bp, Homo sapiens
aagccaactccagctaataagcttaatgttttctcaaagttgagttgattgtaagcatctcccgtggaaatcttgttaatggtagtttacatgctccctcaccgtaattctgagcttgcatgctggtggctctaaagccctggagataagtggcttttgtggagagccaggctgcagaaaaaggaggatgaagtctttgggatgtggggagcaggaatatggattattcagagacatccttctctgctctccactgcccttccagcctacacctaggggacagaatctcagagaattgtttccaacgtattattcatgtcttgcatttgctcagccagatgttgcctttctagggcagtgattttgggactccattttcttattcaaaagaggattttccttttaagcttcattctacttccacagagctatttttagaagaagataaactaagcaatcttttctgtgtttgctcttttttagtcgagcaaaagatgtgataataccagcaaagccacctgtcagctttttctccttgaggtctccagtccttgacctcttccaggggcagctggattatgcagagtacgttcgacgggattcagaggtggtactgctcttcttctatgccccttggtgtggacagtccatcgctgccagggcagaaattgagcaagcagcaagtcggctttcagatcaggtaatgctcacattcagcttaagaatcaaatgactgtcagtcctatatgtagggcaggatgtccccacagagacaccttgcccaacgggcagactttgccaaggtgaactccaggagtcgtttctaagttacagagctttctataaagcaacagaaaggatttccaattgtggcgattgtactccaaggcaagtgtgggagcagattctgaatctcataacacaagccaatgcttatcctggggtgccatactgtttggtttcagcattgaaaaaggtagagggactgaaaatcctagttcttgcatatccatttgatacttgctagttaggtattttaggtaagaaaatgtatgtatgatatgactgcattgtaacaaggccgacctttttaatatatggaccagaactatattcagcagataaggaatgccacctttgggctaggtaagaaagatatataggcaaataagtcacctgttatggcagtggttt

SEQ ID NO: 9932 - DNA, 1293 bp, Homo sapiens
taagatactttgtatatttaatgacaagtctcttccctataattttgctcctcagaaaagaaaagcctagacagactgtatttccagtcacagaacataaaacttaatctaatgggtgttttgttttgttttgagacagaggctcactctgtcacctaggctggagtgcagtggctcgatctcagctcactgcagcctccacctcccggattcaagcaatttcctgcctcagcctcttgagtagctgggattacaggagccctccacgaggcccagttaatttttgtatctttagtggagacgaggtttccccctattggtcaggctggtctcaaacttctgacctcaagtgatccactcgcctcagcctctcaaaagtgctgggattacaggcatgaggcgccgcacttggcctagtgttttcttaactgtgaaattcccattcatttcttgaatgaggctacatcttatggacagagcaaagttattgtcctacagattcttaaaactataattatggctattgcatgaaatttaaatagattttattatgtctgcaaatctctgggcttttatttttctggaaaatataggagctttaatcaaaacataatagttctttttgtaattccatgttaataaaaacaaatactagcaattgcttgaattttaatgaatatttaaaagttcaagagccacggaaatcacttccagagataagagttccctttctaaatagaacacatttttaaaaaataagttatgtttgctactaaaacatttacactgttagactattatgtgcatgttgccaagactcttaagtaacttggatatcaactgtgaagggcctacctctaaaaagtaacaggtcatacaaatacaaatgtaactgtaaaaattccactggattcttgcatatttgcaagattagattattcaaaagaaatttcagtgctaaaattaaccagcaacataagttctatgggctttgaaaattgttctcatctttttaaagttgatgcattttcaatcctgcttacacaggctgttcatttggataagtaaataaaatgtctaaggtgaacttggcattatgtggagatgttggaccgttatagagcaatacaaattcctatgctgtcattctgttttctgcaaatgcaaacgtgcttatatggtcaacagtgcaaaaatagggtagttggctgcatatttagggtattacctaagcatttgttctctaacgttgctctactagaatgatttttttcttgcatcttttcacattaa

SEQ ID NO: 9933 - DNA, 1092 bp, Homo sapiens
attttccccttaggcatatttagtatttttcccccaggcagatcattctgagtgtgcgagtgtgtgtgcacatgttacaaaggcaactaccatgttaataaaatattcaatttgaaatccttttcggtatttgaattgcttttgaataatgttttttatctggatgtaacattgttgcattagctttttaactttcccaagtaattgaatacattttattacttggacttttataaactctttccctacccactataaatgagacattcacagcgttcaagtttgtattaaaggaaaggattagtttgaccccttcttttgatggttaatgcatacatgcagttaaatccctttatgcaaatgtgacactgctttactaggtcttttagttatttatttattttttttttttttgccaatttatattgtaacatgatttcttgaacacagtaagttgttttaaaataaaagaacagcatactgtagtttttataagtaaagcgtaatgaaattgtacccctagagaaaattccattaacttgttaaattagtggaattaacaacaaataaagcatgtttgagacctggcaaaaattcctctggtagtatttataaatagagctgcatgcctctagtatgaaaaccgtatcagttgcaagtgccacttctacaagttactcagtttactctttgtatcagtaactttaaaggttggatgatccttgctggttaaagctaaatctcaacctagcaactaaatgaaaatatttagaatcatcagaatctgaacagactaaaattatcagcgataagcagaatcaagcagggtataagttttatctcaattatttgaaattgactgagttttcttaagtgtaaagctgaaatttgctaaccatgtttttgatgaaccacagtgcagcattgtgtgggttttagattgaatgactctctgctataattatcatgactttgaaatttttcatgagaataaatgaggaatggaggcaatttgtgggtttatccaaagcccccttgatgttgagtgttgccattgatcaaagatagcctcttttagattgtgatttctct

SEQ ID NO: 9934 - DNA, 1251 bp, Homo sapiens
cacacctggctccccttcctggcctgtggtcatttgcttttcatccccagacttaacccgattctctccctgctctttcagcgacatcaccccgcccggagagcctgtgaacagccggcccaaagcagcttcccgcttccccaaactgtcccggggtcagccccgggagacccgcaacgtggagccccagagcggtgacctctgacctcgacaaaaccgcagccacgggccctgtgcgtggcaccagctgcgtccaccccagccactgccgctggcccctcacctcagcgtgacaaccacgtccacctggtgatcctgagagcacacgattcccaacagttacacaacaccccgattaaactaatcagtcttcgagccgcatgataccgtgacccgagagaccaaggcagcacctcgctggagagactgggacacacagtccttctgcttctggggtctaccctgggctgcaagggctgttcctccacctttctgtagttcagggctggcaggagggtgggcaccaggtcaggctgggtgcgccatggttgagaggcaaaggtgatcccctatataggaaggttcatgcagagccagcctctccactctttcccacgtggggactagaatgactattagcctctccttttgctttttaaggttattacctggcctaacctagggatggctggctttgcgggggggggggggggggggggcatggttcctttcactgcattttccaccaacagtcattagacacctggcactgtcacagctcacttttccagagggatattcctgtggctttggcaaggagccattagtgatgtgcaacttgagttcagagaacttcccctacctcccccatggctggcttcaggaaggaccagtgccctccatagcctgaggccacctaggccctcgccaggcttggagtggggggactcagacatctggcccagccatcagcagcaacctagtaacccggcgtcatccagcgtgtccaaagtagcattggccctacagtcatgagagacttgggtcagggaaccactgcagaaggttccagggttttcaaaccaggctccatgactatgaagttggacccagtgtggacacttaacagatcatgtgtctctccactaaaaacattttccatcccgtctgcccccgacattgtccttgataacagaactctgcatcccctaagacagagtcctctgttcctcccatgtcaggtggctctca

SEQ ID NO: 9935 - DNA, 1348 bp, Homo sapiens
tcatctcctttcctttccagcggaacgaacagctgtctcccttgttgtgagagccatgcagacttattttgacaaggagccaagtaggcaccatttactgttcaattctgagacttctgatgataggaacagaatgcagttgatacagctcggagcttaaatttgccttcctgggtgcctagaaaagtcacctttgcacataaattggccatttctgaaaatctcctccaagagactgaaaccaaagctctaaaacgccgcttcttcagtctctggggagcacgttgagttggttcacatccacattctggctgtgtagccactccacagatgggtggtctcttgggatcagaatgcccctccactcatgagactcttcattttgtccactttgacaggaaaagtgggaatgtatgcagagctctcaaaagaaacaaaaaaggccaaaacggtgccttcagccacatcctctgaattggccctgacttggactaaatgcactaatgcaaaatcccttgacaaaagcgcataggttatttcaaaccagcattgttttttatgtaacctgttttaccgcatcttctcagcagcttctgaccactgctcaattttctcctttacagccattgttctggtggacaaataacctaggtactccaaatcctggcaggaaaaatatacagcattatgaaacagcactcagtaatcctaaaatgatttccaaagctggttacacatgacctgcaaagtctattaaattaaaagactttctcattacagagtttagtcaacgtagcaaaaccatgggaaattaaatggaaagataattaaatatgtaaattcataaggaacaaaagacgagaagttaattatacaataggctggtgacaccagagttcattgttatgtgccacaagaaaattaaattttttaaaaaactagaacgctcttcttttagtgttttgctgaaatcctgttttgtatttgtttctttacaacaggtgtaggtataggaggtcaagaaaaggagttcggtaaagggcatagctaataacaaccacacattgggccaggcacagtggcttacgcctgtaatcccagcactttgggaggctgagacgggcagatcacctgagatcaggagtttgagaacagcctggccaacatggtgaaactccatctctactaaaaatacaaaaattagccaggcatgctggtgcacacctgtaatcccagctactcgggaggctgaggcaggagatcgctggaactcaggaggcagaggttgcagtgagccaagatcatgccactgcactccagcctgggcaacagagcaagactctgtctc

SEQ ID NO: 9936 - DNA, 1237 bp, Homo sapiens
cagagccacagcacagcacagagaaactcagtttccagggactttggcagggatgttggtgctgtgggaggattcagaccccatctcagccacttgctagctctgtacatctggtcatattaccccacttctctcaatctgttcttgcatctgtaaaatggggtagtgttaccaccttggtgggcttttaatgaagattatatgaattaaatgcccgctgtattgccaacaaagaatccagcatggtgttcagtgaggaatactgtgcatggctacagtttaactcctgtgaaataaatagatagatgctggaggcagggaggtgcttcctccgcgcccccatgatgtttctgtggtttcactttcccatgctgggcactgccctccctagacaagacctgtctgtggactctttccagcgcagctgtttagccagacgctggccccgtctgcagccgtcacaggccctctgtctgtctgctggtcatgtcatgctctcctcaaggtgccgtcctggtcctgctgttcatattgttttgttctttcccaccaggaagcatctcgaagaacagccctgccacactctttgaagttcctgacacatggtaaccaagacctgagggcagcaaaccgctggtgctgtcgctgtgagcaagagccggctggcacatttggaagccgcactgtatttaacttaatcaaatgtggtatgggaggggttggaaaccaagttgtctcctgggggggagaaaacaggttttatttttgtggctgtggttttttcccctttttaatctaactgcctgttgacattgacactcatcacggttgtaggctgtcatgaatgtgtacgtgcttaaccagtgaattccgtgttgctcttgtgaggcctttcctgtcatgacccagtgtgcttaagaacctgcctgatggggagtgtcggctgtgaaatctgcaaaaagagctgacattccagctgctgtgatcatgaatttgggggtgtactgtcctgcctgtgcatcttctcgcactgagattttgaggcagttgcagccctcggttagtctcccagtggaaaaatcggttgtgcctccctgcttcccaccatagctgcctgaaaacatgacgctctcaagcttgtccttccttcaggaagatgtccactcatgcccacccatgagagggcttgccgtatgccctggcctttgggcatatttatgtagagttcctttctcct

SEQ ID NO: 9937 - DNA, 1205 bp, Homo sapiens
aaaaaaaaaaaaacaattacaagatgagttgatggatggaaatttcattttagattgttggatgtgtgtgtgtgtgtggtaatcaatgtagaactcactgtgatcatcacaattttttttgagacacagtctccctctatcacccagggtgaagtgcagtggtgcgatctcaactcactgcaacctgcacatcccgggttcaagtgattctcttgcctcagcctctagagtagttgggattacaggcacacaccaccacgtctggccaatttttgaatttttagtagagatggggtttcaccatgttggccagcctggtcttgaactccttacctcaggtgatccgcccacctaggcctcccaaagtggtgggattacaggtgtgagccaccgtgcctagcctgatcatcacaatattttgtgtaaaagtcagtcctcatgactttttgcgtctgtgtgttattttttaaggatcttaaggagcctacgtggaagcagtggagagagttcctggtcaaatactccttccttccataccagctgattgctgagtttgcttgggactggttggaggtccattactggacatcacggtttctcatcatcaatgctatgttactctcagttctggaattattctccttttggagaatctggtcgagaagtgaactgaagtaagtatgttttaatggttgtcacaacaggggatgggaaagaaataccaagtgagagaaagatcctcttttatttctcacacttgaaataaatcctccatccacccagacccttcagactctgctttgagaaacctagcttaagcagtgaataggacaattacctgtgttttgggggtgggggttgtggtgctcattgttaaaagtattttcctatatgtcttatctctatgcaataatataccatttaatttcagggggaggggggcaaaggattgtaataatcaaggaataagcaactgaatagaaaagggtctgttttaaggtaggcaggcctgtgcaaacctatcccctaaatcagaggaagctgaggggctgaaggaagaagctggcaaattcagtttctcagaaagaaacacttaataaggccttgccaacagaagccctgtctgtgtcttggatggtagcgagacaagatggtggatccccagactcagggcttgtatacatagggaaggggcatacatgctt

SEQ ID NO: 9938 - DNA, 1116 bp, Homo sapiens
tggatccctttctctgaatggagagattgagagggatgtcgggcagttcccattagatttagtggccttcatgttattcagaattgttttggtgatacctcacccctgtaatcccagcactttgggtgggtgaggcaggcggatcacttgaagccaggacttcaagaccagcttggccaacatggtgaaacctcatctctactaaaaatacaaaaattagccaagtgtgatggcacatacctgtaatcccagctacttggaattggaaatcgcctgaacccaggaggcggaggttgcagggagggagactgcaccactgcacttcagcctgggtgacagagggagactctgtcttaaaaaaaaaaaaaaaatcatctgtaaaataaattccgggatagtcgttttgttcaaggaaatgttttgtaaattgagctcacactatataatctttattgtcctatcctgatgtataatacagcaggtataattacaccaagcgctatagttataaatatggcatgaagtgaactatggccttttatttccttccagtgtgaacacagcaggtgtgagatgtcatcttggaagacaggccttgcagaaataggcctacatccaaaatattatcttgtgactccatgaaccattcattaaccctttgtatctttgagtgaaaattttactcaaaagttgcatctggaagttcgaagaaattacttgaaataaaaataaagatttctatatagataaaacctatatgtagagaaaaagcaattgtctagaaaacacaaaacttctgcattgccggatagaatcttctagccatgggccgagcgtggtggttcgcgcctgtaatcccggcactttgggaggccaaggtggatggatcacttgaggtcaggagttcaagaccagcctgacgaacatggtgaaaccccgtctctactgaaaatacaaaaattagccaggcacggtggtgcgcacctgtagtcccagctacttgggaggctgaggcaggagaatcacttgaacccaggaggcagaagttgcattgagccaagatcatgccactgcactccatctgggtgactgagcaagattccgtctcaaaaaaaa

SEQ ID NO: 9939 - DNA, 1149 bp, Homo sapiens
gacatcacctgcttcctggggagccctgcagatggagatcacgtggtgggctgtcaagtgtctcagaaatgtaatttatgacccgtcctgcctcttgctttactggtttcccttgagtctctccaggtccctgctctaatctcagtttccccacttcttccaggaccggcagagaacaaatgccaagaactgttgtgcaagtgtgaccaggagattgctaactgcttagcccaaactgagtacaacttaaagtacctcttctacccccagttcctatgtgagccggactcgcccaagtgtgactgactaccttgacttgaaatgctcttttgcacaaggaaataaagcgtcctctcagtaatgaacaacagcattcagttatttgcagaagggaaccgaagccaagtgataaagccacaaccttgtgtttgctttccctcccaatcccagaactcaggactggagcccatgtggtttgcagttaaaggccaaaagtcctgcacctattttataaaactatgactgtgtttatcactgtgttggggtcggttccatttttgaggttccatctttatgaaaagataacctgtcttctaacctgcttggatggctggtagtcaaatgtgaacgaacacctaccgtgtgcctggccatgttctatgttctaggctgcagcaatcaacaagatggccatacaacacccacccggtgaagttcaagtccagtagctgttagcttaagaaagagtattcccttatcccactacaccttaaaatgtatttgctgtcctgcagcgttggctcatttctgtaagcccagcacaatgattacaaaagtggtacatacttgttgcttcttaaaaaaatgaaagtgcagagaaatatagagcagaaagaaaaatcactccaattcccacaattcagaataatctgttaggatctatagttttaaaaatgtagttcaaggccgggtgctgtggctcacgcttgtaatcctagcactttgcgaggccaaggcacgtgaatcacaaggtcaggagttcgagaccagcctgaccaacatggtgaaaccccgtctctactaaaaatacaaaaattagccaggcgtggtggcacgcgcctgtaatcccagctactcaggaggctgagg

SEQ ID NO: 9940 - DNA, 1252 bp, Homo sapiens
gggaaacagcttagataaggccaggtgtacagtagctcccacctgtaatcccagcatttgtggaggctgaggtaggaggactgcttgagcctgggagctcgagaccagcctaggcaacatagtgagaccccatatccacaaaaaatttaaaaaaggagtttgtcttcctgtagtagcagacttgagaggttgaggtggcagtatcacttgagcctgggagttcaaggctaaagtgagctgattgagccattgcactccagcctgagcaacagagagatacgctgtctcaaaggaaatacaaattaaaaaaccagccgggcatgctggcgtgtgcctgtagtctcagctacttgggacactgaagtgggaggatcgcttgagcccaggagttcaaggctgcagtgagctatgattgtgccactgcagtccagcctgggcgacagagaaagaccctgtctcttaaaaaaaaaaaaatcttagataagaggatgctgtgcctccctgggggtcttcagtcacccatagtcctggcaagagaggagggccaggagagagcttcacccacctgctgtcctgcccatgtgacatccgcaggtgctgccatggccacgactgttgttacactcgagctgaggaggccggctgcagccccaagacagagcgctactcctggcagtgcgtcaatcagagcgtcctgtgcggtgagtccccagcagcaccatgccacccaccccgagtatcccctgggcatcctggcatagccagatgacttccgtgcccctgttgcaataaccactgcttccaagtctctatagaccaccccttgggtatatctaatgtaagtgatatttattttatttattttttgagtcagagtctcgctctgtcacccaggctagagtgtgctgatgtgatcttggctcactacaacctctgcctcctgggttcaagcgattctcgtgcctcagcctcccaagtggctgggactacaggcatgcaccatcacgcccagctaatttttgtattttttcagtagaggtggggtttcaccaagttggccaggctggtctcaaactccccacctcaagtgctctgcccgcctcggcctcccaaagtgctgagattacaggcgtgaggcatggtgtctggccctaatgtgagtgatctttaacaatgaggacttgaaaaagaaaaccatgaagaaacctaattatttgatgtctggacgacaaggaagaagatagaaatggca

SEQ ID NO: 9941 - DNA, 1099 bp, Homo sapiens
tttagaggtttctaatcctgtatcagaagagacatttgatcttttaagctgaaatgctgtggtttgatgttgttttaggtatgaacatgctaatgatgataagagcagtttgaaatcagatcccgaaggggaaaacatccatgctggactcctgaagaagttaaatgaactggaatctgacctaacctttaaaataggtaactgcttactttgtaagtcagctgtggggtttggaaggacacttggtaaccggctttgaagacgacggctcatcccttagcgggctagcgcctctcgggctgggttccaggcgaagatgcggttctgagacctccctccccttctgcagccttgccaggcctttctctccgcccttagaatctccatggaggagacccctttgtgtgtggtcaggaccctgaacaggagagtaggtccacgtctcacccatgacagaggactgagaaactcaagtttgtctcgttacctttgcaggccctgagtataagagcatgaagagctgcctttatgtcggcatggcgagcgacaacgtcgatgctgctgagctcgtggagaccattgcggccacagcccgggagatagaggagaactcgagggtccgtagcacccatcagtgttcattcctcttctgagttttgtcccaccaaacagcaggggccacgaggaaagcagctgcccttgggatgtctgttcgttgtctctcaaagtctgtcaatgtttcctgtaagctgggccttgtgccaggtgtcagagatgccaagtaggtttgacacagcccatgccccagtgatctcacaagctcagggggaaagatccacatagccacgctgtgtagtaaccctgccttagagaagagggcgggtagctggacactcaggcagacacattcacccctgccaccaaggtcagggaggacttctgctctggagctgtgtcctgagggtgaatgaaatgggctgttgtatgtgtggttccccctacaccccttccctatagcacttcccaccaggaatagacctactgctgtgggtcccttagcatggaggaccaggatacaaggctgataaggtatcctcca

SEQ ID NO: 9942 - DNA, 1243 bp, Homo sapiens
tagagaagccaaccttactgtcccctgctgtgataaagatgtcaaagtatctttgttcttggacacaaatatatataataaaatacgttaagaaatgaggtggcctgaattagtaagaaaaaagttgattgcttactgctttacccacacacatttccatctaggacttgacatatccccatttgatatacaagttaaatggggtctgtcaatggcatccaaaaagttactacccgccaaagggaaagcagctatgacctggtctaaaccctttttttcttacagatggggaaaccagggtgcagagatttaagacttacccagcctgtaaactctcacctctagtatttgcttgtcatcttggtgcaaccagaaatccacatgtggaaatggtgtccaggagtacggtcctatacgaagttgttctgtctctgcatcataaatgctaatcatctaaaaaagaacgtgtcaaggatagaatttcaggaatgtcacccacttttcaaaccctcccagtaacgcaagctccagtgtagtcctttcatgcatttatctgcctaagcttcttaaaacctgtctcaaataacaaaagctgccagctactgaacacgtccagtgtgtctgcttctgcacactgtggggcacgcacgactgctgagcgccaacagcagtcccacaggacgagggtgttttttcccatttggggtgaaaacttgaggctcagagaaacaaggcccatttcccaggttacgtgtccagtaagcctcagagctggacctcaaacccaggcgcttctgactaaagtctgtgttcccattgcctcattatttataccccaaacaactgatcaccttgcaatttaaaagcatacagtgcctgctgccccatcaaaagaagaagctaatttgccaaatgatccagtccctgaattcccaaatttgccaatggcagcctcagcttacctagcaatattcactttggtaactgacactgaaatatgttctgaatatcaactaaactaggcctgttacactccttgagaagtcctaaaaatgttaaaagggttggctccgaatccaaacacatttcccagtgaaaacatcagcatttcataaatgagaagatttctttggggtggcctgaatgtgatttccgttttttcacactttgagcatttttaaagaattctttcacccattcctcaaatggcatataaaccttgggttttcagttttctaacttt

SEQ ID NO: 9943 - DNA, 2708 bp, Homo sapiens
tcatgtttcctgtccccattgagcttcaaatctgtttgcaagtcagacttgaaacaaatgattacaatgtgtgatgagcagttatgtgggtatgttggtaagaaggaagtgcttatcagagggagcttttgttctgttctgtttttctagagacatggtctcgctatgttgcccaggctggattcggaactcttgagctcaagcagtcctcccacctccacctcctgagtagctgggactacaggcgtgtgccactacactggctttcttttgaaattaagatattttcttcaccatctttacaaacgttaacaccttcctgaggaaggaattgttgaaagcttttcagtcagcactggtgatgttactgatgatttctgatgtttctgcaggacatagtggaagatgaagatgatgactttctgaaaggcgaagtgccccagaatgataccgtgattgggatcacaccaagctcctttgacacgcatttccgaagtccttcaagtagtgtgggctccccacccgtgttgtacatgcaacccagtcccctctgacggcagaaatttgtgactgagatgtgacatttgggattccccatcacttgtcatgccctcagcacccagcttgtgccattgggcattgatggcattgaactagagcgagtgcctgcctcggctgtggcacttccaggttcgactgaatcaagcatctgaagactgggtttttttgttgttgttgttccccttacagacaaaatgaagactatcatgtgcaatcttttacagtggggttgatgatacatttggaaggatttgcttgtttaatatgtacattttttgtgttaacagctttttgacacaattactgggtaatttctaatataggcagcagactgttttacgggttgctgttttaacatgggtttttgtcagatccatggtcttaggacttgactgatgagctttcagtgaagaatcctctaagataaaacttctatttaaagactttaactagaaagtgtttattttggctacattgttcaccttctgctgtattggtatttgtctgttgggatttcaagggagtgtagagaagacagaaggaaagctgagagctggcccgacatggtctgggacacagagttggagctggcactgaagatctccagggacttcagagaccaataaaagcccatagggaagagagagaggatatagggaaacagaatcagatgtgtaatatacttggcacagcgaaaaaatggatttaaaagacaaaaatggaggtccaggtagatgtaattcacacagactgaaagtgagttcgggcttgtgtaaaacacatgagattggatttgaccccttggctctcaagtgtccccttagatctagaactgctccttggtggccattagatcgagtcagttttgatctgcatcacttagttattgggaatttctttgttggaaacaggaaaatttttttagattatttggtgtacggttttgctcacaacaataggtggaagttgctagtgcagtcttggtctgatggctgtgtgcatcgcacattcggcttggtgaaatccttctctaaagcctctttttgtatttttataactaaacagaggaagtcttcagaagacctcgctttaaaacaaatttgtgcaaacactgctagagtcattttgaagctcaagcattttcactttgtttcttacatgtgtacttttttgtttacttgtgaaaatggccatctttaagcatatttattttctgccactttatttaaaggcaagcaatattttcttgatcataaatattttgtaatgaaatacttcctcttttccagggctttgtatgcacttgtataattacattgatggcaatgtagagtttgaatttcagtctgtaaatacttttttggaaaatagaaatttttattgctttaaagttttggatatgggtggttttcttttccgggtttggtggaaagtaatttgagaactttaaggttgtctttttaactgctggcaaaatgttgattttttaatattagataaaacgagtaaacgaaattccccagaaattagtagtaagtggggtctttgtgggttgggaagtagttttaatgtagaaagacatttacatataagtctgtttaatttcaaaggagtttgtgaaaaaaaatccatggtgaaaatgaaacaatgacatggttaatctggaacttacgttcttataccaataaaaggtacctcaatacatgttctttcaatttctgttttgtttttttttttttaatttaatgtattaaagcattttgcagtggaaaactcctgaggcattgctgttgaagagggagaaatagtgctggtgtggcggggagcttgatggaattcattgcatgccggggtgaggatggtttccgtgtgcactatatgaagtatccgcgactctccttaatcacacccagcaaagagtgattgaggcttgagcaggtccaagggaagcagacacttctttcaaaaagttacatgctttgaagggacatctatggggaaaaatactgtgaaatctccttataaattacatgccaacaatgggaatttttcctttcactaaaaagctgtcagttgtaggagtctccagggtctgtccttttgtctgtgtgctctggtttggtcttccttgatgagaagtggctgaa

SEQ ID NO: 9944 - DNA, 1372 bp, Homo sapiens
tgtccgctgacgggtggcctctcacccccctctagagaaacctgacatttacaatggattgtatttgtccggcaaaaaaggcggattcattcatagagcagaaagaacctgttggcgtaaggtcttccactagttagatggtttcttttggggaaatgtttatatttggtaacttctagaaagccagaaaatggactctgatttcatagcattttgataaaatgccacaaaataagggctatagagagatttttacaagtcagattttttgttccccaaatcttttaaatgaagccagtgactcccagttctcaacacatggccccagtcaagacagaacaccatggaaaaaaccctgtaagtattatggcactctccgaatcctcctgaaggcatttcctctacagacatagtgttacaggaagtgaaatgcaaatgtgcaattttttttaaaggagcttttaaacaaagtaataataattggtgttgagaacatcagttgccttattctaagatttcataaggctgagtttgcacgcttggacttcagttctgctagcatgtaaagagtggtggactttaaaaccgtaagaggtatcattacaagtcacctggaacagactcaaagaacaggttctttgggcaacagacaaagaagaatcaagttctgtgctgtcccgtgagtgtgtctgagtaccattcactggagttgctgcttaggtctgggacgtgtgtgtgactcttaacaattgctgtctgaaaatgagagagaagacttcggaagcacattgtgttcataatgtactccacaatggccagtccaattgctatctatttttttatccagaggcttaattaaatgatgtggtaaaatgatgtttgagcattaagacaatgtaattctttatttctgggtggaaagatataccggattaaatttatctgtttaaaaaaatgacaaaagttatcaccaaaaccccctttcccatcttgcactgtttgttttggattgggtttgggggaaagagatgtttttcttagttgtctactttgtttgaacacttttgttgtggttcaagtgctgttttgtgtgttgggaccaaacagttgtcaataaactttacaagcgagcatctattttgagtttcccaagtgagtggttttgtctgtctgtctgtctgtggggaggaattacaaaccaatacagttctgccatctttcattttgggtctcctcaacttctctccccttctggaaatagaattgtgaggtggagagtaaatccgtctacatcttagaggccttttaaactcagcacacgccgaagcaggtggctggatggtgggcccttcgtcgtcaggatcctccaagt

SEQ ID NO: 9945 - DNA, 1197 bp, Homo sapiens
gagatgtatcataagtgctgcagtcgaaatctccacaagtgttgagagtacacagcttcaaatatgcatacatttcaagacttgtgagagaaaagtattcttcagaagttcatttaatcactccatgagccacaacagtagacttaacacaaaggccaacacaggactcagtggcctgcacgtccctgctgatgtggaagcagacgcgtaactgacttggagcccagttgccctatttttaatccccctcctggaaaactacccagaaaatgccatcagaatgcatcagagaggccagtgcctcagtgcttgcctccctgggtccttaattttaaccttcaaacctggtggtgggcattcagacaaatgattaacacatacattaaaccaaagccttctgtttagcaagcgcctccttttctgttattttgatttaacctttcctttttttgttgttttttcctatttcagctttccagattgttacattgcagagtttggcgatctagaagtagtgcaagaaaaccaaggaggtgttcccttagaacacttcattacctgtgttccaggtgtaaacattgccactgctcagaatggcatcaaagtggttaaatggattcacaacaagcccccgcctcccaacactggtaggtgtcaggtattttgtcctggagctaccacctgtccactatgagaccagaggaggctattggcttttattttaaacagcagcacaatttgccaagtgtgaaaacaccatggatgtgtcctttgatcttttgaaaattcctaaaatgcttgaggggttggcgttactggactttgttttattttttatttatttattttttttgagacggagtcttgctctgtcgcctagctggagtgcagtggtgcgatctcggctcactgcaacctctgcctcccgggttcaagtgattctcctgcctcagcctcccgagtagctgggactacaggcaccagccaccacgcccagctaattttttgtatttttagtagagacagggtttcaccatattggccaggatggtcttgatctcttgacctcattatccacttgcctccgcctcccaaagtgctgggattacaggcctgagccacagcaaccggcctagactttgttttttagatagggccttgctgtgttgtccaggctgctcttgaactcctgagctg

SEQ ID NO: 9946 - DNA, 1135 bp, Homo sapiens
gttaccactaaaaatgccagtaagtgggtttgcgttatttttgccattttccaatattacattgtggaggctgaaagacagcccataataagggggttgccaggcccagatggggctgttctttgtaagaggtgggttagattttgaagtaaggcttagaaaccttcggttcttctcacaaatatacagataattggtatgtatgaagtttgcttttatttatttcaaaatatcatatgaaattgacttgtagatttaccttcccaacttgccagtgtcttcaaagctagcagtgttttgtgtcaggtggatagaaataacggattaaaagtcatgattctttttgcttccaagtattatgggtagagaatatggcgagggttctcacatacttgtgtggttggcaccaaataagtggagtcaattgtgcatttttttcggtatttaatccttaagcttcagcgggcctctgagtctgtgctttctattgtgcattccctgtggtgcatggacacaattagcaggagtggttattgctccacctgtgtgtagcctgtttatgccatatactgggaggagggtgtgagcacatttccaggactagcatttctgatagacttgacttgggataagaatgtttattgcagtgctgggctgtgtttaagccgctggcgaatatgtgtgtaactctgaaagaattaatgataatggagaaggagccatggtgtgggtgatccaggagagtgggcaatcccatacgttaaatgaaagtcttcacatataatttaataactgagagttacagaagtacgttagacatgatctcatgcaaagtcttcatttaagggagaaagaaatcagctcttagaaaaagtaaacgtgtcattggtgattgcagcagttaagagagtgggccccgggtatcctgattccggcacttgcctgctagtcacctgtgtccccgatacccaacaagccccctgcggtctggcttaagttgaaactcatgctatggacagttgagagttgtggataccagaggcttacccagggagtaagcatatacaggccttaccttaatcttttgaggctctttcctaactcacctttgtcattatttgtttttagtcacttg

SEQ ID NO: 9947 - DNA, 1166 bp, Homo sapiens
tttttctttctttattttattattattattttgtttgttaagatttgaattgttggccgggcgcagtggctaatgcctgtaatcccagcactttgggaggccgaggagggtggatcacttgaggtcaggagttcaagaccagcctggccaacttggtgaaaccccatctctactaaaaatataaaaattagccaggcatagtgacaggctcctgtagtcccagctactctggaggctgaggcagaaaaatcgcttgaacccgggagacggaggttgcagtgagctgagatcgtaccactgcatgccagcctgggcgacagagcgagacttcctcttgaaacaaagatttgaattgttgagagccataggactgtaaatatagctgtggtttcacattttagtatgttgtaaaatttgtacttatgcaaggaaataacactgaaatcttactcattcttaacagggtggaagaatgaaagaaaagaaagatgaaaggatgttgaatcactttgcatggctgtatgatggaaggaaacggaactgagaactcctgcagtagaacacgtggatggcttcaacaagataatgatgctaagccatggctttggaaattctctaattgcttttctcgtcctgagcagacgctgccacatagtccccaaacggtaactatatgcaagactaaggatgtagcagattcctcatccaaatagatgagagaggtccatttggtctgggatacagtctctcatcctagagtctgtgccacatttttctgtagatcttgcctgtattgcctcttataccacattataatgtgagagcacagcacaattttttaactcttctatttcactttgagtaacagtagatgccttgaatatttaatgttaaaatttgggaaagatttcttcctcattaaagtcacaggtaacaaagattaaaaatccacattgtggagtaaaatcagaggaaaatacaaaatatgttgtattttactgtagccctcttgagttttgagtctataatctaggaagggttgggaagagcttatccactgcctgttttttatttcgagatttctcttgaatatttacttctcagtatacatttatgtctctaacttcttgcttactcattgtgattttgacattttcttttttttt

SEQ ID NO: 9948 - DNA, 1177 bp, Homo sapiens
cctagaggtgaaaggcttcagagaggcagtacagggtagaggttagcactttgcagcccagatggcctgggtttgaatcccagttctgccccttgctagccatgtgaccttggggaggagattaactagcttctttgtgccttagtctacccatcacatataggaatgagcacctcaggttttttgtgaggattgaatgaactgatgtttgtaaaactgcttagaacgatgcctggggctgtgggctttgtataagcgtgagctattattgtcactgtccttgtcattggtggtgctattcctgtggttcaccaggtgagtgggcacccctgtgagggcagcccggctctaacattttgcctcctggaggtatcggttacgtctagatgttctccagcacagccctgccctgggaggatggcaggagggaaccttcatcaactccccgcgtctgttctctaccccagaggttctacgtggcttcctcccggcagctgaagcgcctcgagtcggtcagccgctccccggtctattcccatttcaacgagaccttgctgggggtcagcgtcattcgagccttcgaggagcaggagcgcttcatccaccagagtgacctgaaggtggacgagaaccagaaggcctattaccccagcatcgtggccaacaggtgggcatggtgggcctgcaggagcgggtggaggaggccgccttagcaccttgtctctttgcctcgatcttttcctcgcaccttgagctgggtataaagccaaaccccggccttgcagaaaggatggagaggcttgatgagcgcggaggacagatgaatcattaagagcagacagcggcactgtagacatgcagtgcccgcggcatttaagtgcagggacacagctcttctggagtcagaaagccctgcaagtgcttcccgttaactgtcatcctagtgatgcaagactgccagcgaccgactctgctattgagtatcttcataccgctgttcccgtctgggggtgatcatgcacccctgggtgatgtgtgtcagaagcaatttactaatactaagctaaaccatatgagattgtcatcttgtgggccagatgtcatggctcacgcctgtaatcccagtactttgggaggctgaggcaggaggatccattagattccaggccagcctggg

SEQ ID NO: 9949 - DNA, 1242 bp, Homo sapiens
ctcatgggaatttgaccttgactagaaatagagactgagagtgagcaaccagctggaaggtactatgccagtcctagcagaaaaatgtgttaggggcctggcccaaagcagtgttggttgcttacagtgttgattgattttgttcttttttcttaccacctcttttctttccctctcatggtacctgctcatggttatgaagctttcaaagtaaagaacacgaaatacctcccaagtattaccagtgggtaccaaaaaaatgtccccttgagtcttttccttgtttttagatgttaattctctcccttggcatccggttagccccccagggggggcagcattgtggagaacttgatatttagttactgatgctcttccaggacacgaaaagaacccatctttgaatatcaatgattttttttttttaagtactgttccggggagaaaaacagtctcaaaacttgaacttcttgggaatagaagtgttgggctgagaagtaacattcccaggaaatagtgagaagctcgccctgtgtttgaaaccgtgttggtctctgtgttcctggaagaaaacagggaagcagcatcttttaaagcctgttctttaaggtgtctcgttagagcccaaagtggaatccggaaggcagccagagctgaggctgccccaagactcagacttgctaagaattacgccgccgacttcaaacccagagagcatctttcttttaggcgaaaacgcatatatttattttttgtaagttataccattctttcacattagataaactaagttttgggggatccttttgtaatgacttacactggaaatgcgaacatttgcagtaaaaaaatatatatatatctatatattttatttctttctaaagaatggttccctttcctttggggcctcggcgagggttccagccatgtcctctgcagggtcaggatgtggcatcttcctgtttctgttctttccttttgacaacaagtcgcctctagtgggagctgttgccagaaagggcaagttgtagagatcactagtcagatggggtttagtgggaaggcgggacagccgcaaggtggacggagcccaggttttggggttggacagaccctggcttgagtcctgctcttgtcatttgctgttcttgtgaccctggggaagtcactcagcctctgtgcctcacttgctttgtctgtaaaatgaggctgatcgtacttaccctgtgagcagtgatg

SEQ ID NO: 9950 - DNA, 1275 bp, Homo sapiens
cagccttcttagctgagtgaccttgggcaagttactcttagtctcttcgtgcttgactttcctcgtctataagacggggtgatgatcccgaccttgccagtggtagaaagcaaagcagccgcgggcctcatgcaatgtgcatggtgcctggcagctggtcggtgctcagcacacagagctgtgacgggcctcatgcaatgtgcatggtgcctggcagctggtcggtgctcagcacacagagctgtggctgcccctggtgccgttccagggatgctgtatttttaggatttgccagcttacgagcctctcaagcatcgtcccttagaagtcagccccgttgtggatcctcagttgtatcacgtacctccctcatcagaattggctcataataattttttgtgtttcataaagtcagatcctcagaggaccgtaattgtcaaggttgggtactcataaaaaggctgcaggctctgacagccttatcagaagccacagtctcagagacactggggacacatgcccgccactgatggaatagcccgctgaggttgatactttgaaggcagcaaccttggtttggatgtgtagtcttggggatttctttaaaaacataaagttctttacatcacagccatacgttaggttttagttttcatttgctttgccagagctgtccttataaaaataacttcttcccatgtgtgcacagaactatgttgtgcttctggactccacactccccagatcccagtatgactacatcttgcctcaagtttctttcaccgcagtgggctaccataaacacatcaccttgatttttaatcccacggtaagtaaaagagggagttaaaaaaaaatccatgggctgggtttggtggctcacgcctgtaatcccagcactttgggaggccaaggctggtggatctcttgagcccgggagtttcagaccagcctaggcaatacggtaaaaccccaactctacaaaaaatacaaaaattaaccgggcgtggtggaacgcacctatagtcccggctactcaggaggctgaggtgggaggatcacttgagcctgggaggttgaggcctcgatgagccatgatcatgcccctgcactccagcttgggtaacagagtgagaccctttctccagaagaaacaaaacaaaacaaaacaaaacaaaacaaaacaatccatggggtggcaaaagaaggcatgtccatacaacctgtgctccaggtcgcaggttgcagggcagatatttaaagggctcctggcat

SEQ ID NO: 9951 - DNA, 1185 bp, Homo sapiens
ttaaacctggaacacctctagggacatattaggcccggagagaggccagcccatccctggggactcattagtaagaggcctgcctcgtttgaactgaaacccacccattagcacgtggcagctgctgatcatgtctgaagaaggtgtgttgagaagtgaggctccgctgttcatctggcaaaagcctcctctttgtacccctctctctcacactttctctcttttctagctcattcctttgctgctgcagttgacaagccggctacagggagtcggcgcgctcggccaggcagcctctgacaatagcggcccagaagatgcaaagagacaagccaagaaacagaagacaaggcggacgtgaggaggaaggggacagttgcagtctcacttgggacaggccacagccaggggtccggccactacccgcccgtgggataaaagccaaaagcatgcgtcagctaacttcagcctgtgctgctgggcccgcaccccatgtcccttgtcactgtggcatcctgcacccatcctcacccctccgtagagcccctcgtgcaatgcaatgaatggaccctcctgtcactctgctgaacagaatttattttctgagtcaaatataatttattattatttttgtcaaagaagtatttaagctgtgctgtggtgtgagaatgtcattcttgatcttcagccttcgtttgcaagaagagttccagttgatgtggtgtttggttccatggcggggtaccctagggattcatctgttttcttcacttccctttgcatctgagatcctgctggaaaccacggcaacctgtatccactattaggaggtaaaaatcaataaaatggcccattcatttgtgttgtagctcatcatagatgtatttcttggatgacatgcacgtaacccccgggagtcttcagttgagccaaatgtagagcaagtcagagtcctgagtgaagctggctggggcaggaaaaacacgagctcagccaacatggtccccagcagcttttggcgtcagtgatagagaaatcggagatagtggaggttgtggcaagttgaagtgtgcccaccacgtctaagggaagcttagggactcagctctggctcacccctgctgtgcagaaatgtgcgttcatttttctagagaagccagaaaaacaaagatttacgtgaaattt

SEQ ID NO: 9952 - DNA, 1212 bp, Homo sapiens
aaaaaaacaaaaaacaaaaacaaaaatcagccggtcgtggtggcaggcgcctgtagtcccagctctttggaggctgaggcagggagaattgtttgaacccagcaggtggaggttgcagtgagccgagatcggccactgcactccagcctgggcgacagtgcaagactccatctcaaaaaaaaaaaaaagaaagaaaggactcttgagatcttctcagagctctttgagaggaaagattggattattgcacttctttggcacaaagtagtctttgggaatgggaagcagtgaaggaagggtcaaggggaaaatagtttctttcagaattgcaaggtggattgttttgggtattgtctcccaattcttatatgttaggttgtaaaaattagttctgatacagagcaactgtcttccccccaactttttggagaagcagtcactgaggtgatgggagagtgaagaattgagtaggctagagcacagaggtttagctctcaagttgatgtcttttatttaatccagtcagttatcttttgtaggttacattggcgaatttgaaatcattgatgaccacagagctgggaaaattgttgtgaacctcacaggcaggctaaacaaggtaagaacgagtgatctacacatttcaaagctttaagaattttttactgtggcgttaaatgttgtaattgcctttggaaatactgagtagtggtgccatacttgatttatccagttactttaaaaaggtttaaaaattgacacatggaacttcatttgctctcctgggttgattgtgctaggattatgtcagttgacctagtgtttttatggggtataagctgtctcaggagagatggggggtgaaaccaacgctggtactggtatttggatgttaacgctacccacctcactggcttgaacttgggtggctcaaggccattgagccttttgtccaaggtgctgtgtccttcctctcagtgatgtgttgggttttttgaatggaatctttatctttgagtaaatggggctttctaaatagcaatatgaatactttttctgtttttgctggcataggtctttggggtctatgctgcttttcagtttgacttgtcaacaccttaaccaagtaaaactgactttgtggtttaagtgattgcgtgtgttttgggggcaggtgtcttaagctggttgaggtgtccactgtgcttcctg

SEQ ID NO: 9953 - DNA, 2182 bp, Homo sapiens
aatcccagctacttgggtagctgaggcaggagaatcgcttgaacctgggaggcggaggttgcggtgagccaagattgcgccattgcactccagcctgggcaacaaaagtgaaactttgtctcaaaaaaaaaaaaaaaaagtaataacctttagcaggttaattgctgcctccttaatgttgggtttttttttattttaagtgacttccttactattgcttcctggactaaaccaacatggaatcattttgaagtacattggaatggccaagagggagataaacaaacttctcaaacaaaaagaaaagaaaaacgaatgattcatctgctttaatcagtgtgattaatgcagcacccattgccccgggaaccgtttctgctgtactatctggatactaaaatgttacggaagtagctctttgttctccctcactctgcccttagttaatagaaattcagactcgccaagtaaggcttcgtgcatagtgtcttcatgtcgcgtatagttgagcgcgttcttagcagttggcttcatggacaactcattagtgttttgacttttcttacccagcgttaattgaattcttgcttttagacaacttcctttttgtagtggtgaaccttgccctttagtacagttcaagtgaatctggataattgttcatctttgctttagcttagataccatgtagtggtctgtggctacaggaagctggttctgtctgcttccacagtctgcttaaaaaactgtctgacttcgtgaatatagagaccaagtttaccacttctgatgaagagaccaattaagattcattcctcattctgtttctttccagtgggagaagagtccccatgaaataagatgaaactgattccatgcactagtacatgtaggcttctcccttgtgcaaagcttagcaatttgtaggaaactttgatctttttgtccaagaaaaggaatgtctgacaggcttaagctttcgtccccttgcacttagactcgaagttagtaaatccttaaaggctttttaatagcagacttccaaaagattgcatttaggatttctagcatgcttttaatttcagattttcagctgacattagctatagtatacagtaggttaagactcatgtctatgactttcactctaagactggcaaaaggacagcagtcttctatgtttagtcaatattcatttcagtagaagataatcttatctaatttttgagaccagaataagccttttaaggtaaacctcaaaattatcattttatggtaatactgaccattttagtcccctaggtttgacatgggagatagtgactacactggtgtctgacttttttcctagagatttctccctgaaaaatacaagggctgttggtgagagcagacttgaggtgatgatagttggcctctggtctacaaagatttcataactccttggaaagcttcttataatcattcttaacttcttggtagctagaaatttagagtagttgaaatctttaggaatgaacttctgagggccaaaaaatgtgactgacgggaacaattcttaaactgattaactagctgtaatatagttttgtgaatttattgcactgatgttgtaccttgtggtatatctgtccctattaaataagtgttgttttctcctctttaatattgctgtgaacagtggtgcccattgtagcatatgtttgatttttttttattatttcataagaaaactacgttaattttaccttactttcattgtaaataagcctgtcttcctatctggattttttgtgtgcatacatattctactgattaactacttttgcagttttaatcctgtattatttcttctactttgttttgtgtaaaaggggaaaaaataaaaaaagctggaatcttcatgtctcactttctttataacttagccaatataatatttatgattggatttatgaatctgattaatgaagtaccctgtgtggtccttagatgtctataaggtaccctacctgtaatcccaccactttgggagacctgggcaggaggttcactggagtccatgagtttgaggttgcattgagctgagtgtacccctgcactctagcctgggcaacagagcaggaccctgtctaggaaaaattttaaaaaagaacaaaaataaaaggtttaagttttattt

SEQ ID NO: 9954 - DNA, 2581 bp, Homo sapiens
ctattcagtaatacattatagtgaattcatgatcaaggtttccttaaatttagcattgcatttcagtactgactgtgtaagctaaattgctgatccaaaataaaaacccagactagaatagggttcttaaaatcaagtatcaatacaaaatagaacacaattaaaatcttaattgttggctgggcacagtggctcacgcctgtaatcccagcactttgggaggccgaggcgggcggatcatgaggttaggagagcgagaccatcctggctaacacggtgaaaccccgtctttactaaaaatacaaaaaaaattagccgggcgtggtggcgggcgcctgtagtcccagctactcgggaggctgaggcaggagaatggcgtgaacccaggaggcggagcttgcagtgagccgagattgtgccactgcactccagcctgggcaacagagctagactctgtgtcaaaaataaatgactagataaaaaaaaaaattgtttgagtacattttccctgcattttagagattaggacagtggtcactttctagttgccgtcttcacagacaaacttgaaaggtattaaggaaaaaattccacatagctctgggccttttttgtattctgattgccacgttaatctgtaatcgttaagtacccatgaaagaatgtgtttcagtatcagtgcttttttggtactttaacaagtattgtaggcacggtggatttttttgaaatacccatgtgtccaatagcaagttaaggaacctagcgcatcaaattttgttttcttcattcatttggaaccttattttcgcaaaaaacctagctggaataataatgccatattgtattttgcacactgctttattttctagaggctctgggagcaaattacattcatcacattacctctgctctctcaagattaaagtctttcagcaacattctttattgtcatcataaggaaaaacttttatcgcaatgatagtcagttcacattagtttagcactatagatagtattcagaaattgctttctctttggtaaagaagataaataggtgaattttattgcctgtgttttcaggcttcagaggtacctggcaccttactcaagcaaaaacaaaaaacagctttacttcaaaagcatgtgcctctggtaaattatccatcacttttgttttaaagtggtccctccaagaataatgtggcatacacagtgggtttggttgtaaggcagatgtaatagatgacttcaaaagcctgctccttactgcactctggacaaggccctggtctgtatagtttggcttcctctgttaagtcattctacaaggtgacttgccatttgaactttcgtaagagacctcagcagttagactgagaaaagttagagtgctgtagttatgaagtcatacatttttgataaaatacctgtggaaaaccagggatcctctcctgtttctctctcttgcctccccctttccctccattcctctgtcgcctccccctctcctccactttctttaagaatcagggggtacagaataacctacaaacaacctcttcaaagtacccttggaaattgaagttcaatcttaagttttttgctgtctttaatttactagaattgcctaatttttagttgatttctctacagagcttagcttgtgtagttatttctcttttactgttgctttggtgtgtcttgaagtttgattgattatttttggtcattgagttcttagtgtagtttgctagatgattattaagattcttttgtgtctgacacttgtggtgagttgcttttgaaatctgttgagatttccatgtgagaactgataatcaggctcttgatctgcttccctaaattacttttttagagcccaaaccccaggtttagggtgagggtttgtaatacaaagaaacacttccatcacttctgcccttaacccttgcctctattacctaagcttagtaagtagttttcttaatattgtccaatgtttggtgttatctgcattgttttttgtttttttaattgtggttgttctgacgtgtgaaatttaaggaaagagccattttttaaaaatgccgagcagggcaatgcaagtacagccaaatattagacttgatgtgcaatcttcggtcctttttaatctggggtattataggcagtactttaaattgcaaagtcttccgggcctattttcctctacatttttgtaattaactctgggggcttacttgttttggcagtactgaaatcaaaggagctggttcttcttttctcccaattattttcatatgaaagcacctacaattagcctgttagtcctattcagatacatcaaatatcagtgaatgctttactattcgcacatttaagcatctttgttttacataaaattagagtatgaaaaccagtgttcaattttttatcttgttgagcttgtaaaatgccagcaatttaaaactaggacttttccccccataagccaaggaggtagaattactaatacaagggttaaagaaggtagattttgttttcaatatttgggtaatattagaaagattcttcccac

SEQ ID NO: 9955 - DNA, 1262 bp, Homo sapiens
atatgtgtatatatatgtatatatatgtgtgtgtatatatatgtatatatatataaaatagttcacaaagattaacacgtggatacccaaaatatcatattaccattgtatattttggtaaattaatgtttatatttcacttttattgaatttaataaattcctgacctcaactgatccgcccacttcagcctccccaaagtgctgggattacaggcgtgagccatcatgcctggctgttatttatggtttttgatgccacaagcctagtaaacataattgtacaaattcatacctgaatgtctggctgtttttaggctacatttttaggaagacaattgctgtgtccaaggataaggatttatagttgattatttaattggggtatcaaccactaccacctatcccgtgcttgctccactctgccccctccatgttctgtttacatgtaaattgagccaccaactctttctctgtagcagtccggagtaacactggccagaagactcagcctgatgtcatgtcacagaatgctagaaagctgatccaaaaaaatcttgctacatcagctgatactccaccaagcaccgttccaggaactggcaagagtgttgcttgtagtcctaaaaaggcagtcagagaccctaaaactgggaaaggtaattagttagaataaagatgccttaaatttttatataaaatgacggtttgacttacgtatgtttttgttgcttcatagcggtgcaagagagaaactcctatgcagtgagtgtgtggaagagagtgaaagccaagttagagggccgagatgttgatccgaataggaggatgtcagttgctgaacaggtgaccgtgttttaaacttgggctacacattttaatgctgctggaaaagtagaggtgtataaagatccctctcatcgatttccttaatagttcatcaaggaacttaaatgtgttttcaggattcagaagattttgagtaacacagctctggcgtcgtcaagtagtcaccattttactctgacccttccctatgagcactttcctttcccctagccctgttttaacccaaatataagtccgatcctcctccaccagactacagttagtttccatttaaagaagactgttgaaggtttcaaatgaaatgccaaggaccctttgggttgcaggtgtagtatgagtggagcatccctaattagaaactcatatgctccaaatccgaagcattttgagagttgacatgatgccataagtgaa

SEQ ID NO: 9956 - DNA, 1152 bp, Homo sapiens
ttccttcatgagaatggagaagaaggatctttgagtctagcaagtgttattatttctgccctttgtacccttacaaggtaagttagccaacttcatattggaccatttcctgtgtcttatttttaatcccaaacctaaaatgttcttttactttccttagtcttgccaagtgttacagctgcttacttgcttttcagattttagttatcttggttgtgttttgagacagggtctcactcttgacactgaggctggagtgcagtggcacgatctcggctcacagcaacctcagcctccttaatagctgggactacaggtgtgtgccaccacacctggctaatttttgtattttttggtagagatggggttttgccatattgatcaggctggtctcgaactcctggcctgaagtcatctacctgcctcggcctcccaaaatgctggaattacaggcatggccttgacccggccagttaccttgttttgtttatacatttaagtttcactgtacagatatttatctcttgtaggcgtaacctgatgatggaaggtgcagcgtcaagtgctggagaacagctggttgatctgacttctcgggatggagcctggttcttggaggaactctgcagtatgagcggaaacgtcacctgcttggttcagttactgaagcagtgccacctggtgccacaggacttagatatcccgaaccccatggaagcgtctgagacagttcacttagccaatggagtgtatacctcacttcaggtgaacacttttattttaaatattagtttgttttagatactgaatattgtctttctcatctctttaacccaggaaagcaatttgacttccccatttgaatgttgctcaaccagtcatttaaaaggaagataattgtgagatttatagctataacttggttacagttgctctttgtttttttgaatttttatagcagctttatttgtaatagtcaaaaactggaatcaagtcaagtgttcatcaagcaaatggacaaatatggtacatccacataatggaatacttcttagcaataaaagtgaacgacaccttgataacatacagccacatgtatgacttacaataattatgctgagtaaagaaagctagacatttctacccctataa

SEQ ID NO: 9957 - DNA, 1147 bp, Homo sapiens
atgttggagggaaatttcttaatggtgtttcacttgctgcccccatttcctttcctttagtcttatgcaagatctactgcagtcatgtctatggttggatacataattggccttggagacagacatctggataatgttcttatagatatgacgactggagaagttgttcacatagattacaatgtttgctttgaaaaaggtaatataaaagtagactttacatttatgagggccaaatgttttttggtgaaagggcaaaaatataatgatttgtcttttcaaggtaaaagccttagagttcctgagaaagtaccttttcgaatgacacaaaacattgaaacagcactgggtgtaactggagtagaaggtgtatttaggctttcatgtgagcaggtatgctgttttctcttctcccttttagtgtatttgttaaatgagcaaaacctgtggaatgaaaaccacactttagtgatgaaacttgtggcagaccttattttaaaaactctcctgaaaacaggttttacacattatgcggcgtggcagagagaccctgctgacgctgctggaggcctttgtgtacgaccctctggtggactggacagcaggaggcgaggctgggtttgctggtgctgtctatggtggaggtggccagcaggccgagagcaagcagagcaagagagagatggagcgagagatcacccgcagcctgttttcttctagagtagctgagattaaggtgaagcccagtgacggaataagtcattgtcttctttttattaatagagtaaacatgctcatcaaaatgttgaggcaaattgtttctctaatttttttggcaaaactaatgtataatattgaaatggcagttaaatatggcagtttgatgttaactttttattaggtaattcttccacacaaacatgcacagttacattccacactcctaagaggtgggttcatgatttgaaaaaattatatttcttaattattgaaatgtgtttaccagtgatgactgtaaatgttctttaattggatagcttcccttccctatctggtagccagggatgccagtcttgttctgggtgacattggcaactattaatacatggtattatgagattgagcctgtcagtttatgcctgtgtaa

SEQ ID NO: 9958 - DNA, 1149 bp, Homo sapiens
tatttttcatataagcagatgaaagagaagaagtctttgaaaaaagagaagtaggtgaaaaagggagagacggagggatgccagcagtgaaagaagccaggactgagatacaagattgtgatgctgggagagctgtgcaagggctcatgctgtaggtgaggagtgaggctgcacagggagctcactggcagcttggagagaactgggtgtcaaagttgtcctgcagaggtctactgtcagtgtgttaggatctgaagagaacaggctgcaacacatgaaaacaggaaggagacacaggggcgagtcagctccactgaaagtctgtagctgtgactttctggtttgccactccaatttgagtactaattaagtggtagtcacatcttcaacataaaaaccaaaataatggcatcctcgtggaaggaattttgtcagaaaaatgctgtgtactttgctgtcttcctaggatttgttctgtttttgtttgtttttttttaatggttccacaggctgcataggaatacaagctaaccaatattttaattacagatcattaagcagctttgagtctggaaaatttgttgaatgtaccgagcagttagaattgttaccaggagaaaatatcaatctacttgctggaggatcaaaagaaaaaataggtatttgagaaaatagttttaaagttattttagtggacaagttgctcaaaatgtttggcttagtatattttactggaaaatctggaagttattttacatttttgtgggggcagaatcccatgtgaagcaacaaatttagggctgccctatttatgtttgatttgggaaatgaaaagcacttaaaattaagtcaaataaaaaaaatgaccaccttaatactttgagatttatctagccattttgtttgataaaggacaaagtagtgtttcagctaaatatttttcttgattttcatcttgatgtggctcattaatttatcacaaatagaacactttataaaatgttattaaaaagtttaatgagtattctggattgagcaagatttgctaatgcaggtctagatttgtccccttaaatagtagattgacttaccgattttcttttttgttgagacagagtttcactctgttgcccaggctggagtgcagtg

SEQ ID NO: 9959 - DNA, 1193 bp, Homo sapiens
acgcaatctcctgaagacagatgctgtcctttggcagtgggccatatgggaagctgcacaattcactgttctttctaagctgagaaccccactgggcagagctcaagacaccttccagacaattgaaggtaactcactcaagctttgtgatgtgaatactttcaaagccttattaagaaatactggattcttaaatctttgttaaagatttgagagtatatgatttttttgaaaaaagtcaataattttcaggtatgtttgttagaataagctttcattgaataattgcattggaaatatgtttttttttccccaaaacttagggagttgtgtggaaaaaatatatatttctttcccctaaaatgaaagatctttcatgttgggattttttatttttaaatgatgggtagacagaggatacttgataaatgtgaattggtcataaaaaactcacacttattctaggaacttttaagatttttaaaaattcagaatgttgtctttgctttcaggtatcattcgaagtctcgcagctcacacattaaaccctgatcaggatgttagtcagtggacaactgcagacaatgatgaaggccatggtaacaaccaacttagacttgttcttcttctgcagtatctggaaaatctggagaaattaatgtataatgcatacgagggatgtgctaatgcattaacttcacctcccaaggttggtttccatgagatagtgttgttttatagcagtttaatggtcacagctggcagtatgtgcagagctgaaatcacagtagacttgtgtatttggtttatatataggtgagacatccttacctacaaattgaaccagtcctgagcttttctttctcttatcgtaaaggtcattagaacttttttctataccaatcgccaaacttgtcaggactggctaacgcggattcgactctccatcatgagggtaggattgttggcaggccagcctgcagtgacagtgagacatggctttgacttgcttacagagatgaaaacaaccagcctatctcaggtaatgtggtgtgtttgaaattcattttaagtctgttaataagaaaagcatggtttaattcctttggtatgatttaatctatggataaaataagttaaagcttggattcattttcaaaggttttgatcctgtattttgtaaaagcaacaac

SEQ ID NO: 9960 - DNA, 1178 bp, Homo sapiens
aaatttattataaatttaaattttcataagggtaaaacaagttgacacatttataacgttataaattaagaagtactgtatattttgtaaacaaaaatgactggcttttcaaccaccccctagtcaaatccaccacagactttcctggtagatttaagaaacccagtcttaaactgctgtttgcatatgtcttctgatgttgattatttaaaaaaaaaaaaaaacggccatttcggaaatttcatattgacagttttcatttatagtactctgtatttgtgataaaactttatagacttgaaatagcatactgatctgtgtcagttttctgactggtttttaaaaagttaaaatattaagtgctacggacagtgaattgatcgatcttaaatttatttgtatcgtcagcactaatacagatagtgatttattttccatataattttagaagatttattttccatttatcacttccttgaattttttgtttttcaggttgttgctgtagcccatgctgtttatcaagcagtgctcagcttgaagaatattcctgttttggagactgcctataagttaatattgggagaaatgacttgtgccctaaacaacctcctacacagtctacaacttcctgaggcctgttctgaaataaaacatgaggcttttaagaatcatgtgttcaatgtagacaatgcaaaatttgtagttatatttgacctcagtgccctgactacaattggaaatgccaaaaactcactaataggggtgagtctttaattgtaatgactttgttttatccacagttaagccttttctcattacatatttatgtatttcactgtcatgtcaagatgtctgcagaatcactgtgtgtaacaaacagccatatttaagacatgcctggataaataaaattggtaggaatgttttcttggcattatatttaacttttcttcttctttttccttgacaaatcttgataagtttttttatattagttttattttctagaaaatgtcttatgaatttctcctatttgctctagcatgcttatagaaaatgtcagtgtttcttacagctcaaatttgtgtagttgttttaaaatgcggtctctttcttcttcccctggtacttttttctttctgtctactgaagttagttcttatacatggtcttat

SEQ ID NO: 9961 - DNA, 1314 bp, Homo sapiens
ttagaaatttagtacacaattattggccattatagttaagtgggggattttgtttgtgtgtgtattggaaataatatgatttttgaaggtattttgtggtaagcatgagagtgcttatctttcaaaagagaccatcagtagatagaaactttaataagcttaaagtgacttgtctgtttagttttaaaagattgattcccaaaagcccaagagctagcttgtagtatgtgtgggcaggctattcccatgctgtcaataccattactgttgtggtggtgtatttcatgataaagattctgagcttccgccatttagtgacattgggagaaacgaagttgggtatatgggaaatagaggatggcagattccatttcctgtcataatagcactttaggattttttagccaagatcatgtttacatactgtactaaagatatcattattattcaactactgagaactagaatattaagagactgctggcaaggcaagcagttaattttcagttgaaattgcattaaataaaaagtattttcttgctttgtggaagcacgtgaatttttttaaaaagctgcttgttttccccatttacaggttctgtacagagtaatgagatgtgtgacggctgcaaaccaggtgtttttttctgaggctgtgttgacagctgctaatgagtgtgttggtgttttgctcggcagcttggatcctagcatgactatacattgtgacatggtcattacatatggattagaccaactggagaattgccagacttgtggtaccgattatatcatctcagtcttgaatttactcacgctggtatgtgaattattcttttcctttttaatgtgttggtttattcaggcccttaaatcgatatgtaagaaattaagggctttgtctgggcatggtggctcatgcttgtaatcccagcactttgggaggccaaagcagaaggattgcttgcatccaggaattctggcacagcttgggcaatgtagtgagaccccatctgtacaaaaagtcaaaaattagcttggtgtagtggcgtgcacctgtagtcctagctactcgggaggctgagggaggaggatcgattaagcccaggaacttgaggttgaagagagctctgattgtgccactgcactcagccaaggtgacaaaaaaaggccctgtctccaaaaaagaaaaaaaaataagggctttgctttattatattattttcttagagtacattcatcagttataatctgtgctttcattttagtgtctatttacttttatttttaatgcaatttttttttgagacaggg

SEQ ID NO: 9962 - DNA, 1228 bp, Homo sapiens
ttttgaacctacctgtctcaccttcctgccttcttatacccccaactttcttgctttcttctaatatatttaaaatatgaataacaaatgcagtgttatttctgaaaacctcataggacatttatccactttattatttttaaaatttaaaattttttccatacataattcataaatgcagttttcttacaaggaagatacaatactatttttgtttttattttcaaaaatatttagctaaggttgaagttcctcttggctactatctctaaacttcaagaaagttttaaaacaaggtacaaaatttgatttaatttagttttcatttctttgcttattttccaatgaagggatcaaaataaaattaatttaacttcaaaggtgtattaaaagaaatcaaaatgattttcaaggcagacagtacaggaaaaaggtaggagaagcaaaggctggttgagctgcagattgagtaataagatcctgagctatcaggaaattgactgaatgaaacgaacaatcatatttaaataacgtacacattgctgtttgtaggtggctacagtgtcaatggaggatctggggaaaatacttatggtcggaagtcgttggggcaagagctgagggttaacaatgtgaccagccctgagttcaccagtgttcagcatggcagtcgtgctttagccaccaaagacatgaggaaatcacagggtaaggctgggaaaacggggaccaatcacatacaccttccaaagacttgtatctcctcttattctggatgcctcttactaacgccttgcacaggcataagttgattagcctactgtgcaggtaaaaattgtttacattcatttcccactagaaaggttatagtacattttaaaagagaagcctcttaaaacaagattagaagactggataagatcttacagaaaaggtttacccaattatcgtggatattgaatgtatagtgcatagtaggctcttactacagcaagtccttgaactcttgggcctgtggaggatatagatatatatagagagggggtacttttctgtcttttttttttttctcttttaagttcagggtacgtgtgcaggatgtacaggtttgttatgtaggtaaacgtgtgccatggtagttggctgcacagatcatcccatcatctaggtattaaacccaccatccattaagctattcttgctgatgctctccttccccctgccccct

SEQ ID NO: 9963 - DNA, 1123 bp, Homo sapiens
caatagtgttaataatgataataatggtgttagtaataatagcagataataatgccatgtgtccccactctgccattactttacacaaattatcatgcactgattacacccaccctttgacaaagtactagattatattttagttaagaaatttttttttgagacagggcctcactccaagttggagtgccgtggcgtgatctcagctcactgcagcctctgcctccagggttcaagcgattcttgtgcctcagcctcttgagcagctgggattacaggcatgcgccaccgtgccaagctaatttttgtatttttagtagagacagcgtttcaccatgttggccaggctggtctccaactcctggcctcaagtgatctgcctgccttggcctcccaaagtgctgggattacaggtgtgagccactgcgcccggccaaagtgtcatattttataaattaggaagctgaagttcagagaaactggtccaaggtcacacagcttttaagtgaccccttggatttgaacccaggtttatttcactccagagcctaagctcttaacccagtaagcaaggccctgaattgggccaaccgttctacctggatgttttggcttttgaagaatgttctgatgctttcacttgaaaacacaggttggccgaaatcatcaaaggagagatggacgtgagaaagctcacaggaacttttttttccctttccaggaaatactgattagcccgtggcttcgcagtgtgtagcatagtacagacactgtggggtgatgggttgggtcatggtgggtacctggcctcacttccgtcactcacaccaggcatgtcccgccggctgccccgaggctgggcaccaagtatcttcggtactcagtgtcctctggctcacaagatgttccggctcctcctgaattcagaagaacttatgtccctgcgcagtaacacagctttttaaactattgagaaatttcatgcctgttaccattatatcctttcttactccccatttgatatttccttcaagtctttcttccctcaatggaaatacttatttttaacatgtaggagaaaatatatgtgcttgtaaaaaacttcaaataaaggaactcctaa

SEQ ID NO: 9964 - DNA, 1194 bp, Homo sapiens
agctatccccccacctcagcctcccgagtagctgggactacaggtgtgctccaccagacccggctaatttttaaaattatttgtagaggcggggtctcgctatgttgcccaggcttactattttaaagtagatgtaggatacaaataaaaaaaaaaatctccttccacgtaggtaaagcaggaaataccgtgccttgttaataagtaattccctcatgatccttttccccaggaacttgggtgagaaatcataaccttgtcctgatctttctaaacagcaatttagcattttcatctccctggcaacccaaggcgccttggccttggtcttccgagtgattgacagtgaccccacccaataaaatctttttatttgtcgtatctaaccaatctaacccctagcgcagagctagggggcgttcccaccggtgcgcgggcgagctgagccttccttacgtctgctgtgcgtcatcagtccgagccaagggcactattggccagttccgttcaacgaagtggttgctttttttagttccggcaatgagttgcgccggggcggcggcggctccccgcctttggcggctgcgcccgggggcccggcggtccctctcaggtaaaaggaggcgcgcagtcacagtcctgcgccggtctagcgagctagggaattttcgcttgaggtttgggtcgaagaggtcacgggggagaggttcgtaacgtcacaggcctgcgacggagcgcgactgcgtgacttcggcctccggggcgctggcgggcggggcggggtctgtagttagcggcgagagtgacaggaggacaggggttgtttcggcagtgacgcctggggagtgacgcaattgcacccctgtgcagtgatgtcacggcaggtgcggccagcgttccgagtcgaggacagttggcgacactgaaaattcagcgtctccgggagtctctctctttgtagtctttgcccagggccttgccaggcaaagggtagcccgacgaccagcagcctccgctacttctgggcgctcgctagaaatacagattctcgggccccaccccgacctacttggtcggtatctgtgatctgtgaacaggacctttaggtgatttgcatgcactgtaaactgtgaaagccatcagtgtagtggaaggagcatcgaatttagagtagagagacatggttttggaccc

SEQ ID NO: 9965 - DNA, 1150 bp, Homo sapiens
ttcaattaatttaaaattaatcagcacagaaaagaaagggggaatgtggtgtgagatgaagccaaggagacaggtcggggccaggtcaggcacaccttcagtggctgtgccaaggacatttgggggtggcgatcattagtgagctactgaaatgttttaagctgggacagtgtagaggaggttcatggcatcctgggttttggaacagtccctctgatcacagtgcagaggccagttaggaggcattctctgggcaccattggtatgcagtgaacaccatacttagtggccattatggattcctgagacagctgcttattattctaacaggattggctttcctctttccccagggcctacttgaagaagtggtcagctaaaggaatccaggttgttggttggactgttaatacctttgatgaaaagagttactacgaatcccatcttggttccagctatatcactgacagcatggtagaagactgcgaacctcacttctagactttcacggtgggacgaaacgggttcagaaactgccaggggcctcatacagggatatcaaaataccctttgtgctagcccaggccctggggaatcaggtgactcacacaaatgcaatagttggtcactgcatttttacctgaaccaaagctaaacccggtgttgccaccatgcaccatggcatgccagagttcaacactgttgctcttgaaaatctgggtctgaaaaaacgcacaagagcccctgccctgccctagctgaggcacacagggagacccagtgaggataagcacagattgaattgtacagtttgcagatgcagatgtaaatgcatgggacatgcatgataactcagagttgacattttaaaacttgccacacttatttcaaatatttgtactcagctatgttaacatgtactgtagacatcaaacttgtggccatactaataaaattattaaaaggagcactaaaggaaaactgtgtgccaagcatcatatcctaaggcatacggaatttggggaagccaccatgcaatccagtgaggcttcagtgtacagcaaccaaaatggtagggaggtcttgaagccaatgagggatttatagcatcttgaatagagagctgcaaaccaccagggggcagagttgc

SEQ ID NO: 9966 - DNA, 1270 bp, Homo sapiens
gtcttcgctccgccgccttctggagtcctttctgcccctagaggacgcaggtgagctaagcagcagtcatgccctttaccatcatgacgcccgcaggcgggaccacccggcactgtagacagctgccctttacaatcatgactcatagaaactacggcactctggccgtggccgacgttgctcctccgaagcatggcgccggcgggagttgtaacccgggctgtccggagcggggagctgcccctcacaagcatggcgtcagctgaaaatgaagcctgtgctgtgcggagcgtcgcctgcccctcacaagcatggcgtctgcagaaggtgctgtgcggccgctgcggggcggccagctgcccttcacaaacatggcggccgaggggtgcggggagtggcggggtaaggatgggaagccgagcagacggccccagaacaagcggtcatgtgactgggaagatggccgtctttccttggtaaggaagcagcggcgggtgggctttggagaggggctgtccttacttgtgatggggtcggcctgggtctgagagtgtgaattcctctctgtcgggttctggtggtcgaccggccacccccaagttgtcttgaccgtagaatccctggccgctaccgcggtccagcggagcaatctgaagccagactggcgggttcttggttctctccccgtctgctgcctctctgcgccttccacgggcccctgtccattcattccctaaagaaaacttgagtttccaggcttccgcgtccccagaagttggcgcgggttctggggtcgctggatgagggtaatggtggactcagcttttaaagtctggacgagtcgggagatctggctgttggtcagtttcctcagctcctctgttcacctggagacttgcttttctcatctgtaaaatggccgccattcatcctatcctaggcacagccctcagacttattccttggcctcaaggagctgacagtataatggggcagacgcacagtagagggatgtctaaagaaggcattcggatgaggcaccaagaagggagtgattatccccaccagggggctaggggaaggcttcagagaggaggagttaaattgggtcttggaggatgaataggagtccaccatagggagggcgtggcgtgtgcctggttggcaggcccgtaggtcccttgtggttggagtagctaggaatgagtgactgaagcttcagggttcagcaggtggtatgtgtgtgagtgaagaacttgaggaagttgtg

SEQ ID NO: 9967 - DNA, 1201 bp, Homo sapiens
gagaccagcttggccagcatggtgaaaccccatctctattaaaaataaaagaataaattaaaaaaatagccaggcgtgctggcaggtgcctataattccagctactcaagaggctgaggcaggaggactgcttgagccttgaggcggaggttgcagtcagccaagatcgtgccactgcactccagcctgggtgacagagagagactccgtctcaaaaaaaaaaaaagaaaagaaaagaaaaatcatgtcttcacatactggttgtgggggactctgcaataaggcagtgaaagccctagcccagtgcctggcagctgctgtgatgatgattattattattaatgtcacccccgctccccgccacgcacacatgggctagaggggtgacttccacacccctggcttagactgtcctgcaggctgggtgttttctttgtgattcccaaggccccaagcccagtgggaaatttccgccacttccatgtgccctgccacgacttcctgccatctgctgactcggtgtgacatgacacacggctgcctctccctggccagcatggccgcggggcttgggtctgtctcactgttcttgtttgttcaacagtggactccaacgacagcctctacgggggagactccaagttcctggcagaaaacaacaagctgtgtgagacggtgatggctcagatcctagagcatctgaaaaccctggccaaggacgaggtgggtgccctctgctgtcctccacccgccccttgctctgaaagcacaagtttccagggtggttcaaccttggttcattctagaaaggaaactatgtcatgtgagtaatgtgtttatgtgcaaaccacttctccattgctttggggccttcgctcctgctgttttctctgcctggactgcgcctcccccagggcttcccctggctgttccttctcgtcattgaaatctcagctcaaaggacctcctcaggccttcccggaccctgtctgaaggagccaccaccacctgcatgcctctgcccgattgtccctgtagcgcctgttcagtcaccgtctgaaatgttctgtctgtccatccctcagctccctgactagaatgtaagctccatgggagcagggacctggtgagtctttttttttttttgagacagtctcacactattgcctgggctggagtgcagtggcataatctcggctca

SEQ ID NO: 9968 - DNA, 1185 bp, Homo sapiens
agcgtagccctgctgatgccttaattttagctcagtgagaccaggcggacttaagacctatagaaccgtcagatgacaacattatgttttaagccgctacaattgtggcaatttgttaaagtaacaatagaagacctaatgtaagtaagtctcatgtggaagttgccatggttttgtttttctttctttttttttttttgagacagtctcactctcactccacgcccaggctggagtgcagaggcgtgatctcagctcactgcaacctccacctccagggttcaagcgattctcctgcctcagcctcctgagaagctgggattacaggtgagcaccaccacacccagctaatttttttttgtatttttagtagagatggagtttcaccatgttggccaggatggtcttgatctcttggcctcatgatccacctacctcagcctcccaaagtgttggtattacaggcatgagccaccgcacccaggccccatcatttttattttctacaattctggctgacatcttattgctccatccttgctaatgatagacttcatctcacatagaccagtgttttcagagaccggcttattgattcagtaaagggctgggggaaactgcacacacaaggacatataaaatctaagcctctgcctgggccacatgacaggattcagaagcacctttgatataatgggtgcccgacctcatgtgaaagtccaagttcaggtgtaatgtgagagcggtaagaattcactggcctaggcttgggaactaatgctgcccaccacgttcagcctcagaggagaagaaatgacttgaagaacataatttgtgaatttgccaattgtttttcattttatagcatcacacagtaaaagtagataaaataattttaatgaaaatacttctgtgggccaggtgcggtggcttacgcctgtaatcccagcactttgggaggccgaggcggcggatcacctgaggtcaggagttctagaccagcctgaccaacatggagaaaccccatctctactaaaaatacaaaattagctgggtgtggtggcgcactcctgttatcccagctactcaggaggctgaggcaggagaattgcttagactcgggaggcggaggttggggtgagccgagatcacgccattgtactccagcctgggcaacaagagtga

SEQ ID NO: 9969 - DNA, 1295 bp, Homo sapiens
gagccatgggaagcctcatttaatgagacctttttccccccttttaaatctgatatgttatcgcacttagggttttgttttattttggcttttaaggttgagagtgggctgaacgccttcataatgggggcggaggcgggagtgagaggagaagggagagagctgttctttttctaatgactacacctgaaaagtatcaagagacatctttgccaagagactgtagcagccagctgccccccgtggagcaaggtttaaagacaaaattaaatggcacctctgtttaagatctgcgtgtgtaaacaagactcgtttggggaaaacgacccgggaggagagcatctgtgatcaaaatctctcattgtaagcacaaattgttccgtgtctggttattaaaatcgctttgggtctataacagccactcttgtccccccttttaatagaaaattgtcattctagcctggatttctccccactggaggtggagggtgggaagagaagggagtcagctctgacagcttacaaactgggaagttctgtgcatctccagggattccagagttgaagatctggttgttggaagctgggcgcccagtgcttttttttttttttttttttagcccagatgccgtcaggacccactgaacaagggtgaactcgggtggtggtctcggttggccaaggctgagttgaacgcctcaggccaaaccccaagttgaaagggagcattgtggcttttataatccaatgatgcaatgatgataccagcttacaggagttctcagcaggtgctttttattaactgatgaagagctaaggctcacttttgatagataatatatatttattaaatgcattaatgtgtgttttataatgtacctttatcttcccccggctgactgttgcatacttataaaaaagaagttaaagaaatttcaagacaatcaatatgtaccataaacgactatataaatattacaaatttaaaaggctgtaaaccatgggcagataggttttattttcaaaatgctgttcttaacacaaaaataaaggctttactatttacttaagacgtgtggtagcttgtcaaaacaacccagtgcaactaactactaggctttcggatctgccttgagggtcggtctgtggcattttaaatgggagaatcttggttaacagcaaaccacagaacatattaaggtaataagtttacccataaaagcaggaactttctatataatactttgggacttagacaacaaaaatcctttgttacatctgtctgggtttaagtg

SEQ ID NO: 9970 - DNA, 1249 bp, Homo sapiens
tagtctgacagtcctagatttctgtgaaataagagtattcttcaacttagtgctcacactcacataccatgagggttctctgcaggggtttaggggtttcctgaatttgaaagttttttcaaggcctctttttgggtaaaacaattgaaaaggcagacaccaacaaagtctgcaaaattaactgtccagattaagaatattaaggagctgtaaaattagcttgtagaaatggacttatccttaagttttaaaaagttaggaaatcctaaaaatgttaggcttcctgcacaagtggctatgttcatttaatggctagtgaacatgggaatgtatttttatcctcctagctggtggttctgtttggtaaaccagactagaatgatttgagaggggcaaagagaataggcaggaccttccttctatagctttacatatttagaatgttaatacttaatgacattgaagttaccttgcaatgattgataagaggattattaatatcagttaggggaatagggaggataggattttggtgccttcttcagcagacttgctccaagacaaagattctattttgatagtgcaagacaaaaggactcggaagaaaattggccatatgcctacagagcatacaactctgtggaactaaattgtttttactttgtgaaagctgctattttacggaaagattttgattatacagtttgtttttaaattgtcttttatatttatttgtatttggtaagaatcggttgttacacaagctgttctttcccagttacaaaatcctgtgttcggttgtaacctgaactcattaaaagacttgttttcaggtttatcaactgtttattttcactgacatttgagcatgttattttataaatgacgggattccagggtaggaagtgctttttattccccttttgttttttcttttaaaaaattacgtcagttaaaaaaataaaaaaactgcagtcttatggtttagaaaacttgtttagctccatagaggaaagaatgttaaactttgtattttaaaacatgattctctgaggttaaacttggttttcaaatgttatttttacttgtattttgcttttggtacggccagaaatcgagcttgttttttcatagttcctgatattttcagaaaaatcaaaataaatttgttccctaaaaattggtgttctaatattttttctttctttctgactcttagtaaatctcttgctttatagtatatatatat

SEQ ID NO: 9971 - DNA, 1188 bp, Homo sapiens
tattttgtttttggtttttctccccaaatattttcaatatgtgcctggcagaatcagaggctgcagaacctgtggatacagagggggccgagtgtatcttttcaggcttattgactttctggatgtgacatatcttaaatcatattgtctactctgatctctgcaagttgctttattcaccagttctgtcagccatactgcttaatgcatttctaaatattgacctctttgtgctttggcttacttgcaagatagaagtcggctcaaaacggggtaaatggtgtgtgaatacacatgctccctggatccacggagaaaaaacactactccatgcagactttgcccagcccgtatctgaggtattccacatcacatctgagggtgtcaaatctagccagaacctgggaaaacaaagagtagccctgatgtacataggaaaataaatataaaagaccagtacataagtcatcatctttgcagttttgacacttcaagctgcacttttgtgaaagtataccttccatttacagataatcctaaaccaaaactgctgtgggtgtgtgcagtcattttcggatatccacttgttccactggtaaagaatatggccatgatctcattgtgttttgtcttcacacaggtgtggctgtcactggcatgtctgcaaaggaaaaactacaatgactgcatgttaaacacagcatcacagactgttaccactgaaaaattttgagaagctctccacttgaacctcttcatgtcatgaatcaggtgccagtggcttagcttgaattacagggtaaaagccatcactttctctatccttttaggtgctttctagaatcaaaactaaactttgtcatcaaaggcccatttataatagctgctttcctagctttttattctatgataaagaaggattgaagcatttttaaaacttgagatttttatcatacctccagcagagtaaggagtctgtgtgatcttgcaatcatggataaggaagaattttccccttccctcccctatggatgctttaaaatgtgattttttaaaaatgagtatgttaatacaatacatgttagtaaaagccatgggtactgatgggccaacacactacagcctactggcaaaatctgacttgcctcttgtttctgtaaataaaatgttattgcccattcattgagg

SEQ ID NO: 9972 - DNA, 5023 bp, Homo sapiens
attacaaaatgatacagtgccagatctcagtttcgcatattgtttttcagggcaggtctgtactgtgtgtagtgctgtttacatagatgaatttaggttgtaataattatttttaaagatttacacagatttgaatagcagtgttaactgttaaccacattgcattaattcccaggcgatttagagctcttggagagccaaggccagccaagagcatttgtagtctggtgacaacccccttttaagctaatttatccagaaccctgatttccctcacttcttgctcattccttctttgacctattgcatttcatgttgagtttttccatcaacatgctgcacctgtcagtcaagtgagcattttttaagaacacattgtactgagaaccacttaagcattgaatgcggagaaagcagtgctacctcagttttgctggaagtagacttctttgatagttttctttctttgatgaagtttctgtattttcatgttgtaagtggaaatacttttttttgtttgtttgtttcatttgccttggagccaaagtttctgttcctggtggtcgggaaactgcctgccggccaactgacttgaaggaaaactgtggtatggagctctgcttgaatttttttttttttaatatttttatttttttctttgaatatcatcagcttacttgtctggcaagggcagaagcctggggttggcctgaactctgccaaacaaatatcaaagtgtatttaatagttaaatttgtgccctttcccttcttgctgcacccatgttgtcacttaacccccaggagttatttattatctttttgttaaagtcaggctcatttggggtaatgtgatgactgtttaggtttacatgaccctcctctcctttccctacccccaaatatgtatatatacatatataaaatatgtatatattttacctatataaaatatatatatatacacatatatgtatctatattcctttgtttctttgcctgcttatactggccataaaagagggagctgccttcaatgtataaagtataagaagagtgccagggaatgccataatggaggcttttggatctgaatttggaccatttcactaaagagaacatgagtttgctcagccctttcctcacaagagggagggccccggttccccagacttctccacgcgctggctccataaaggccagctttggccaggctgccacaggggcctgaggagctcactctgggcctacctggtttcagttagagggtcctcctgttatttttccatttaaaaagtatgtcctcagaaaactgtactggaaggatgggtggcaggaacttgtatagttcagcttccaacactttggaacagattaaaaagggaatcttttaaataaaaacgtataaaaatatttatactcttgaggtaatgagactttgtctgttaaacatttggaggtttctcccttaacctaataccccgctgcgtcccaggtatgtttctcagcctgggcaggaattgcatgttttgagttccattgtgagcagccttacagctctgggctcccatcttaaggattattaaagagttttggcagttggtatttttctaaaactgatattgaccatagggaacatacttggaatttgtttttttttttaaatcctaaacctgacagttcctccttcagaggggcaaatgggaaactttaagatcacccacggtatagtactgctagaaagctgaagggggtcttgggccagatgcctggcttctgttctagctaaataagactcttgaataagtctccaggggtcccagcaggttctgtgggatcagttgtagctgggtacccagactgaggttttaaaaagactgctttttcattaagccagtttgcaactcattttccccggttctggattgggtagtggttgactgagggaaaagccaggctgctcttggccagataaggccctttccatcccagatcagagtgtatcagagaaagctgcacaaaagaggcaggcagcccaggaccctgagtactctggagaaactaggttccttccccaccctttaagaagacattccgtgcattagatgtactagagtggatgtattttgttgttttttaaattaactatttagcctcctcatcccccaccaaaaaagccatttagttattttttggttatattgatccatttgcaaatgagaagccagaaaagggagcagtcagggagggacttacaagttcctttcaagtttgagtacttgatgctcagcaaagatttcaagcttctgcagtagctctgggccaatgcttgactctttcatgaccacaagaaatgcagtttttctgcaaagggatccaaggtgaggtgtgtgtagggtttgaagttatacttctgggaagtgaaaagtcttgttcctttcaacctagaaataggtttgccacttaatgagtgagcagtaagtctgtgtaagaggctgaatgcatgcccctcagataagccagtacactccttgcttagcaacagaacatcagggtgatgtggagaggggcaggatgtggacgccactttggaaatcggcaacatctgagggcaacaacaaacaagtgtgttgggaaataagaaataactcagttttgacaactggctttgtcagcttttgtgatgtttctttagcagtttattggaaagatggtatgagatgacgtgctgcttcattgaattgctctttcccccatctttgccaaatctcaatgtatcgttcttaaccccacctcctgtaaggggctttgctatgcttcagctggttgtctcagcagctgaagtgctgcccacctgtgtgagttgggtccaggaaaccatgtctgcccttctgataagggaagatgaatctagagctgggtgaagatctaaattttaaccaaacccctgggcccaggaaaataacaattgaaaatgtacaaggcagtgttttcaatattaaacttccccaaggaaagcacaaactagtctttttggaaagggagaaaggattaagccacacagtattagtctttgaagcagtactggtctctaggggctggtgccaaaatggagtcccatagtagttacactcgatggcctcatgtactatatactgtgccaaattgtattaaacagtggtggggagttactgggataagaacttgtctaaaagtttacaaaccaaaacagatctgttaggttggtgcaaaagtaagtttttgccatacttaatgtattgccattaagtatggcaaaaaccacaattacttttacaccaacctatgtatttaagaatgtttggtttgccagattccaaatgaggtcttcagtgcagcaaagcccaaaaggtgtagactcagttatgcaattataaggttaaggcgtagaagaaagctgctgctaggtttttgttgcattttacttgactgctctgctgtttttcttgtctctcatgtttggttagctatgacttgagcatcttggtaactgacaaaggtcttccttgggggacttgaacatcttggtaaatgacaggtcttcttggaggactccagcagtatcttgtttaaacgactgaaaggactattaaggttgttgaattgtgttaattgggactcattgaggaaatgcgacattgatcctcctcttattccacagtgtgttttctgatcatataaagaaggttccgaaccatccatccccctcagagtttattcccctggtaagctgtaattgcatatccagtttaaactggactgggactgcatgttggtgaggatcggcaggggttttcccccttttcgaaagatgaaatagattcttgagcactggttgcagaagccaaaatagttcaaatagctttgcataaccattgggttctgcttctgattcaggtgctgggcatcatgtcctccctattcttctcttcttggaaacccagcctatctcataaatacctacttccgccacccatccaacctccctgctcctttcaacacaaatcttggatattgccaaaggaagccattcagcagctgctggggtttttcatccccctgacatgcatacatttgctctgggagaagtgtcttccctctgaccctggtccccagctccgtctgtgcttaattgctcttacctgttgcactaatgaatatgactaggttttaaagggggaatgtgaagcaataggcacatggggcttggatgaattggtcccacagatataccctgccttaagccgctgaggtgatgagtccactgctcatgtgaccctccacctttgtggatccctcttggtttgtgaccagtgtgtctgtttgttgaggttgtacaaacttgacaaaagttaatacttttgtttgtattttctgcactgttgcactctccaaatggccccttgagtatttttattgacttgttacacacatttttgtctttgatgtctacattttttcctttaatgttttttatttggaaggttacctgctgttggatttaataaatttgtttacttgaatattgatatttctacaaaaaaaaaaaaacagtgactttattctggggcaaaatttacccactgggagcttctaccaacatgatattgagtaacaatttttattctttgaaaaacaatccagataagtacaggatcctcagactccaaacatgggtgttgacctcccacataccaagcttagtagggtggcttttgggggtctcagtgcttagaggcaaagagcaaataagtcttcacagggccactgcctaaatagtcttacctttgcaactgatgtgaattctcatgaggaataaaaagtgaagttgagcagtatgttaaatgcatgacccctagatttaacagtatggcagtgcattaaggcaaaggaaacaagctgtatctggctttaactgtcaaatgccactgctatgtgaccttcggcaagttagtgaacctctaagtttccttttactcatctgc

SEQ ID NO: 9973 - DNA, 1148 bp, Homo sapiens
tgcactccagtctgggcgacggcagagcgagactctgtctcaaaaaaaaaaagaaaaaaaaaattaggccaggcgcagtggcccatgcctgtaatcccagcactttgggaggccgaggcgggtagatcacctgaggtcaggagttcgagaccaacctggccgacatggtgaaaccctgtctccactaaaaatacaaaaaataagccgggtgtggtggtgcatgcctgtaatcccagctactcaggaggctgggacaggagaatcgcttgaacccaggaggcgaaggttgcagtgagccgagatcatgccactgcactccagcctgagtgacagagtgagaccttgtctaaaaaaaaaaaaaatcttaaccatgtaataagtgattatggttgttggtgctgagtcactatattcactttgtgtgtgtatgtgaggggtgcttaatttgcatagacacttccatttttgtcctttttttctttcaggttgctaggaagaggctcaatgtttgtgttttcaccagatcagtttcagagactgcttaaaattaatccagactggaaaacccacagacttcttgatttaggtgctggagatggagaagtcacaaaaatcatgagccctcattttgaagaaatctatgccactgagctttctgaaactatgatatggcagcttcagaaaaagaaatacaggtataattttcttggttttagatgcatttcttcttgaaagtatattatttaaaggatatgaataaaaaatgatcttccatgattagaaatttaaaaaatcatctcatacataattaactggaaatgtagagaaataatcttctggtagcagtatttttctggagcggaggggttggcactataggtaagaaaagcactagcgagagacaacttggaaaaggcagatcagaagaagggacttcttccctaatcagaatgtggcattctcaaaaaaaatttttttaagtagtggtaaaatacacatagcatagaatttactgttgtaactatttttaagtgtacagttcagtggtattaagtacatttacattgttgcataatcatcaccactattcatctccagaaatttttgtcttccgaaacggaaactctgtacccaataaacaataactc

SEQ ID NO: 9974 - DNA, 1231 bp, Homo sapiens
acttgtttgttcaagaatttaactgaatgttcttatttgtattagtaggtggcaagtgggagaaaccatcagaaattttggaaatcaaaggacagaactgggaagaacaagtgaatagtctgcctgaagttttcagaaaagctggttttgttatcgaagctttcaccagactaccatacctgtgtgaaggcgacatgtataatgactactacgttctggatgacgctgtctttgttctcaaaccagtataaacacgtggaggtcgaagtcttcagagtccgcaccctccgggatgtgcccttggaagagggtctgtgttcacaattacgtgaagggaggacccttggggaccgccattctaaatatcatgtaggaatttaaaaagccaaaatactaattatttctttgtagtgtgtaaaggaatgtttttaaaagacaaaaacccaactctttgtggatttttatcaactctttactcagagccactctccaatgcaggtcacactccaattatgatggaagatattttttatacttaattgcagtagggactcattcccagacaaagcaatagtcacgacttcatggaaccaatcaatggattgttttttgaagactggcaataaagctgtccattcaattccaaatactggttttaaggtatagccactgatattctttcatgtttagaaattctttctgttattattcaagaaaatgtttttaatcatgctaataaacttttttggagatgactttggcatcatgtttgaattcatataaagctcccctagcattttttattggtttggcttcaggagtacccaaatagtagcattatgagaatgacgcagacaatttgaataggggggaaggaaggcttcagacttgggggaaggggagattattgcaaattgcagtgaacactgagtcagtaaaaaaaaaaaacagaaacaaaaacccagcctcattcagatacagaacttcagggacccctccccccacccccccagttaatgctgctgtgaaaaatgcaaaataacctggttctgactttgtgatcactcatgtcccatacactgaactttgtttttttctggacaatctcaggttctcagaattgaaacattcagttttgtctactgacaaaatgcaactaaaaatgttttaattcaacttcttactctacacttatatacctctctcccagagcttggctcttccctgaaat

SEQ ID NO: 9975 - DNA, 1310 bp, Homo sapiens
tttaagttaagctaaaaattatttgtagggttaatttatttgtatatgatagtagaaggtaagatcatgtcaaaccttataatttggggaatctgacactatttaaattattggcaactgttgtctgttgtacagagattctttttctactggctcagtctgttacattaataatgcattttatatgttcaggcacactttacataaatacaaagttcgctagtaaatatctggctattttggctatttacaacactaatttcattatttttatctgtaagcattattaatacatctttaccaaaacctgagcaatacaatattttctttatatgttatatgcctttgtttgctaaaagctaatatttttgcatttactttaaagggctgtactaaacccacagctttaagttcttccctaaaagaagcattgcagctaacccttgaactcacagttttaaaatacagtatttctcttctccacatctccatgccttcgcatcaatgcttgtttttcctggtgaacactatagataatctcctgtttgaaatgtgggacagggtgtttcatggcagtggagctaagtttctcctctttatagtgaactggtgacccaaatgtccctgtcatttatagtgaactgatgacccaaatgactccctgtcagtagagtcccatgtggcccatgcttcacacaagcagaaatgaacgcactgtttttaaggctagattatcagttctagaatgattacttcaaagatgggagctacctcctcagatattcacactatgaaatggaggtgcttgatgtgtttcacactggcttgtttgacagtcttctatcttactgttaattcagcagtattttattgtgaaagaaaaccccagtgtttgagctcactcaggaattggggagagagatggaccaccactgtggtgcatttcttaagtgttctgggagaatgtcatacttttccttcccagagtaaaagaaacctttgggagatcctgagggagactgtttctccccaagtatgatgatgtctagtcaagtctaagaataccactggacatgttctatggacatttgggattgcagttgctattctgatttgattggtcctcagtcaaatggatcactttgaaggaaagctttggttgtcaccgttatataccactgagataaagtgttagcaaagtatggttcaaattaacttatgacatgaccaagagcttttctcttccaaaagatgaattgtattgtaaatagtttctcaaaatatttttaactggatcatgagcatgggga

SEQ ID NO: 9976 - DNA, 1171 bp, Homo sapiens
cctttcctgccacccacagaccgcagctggtcgcttgcccagcagcagagcctcagggacggaggcttgcggattccagggctgagtctgggttccaggtctctgaggctcactcaccctcttgggtcaacaagcgggcccggaagagctgctggggggaggaactcagcagcacccttccccgcatgactctcggcacgctgggacggttctctcttccactgatggggtggctgattttcgagaaaggttggggatgagaccaggacgggaccacttgctgcagccccgcggtcccctgctgggcttttggcttcagatccctgtgccctcctgagcagtgctgcctccctccccgcagggcctgccgggctggtctgtggggaccagcggatccaagtagccaaaaccaaggcccagcagaaccacgcgttgctggagcgggagctgcagcggcggaaggagcagctgcgggtgcctgcggtcccgcccggtgtgcggatcaaggaggagcccgtgagcgaggagggcgaggaggacgaggagcaggaggcggaggaggagcccatggacacttcccccagcggcctccacagcaagctggccaacgggctgcctctcgggcgggctgcgggcacagacagcttcaacgggcacccgccccagggctgcgccagcacccctgtggctcgggaactgaaggccttcgtggaggccacctttcagagacagtttgtgctcacgctgagcgaactcaagcgcctcttcaatctgcacttggccagcctgccccccggccacacactcttcagcggcatctcggaccgcatgctacaggacacggtgctggccgccggttgcaagcagatactggtgcctgtaagtagagccctgcctgccaggggcatggggggtggggggtggggagaaccagctgttgggaggccacgtggggacacgggaggccatgcttggtgagcatctgctctcacgtgggcctaggtgtgacatgggcaagtcagcctctctgaggctctattctcatgaaatgggatcatgttgggttttatgtcacaggactgtggtaggggctaaatacggtgtctgaaggcccggcctattgcctggcctgcagcagggcctagtgaaacagggcccctgcctggtttct

SEQ ID NO: 9977 - DNA, 1099 bp, Homo sapiens
cctgtgtaatatattctttcaatatttttttccctagacacttcgtgtatgatcatgtgttcgctgagaagatcacttccttgcaaggtcagccaagccctgatgaagaggaaaatgagcacttgaaaaaaacagtgacaatgttgcaggcccagctgagcctggagcggcagaagcgggtgactatggaggaggaatatgggctcgtgttaaaggagaacagtgaactggagcagcagctgggggccacaggtgcctaccgagcacgggcgctggaactagaggccgaggtggcagagatgcgacagatgttgcagtcagagcatccatttgtgaatggagttgagaagctggtgccagactctctgtatgttcctttcaaagagcccagccagagcctgctggaagagatgttcctgactgtgccggaatcacatagaaagcctctcaagcgcagcagcagtgagacgatcctcagcagcttggcagggagtgacatcgtgaagggccacgaggagacctgcatcaggagggccaaggctgtgaaacagaggggcatctcccttctgcacgaagtggacacgcagtacagcgccctgaaggtgaagtatgaagagttgctgaagaagtgccaagaggaacaggactccctgtcacacaaggctgtgcagacctccagggctgcagccaaggacctgactggagtgaacgcccagtctgagcctgttgccagcggctgggaactggcctctgtcaacccagagcccgtgagttcccctacaacacctccagaatacaaagcgttgtttaaggagatctttagttgcatcaagaaaactaagcaggaaatagatgaacagagaacaaaataccgatcactctcctctcattcttaattgaacctctagctctactactaatttgcctattgcctatcgcctctctctcccattcagacaagtgtttgtagactctgaagcctaatgttactcatgacgtttgcctcattgctttgcttatttagcaaatgcatacaacgaggaaaggaggtggctagtggtatcagttctctgatccacttccatttaagctccccagg

SEQ ID NO: 9978 - DNA, 2224 bp, Homo sapiens
cagaagtggaattggatatgttgaacacacatcattggtgtacatactgtatttagcctgaagactttcctaaagtgttttgttctaaaaataacctgccattttctatagattttaattttttatatcttcaagggttctattttggtcacaaggaaagaatgtggcttctaatagtgctaagaattaaaagatgcttttatagagacttagagctattttgaaaagctttggggcttcccagccactgatcacaattagactaagcccatggaatttctgggagtgttgtgcagtggattcggttctagatccatcttacatttgtttagtgtttcccaatttttgggagaaggggtgcacagcaaatttgagagacttttttgaatctcacacatgtattttcctcaagattcttttaagcctcttctgaatgacttgtctgagatagtgaagacccacattaactagaatcagctggggaactttaaaaaatacagtgcctgggtcccagtccctagcttttgatctaattcatgtaggggtgggatccaggaattaccatgtattttaaaagcttctgggtgtttctaatttgcagacagattgagaaccactatgatacgtcatccctttactgagaattatggcgagaatcactgccatttgaattactcaggagtgactgattcctcagttgtgtaggagaagcagaaaaaataagaataaaaagaattgagagatactgatatcaaactcccatttgaaatacaagggcccttctgattcaaggcccagttggggagcttggaccatgttgtgaatggcctagcactcgccagtctggtggaaattggtggtcttagttgctggagcaggctgagtgtccccgcggggtttgcatctgtccccagaaccttttccccaggcccgtgggggaatagggaagtcactctgagctagaaattgtcgaagaagaaaagaaacaaccttcctagccttggaaagcctgtccctgcttttgatagaattattgcctttttgtaggaattacagtagcaaaccccaggctgccgctgaatttcctacttttgctcattctctaggatagttcttatccagaatgtggtttcaggaattcttttttttagtttgaaaatgaatgtgaaacattttctttggtgtcttttttttaaaaaaaaaaaacccttattgctattttttcgtgtttttgttttgttttgttttttgtttgttttaccattaagtaatacacatcccagaatttggcactctgtgttaactgtggaggcaaataaaatttagttttaatctgtggtgagctgaatgcactacaacaccttcgaagtaatctgatggtttcattctgtcgagcctcatgctgcctacaaaacaccacaatttacctggtgttttcaacattttaaggaatgaagatacaagtagacatgcaagttggaaatgtttctttagaaaggccatccagaataatgatatctgttgcagtcgtccaaatgcaatatgaaatttcctaggtgctattataaacggtgtggtgtcataccaaatgcaaaagcagttacagtatttccgaagttggagttctctttgtaggcctttcaaatacgtgtttgcattccatagaggtctgctcaccaactgtgcctctcaccactggttaaaattgaatttaagcctcattgacataagtcgtttcttgattgaactcttcagtttttacactggaatttctgtagttgtcttgaaagctgcatgtcacatcactgtacacaaagtgctttggtattactcatgcaccgtggatagtgatttctgtgtcgttttcattttcagttgtacagtaatatggaaggcaggatgtctttcctagaggctggaagaaaagtgtatcgtacattttaaatttattttagaacaagtgcatgagatgtgtcactgatttctgttatttatttgtatgttttattattcaaagtgtatgcacttttaagaagcagaatttatatttttacgtttgaaacgttttatttctgaaacagcgttgattatatagtatacagttggaattaagagaaaagtggaaaatgtaacaaaatacaataaatttattacaagatgtcctcttcaagccacatttctcctttctcccccttgccaactgatatctttttggtgttgacta

SEQ ID NO: 9979 - DNA, 4307 bp, Homo sapiens
ttcccacctgggaagagcaggacttcagaccacagcttgagtagagagggctccagacaaagcttgggttctgacagagccagcgccacctccacctccaaacccaattcccctcgggtgagccaggcccgagcaggggagggcaggggggccgggaagcacgtgcggagctcctccatggccagcctgcgctcccccagcacaagcatcaagtctggtttgaagagggacagcaagtctgaggacaaggggctgtccttcttcaaatcagccttgagacagaaggaaacccggcgctcgacggatcttggcaagacagccttgctctctaaaaaggctggtgggagctctgttaagtctgtctgtaagaacaccggggacgacgaggcagagagaggccaccagcctccagcttcccagcagccaaatgcaaatacaacgggaaaagagcagcttgtcaccaaggaccctgcttctgccaaacattccctgctgtccgctcgcaaatccaagtcttcccaactagactctggagttccctcgtctccgggtggcaggcagtctgcagagaaatcctcaaaaaagttatcttctagcatgcaaacctctgcacggccttctcaaaaacctcagtgatatttctgcaatcaaagtgttttatctgtaaagatgtttatttatttagaacccctgccctcccaccaaagcctcctgtgcttttgttttgtacttttttgagtcacgtgcccgactgtgtgtgtgtgtgtgagtgtatgcgtgtgtgtgtctaattcaattgcaaattgttcaaagcgtcgccttattctgccattgaaccaaataacagccataggcaaaacattgacaccaagctaactggaataattgtagacgatacccaggacggtccctttagcaattgtacatatttctttctagagaactctaatgactttctttggatatgagggttttgaaacctgtgaaccagaaaagctaccattagtgcgtagaaggaggaaggagctgactcgtgtttcttctgagcaggacttgtccttactgtggattgtgggtggcaccaggagctctaaaaactgtgactctaacaacgaaacaaatcgagggaaaaactcttgctttctgcactttcgccccatctaccagtctttgtaaagggcaatattttaacactaatgtttctcaggtatatactcagctagtctaggatggttgcacaccagtaaatggattaaagaggaaggtgccatgtgggtgactgtgtcatttctcctactgccacagatagacattttcgaggtagaaatgaagcctttcaccaccttcctatctgtggtgacatgtgcaccaaaacctgtcttgactcttgggataggtcctaggaagtggcagattggatagccagaaagccagtcactcgtttaattttttttccttctgaaattactagctaaggctcttggaattttgcactgtagtagagcagttaacacctttgacagattcctggaaaaaacttctagattctaaactgggtgaaagactggacatcattttccttgtcaggtgttgcatttttccgttagaggtgggaagctccacgatgccctgtgtctgtgggctcatgttccctcatcttgtagcttggagaggaaagaagttgccttctgccaaaagccaatggtggtatgttgaagcgttgtgtgatcaagtgttacatatgcacttcagatcctgtctgtcagtctctgttagggctgcctttcagtaactcatttattatttcttctttgttcttaagatttcatctcatgcccagaactcacaagcaggttttggagtgtgttccatctggccgtgtcagtgcaaattgcatttcttacaaaggagaacctcaccaaaaaaaacctcacagataagcaaagtatatagttttgcaagctttttcaaggtctcctggcaatactttcctgctcaatttttagcttttcttttttttttaaatgtcaagagagtgaaggtcttgattctctctgaatagcatttgtcactttgccagtaaatacagcatgctaagtttatgtgcttttaaatattagcgtttttcgtcagactcttcaagttcttcttgaacccttggtgcacagatccatatataacctcccttttcagtattgctgtgtgtgaattaactacaacacatatgcatgcatagctgtgaattctgcactactttttttttcttttttccccccaagaatatctcttgggaaaagtttttagtacgttacttaactttattttgctgctaatttgcgcattagccggtaacttgcaagtctggagaccacttactgttgagggtagctggaattttagacccttggcagtatttaagatttagacatttagccttgtgaaagttaccacagtgctccatgtgattcattgactgtgagcctgttgtccattgcactcagccctgtactcacttcttcactcgctgtcctggttttactgttcagattttggtgggttctcaaagcagtaccactctcatctgctcagtacatctgcggcaactggctgccttcgatgctgtcattgcgttcagcccagcacatcacagccccatcagtgtgtagccaccgctctcgtttttctgtatcgcttttatctcctgaaaaagatgcaccaaataagagatcatctatatcaggaattgaatgtctaactcaaacctctcatttttgtttaataggtagatctcatttgaagtctcctatctgaatctctgaaacaattatagtttgattagacaaaggtttttaataacacttcttttttgctgtagtcaagcattaatagaaactagtttaattttcacagtggtaaatatttttattcttgagttatctaggaatggattttccacgatgtctagtgacttaaaaaaaaaaaggaaaaacgtttctacaaatccctttggttttccatgggatctggaataaaatgtcagtgtctataaactgtatgtcatggagtttagtccttgtttcaggtttaatagaaaaaatcaggaagtatcatggcattgtctagacatcatgaagctattttatttccatagttggtaaacagtgaaaatttcattatctccaactactaggtacaactttaggccacaggaaaggttatttggcccgaaagtttggaggtgctccttgaggtgggaagtatcttgtgggaaagtagttacttgattcaatttagttcattggtagggttggggacttggtgttggtttctttctttcttttctttttttttttttttttaattttcccagcaatatttagcacaatgagcgtgtatgtgctttggggttaaaaattatctgctagggatgataggcctgggtttctcgttgacatctagatgggcctgattagagcagtcatctcctggtaggcacaaaataatcaccaacagtaatgttgtatctgtaatgtttgtttgctttttaaagttttattcttgatttcttgtaaacatccattgcactgaggccgtatcattccttaagacagccctacatcttgccttggtaatcccttagataatgtggaaactcaaaccgttaggctccagtcatcttagaccatttcccatccgttttgtattttctcgtcctgaaagcagctgaactgaaagtaagtaataatatgctggaccagtgggaacggatgtgggagtatttgtggtgtgctaaaatactgtaattatctgtgaggctgcctgacacgcttttgcaatcttgttttcatcattcattctgcaaacgtttatggagggccttctttgagcacagaggcaaaactgaaagcttcagggatttgctgtagctgaggagccctgggagcacagcccatcaagcaagggatgtgatggtgtcctaaatggagtgacagttctcctgggaaaagagatcacgtggattccggtcaaatcggctaaggcttgtggttctcttgagcaagtctgttccttctggaaaccaaaagtgcccttcatctttagagacattttactcttccatccaccttttcagactgagctgtctctactatttaggggttgaaaatccattacacagtcactttacgttaacattgggtcatcttatgtttgtatgagacggatgtgggatttgaggggaacattgtcattcccttaaaataactatcatgaaaaaaatagcaacagtatgtaaagggaccaagagt

SEQ ID NO: 9980 - DNA, 1099 bp, Homo sapiens
gggtttcttcaccctggcaccattttggtcggacagttttgtcttgcagggggctgtcctgtgcattatagaatgtttagcagcatccgtggcctctacccactagatgccagtagcacctctcccttgagttgtgacaatcaaaaacatctccattcattgccaaatcccactccccccgccacagacacagttccctggttgagacccattggtttaaataagtatgtgttttctaagatgaactggaactgcatctacttggaatggtttggaatttctcaagatattttgctcgagtgtgatacagaatttagaatttttttttaatctctttctgtgttgctatacgcagccttaaaacgttcttgagttaattagatgagccaaagagatggtgtctgtgggtcgcatgaagtggctggtgcagcctcccctggtgctgatggcgggctctctttggcagcgtactgtaagaactctgtggacggcctctggtactgcttcgatgacagcgatgtgcagcagctgtcagaagatgaggtctgcacgcagacagcatacatcctcttctaccagaggcggacagccatcccgtcatggtcagccaacagctcggtggcaggtgaggtccactcttgttcttgggcagttttttccagagcaaaagattgtaatgaatggtctagaggacctctctggaggctctcatgactctgtcagtttgatcagatgaatccttacgtttccatttaatctggaaactaaaatgactgcagtcaaggaagttggggaggaatgtgacagcacctgtggcccagtggagttcactggggacagtgggttggacctggcgcaaagaaagctcatgatgtgttcttgtggataaatgcatgggtgagctgaaaagcagcgtggcatactacccgctgtcctggggttatcctggagcctgtcccatctgggccacatagcaatcatctataatacaggtgtaataataatgcctacctcatggggtcatcgtaagcatccagttagataaatgtgtgttaaaacattttgtaaagggtaaaggaccattagaaatagtctgctt

SEQ ID NO: 9981 - DNA, 1179 bp, Homo sapiens
ttctgtcccaaattgaacttatgtcttatgtcccaagttgaattgaagtatgtccaaattttctttccttttaaaactggctctccagtatttcccatcttggcaaatggcaccacacattcattcaggtttctaagtcagaaatttgggagtcagaaatctctctcaaatttgtctaatgccctctgtaagagtgtatgggtgttttagactatcttttaaagtaactctgtcacagtaggaatgtaacctgagtattaacaagagacagatatgtttcaaggagaaaggactcagtgtttcttaacatttgttagaatagcctttatgttagcctttgaaaattttgctttgaaataagttccctgcatagtaaataacataaatgtaaaatgtgttgatatgcatatttatgctattcattgacaggtattttagtgtttacagtgtgttgggcatggttctaaacactggggattcagcagggaacaagacaggcaaggtctgtgtcctcatggagcttccatcctagctaggacagaccgactatgaacaagcagacgtctttaacttcagacagtccgtaccacgtcgaaggcattaaaacagactagaatgatagagtgtgatggtgggaggctggcaagacaacattaggaagggaggtcagggaagacgtccctgaagagaccgcagccaagctgagccccagtgtgctgtgtgaacatggggggaaaggatcccatgcagagggaacacccggtacatgcacacaagactaggaggagcttggtgtgtgtcaggcacagaaggaatgaagtaaagaacctgtggaattcccttcatgatgctagtctcttaaagagtgaagtcattattttaaaaaaatatggttgggtgatttacatgtacttgtaactcatttcacctcacagtagtttttaggcagattggttcactgttaagcaccactgtgagcgaacagtttgatagttgttggaaactggtttcttggtgatcttagcacctctacttccctctgggcctgagtcagagttaatctgttagatcatttgttcattcattcattcatctattttctagacattgtctgtttgcgctactaagataaataaatcacagtgcttgctatcaaataactcacagcctattggtgga

SEQ ID NO: 9982 - DNA, 2187 bp, Homo sapiens
tcgctcttgttgcccaggctgaagtgcagtggcacagtctcggctcaccacaacctctgcttcctgggttcaagtgattctcctacctcagcctcctgagtagctgggattacaggcatgcgccaccacagccggctaattttgtatttttagcagagatggggtttctccatgttggtcaggctggtctcgaactcccgacctcaagtgatccgcccacccctgcctctcaaagtgttgggattacaggcatgagcccctgtgcctggccaatattagtacttttaaagtggttggggattacttattagaggagattgggatgggggctttgagaattggaggggaactggagcatcctggggaaggggagctgcccggctgagtgctgtgcagagacgattgctggcagagtctgtgtgaggggatgagtccacgtgacccacatcctactgctgtgttctggctcctttagcaggtgcccgtcactgaagtatctgcacttgatgcatagcttgtaaaggaagtcaagatcatatgtgattctctagcttcatcttcaaccaagaattggtctttctagtctgtgaagttgtactttcttttttttttagccaccatcagagactgatatgatgcctgagggaccatctttccctgtctgtagcacttttgtacaagaactctttcaagcgcaatacaggtatgagaaaatcggatgtttccacttattttgtttacctgacatcgttctgggtgattttaatgtcaagcgtcttacctttttgttttgaagatcttctttgacgtgtcctcattgtcagaaacagagcaacacttttgatcctttcctttgcatttctttgccaattcctctgccccacacaaggtaagaatggatttagtaaaatgaagactgtattttcttatggtatccctttgcctctgtaggctcctattaggtcttcttacttatttagacaggtaatgggattaataatgggattgaatacagtcattgctacaaccttacaagaataaatgccctcctgagtttgcagggtgagcaggcacatgaggcaagcaggggctgtgtagtctggcccagttcgtcatccacacatagtatcggggttgggggacgggggctgctgagtgacttcaggattctctagagaccttactttacatttcttgtttcttcgttgctttattttgaacaatttctcaacatttccaggagttatgctgttctaaagaaaatacaaagcacagaatcaagtgtagatatatttttgtttgcttcatagaatgttcattttatgaagattgccttttccaaagatcttgatgattgtttgacagttctgcttagagccaagtgaaatttttccatttgggcttccgagtaacagtgtgggttagctttagttttttgttgatttcgtctcaggtttattttgcatcttctatattttagttgaaataagtgactaatgagaagatctgactttgatctgtacaggcctctctatgtcactgtagtgtatcaaggcaaatgttctcactgcatgaggattggtgtggccgtacctctgtctgggactgtcgccagacttcgggaagcagtgtctatggaaacaaagatccccactgatcaggtaataagtctgctaagaccagttacacatgagccacaaaagtattgctttctgttctcttagaattttttacagttctttgccaagtatggttggatagagatttaaaaccagttgcatttagagtttagggaaaaaaatcaaggccccaaagactaaaatgtatatagaaacttttcatgtttcatttaattgtgtatataattttaaaagaagctgtgactttacaccaagaccttcttgtagctttgttcataaggtataattacttaacccttcttaaatcattcctgtggatgtgtatgtgggcagtggagcgtcctcgcagtgtttgagatagtcaaagaggctttgaaaacttgagcagtgacgctagaaaaccccttcccattgtgatgataagagtggatatcttgctagtacaatgttctgtacgtaatagatgctcaatacgttttgttttctcattacggctggaccagagtctcttaccttgtttagagaagagaaaggaaagttgtgccca

SEQ ID NO: 9983 - DNA, 1147 bp, Homo sapiens
cgcctaggctggagtgcagtggcacaatctcggatcactgcaacctctgcctccccgcttcaagcgtttcttctgcctcagcctcctgaatagctgggattataggcatgcgccaccacacctggctaatttttgtatttttagtaaagaaagggtttcaccatattggccaggctggcctcgaactcctgacctcaggtgatctgcctgtctcagcctcccaaagtgctgggattacaggcgtgagccactgcacctggccagatgcagtagaaaattatccacagcctagagctctggaatgaactgcacagggggcctggacatgtctgaggcttcagtgctattctcccagggcctccccatctctttgcaccttgacccaccaactggttgcattgagcttgacaaacacttcgtaaagcaattctggaaactcattcatccatgcttctgtgattaggttaaagcaactctgtttatctttattgctaatctgatttatgtctgttgtaatcagttcatttataataacaaaactaaggttacactttccatctctattttctcaggctatttggaattccttgggactcatggaggttgtacatactttggctttcagccaagtatatttgacctgacctccccgggaattagggctctgtccatcactctgatttatatgtgaagcttctgatcttgtttcccccctctttcccacctcctctatccctgagggatggtcacaggtgaatttttcctaaactgcttgtccatgagctcatgttagcccaagtgcatcagaatcacctgggaaagtgaatttaaaatctagatttctgggctccaaccccagtgaactctgatgcagtagttctggggtggagcttgggaatctgtaattcagcatgttctccagaggggcctggggcacagccaggtttgggaaccactattgcatagaacccccagttctcctgtgagttttcaaaatggttaactagctaatacttgggttgggtttcaggcctaacaactgccttttgcattttcttgtcttaggaaaaagggtcaagcaaccacaacctgctggctgcacctcgagcagcgctgactcggcttaaccagcaggcccaccagctgg

SEQ ID NO: 9984 - DNA, 1247 bp, Homo sapiens
cagggggtgagcagggcagaagggagaggcgagtggcggggggaggtggggcaggaggtaggggcgagttgctaaggaaggtctgtgctctttgttggcagtttcttctcacgattctttgtttcccgtcatttctgagaccaccaactgtctttagtccaagattttttgtgatggttctcattatggggaaaggctcacagcaggatagagtgggagcagctgctgctgttcctaactcactcctgaatgcccagcacagaaattgcgtgactttcgggagtgaataaaaccaaagtgccacaggcatacagtagagtgtgtgtaaataatataaatgaagtaaatggtaattcctaggacacagattttccttaatctcttaatgaaatcaagtattacattctgaagggtaaggagagactggttaggagcacgaatggggacacaatagataaaagatgggcctctctgggctgcattttgcagcccagagaggctgaaagcctggctgagcttcaagtcaagaacagcctgggtgtatccaagggagctcctgaaagagatgatgtcatcctggaagcactaagcctggaaagggacagtcaccatctgtgttcctggctggaaggctgcacagtgtgcatgcgtgtgtgtgtgtgtgtgtgtgtgtgcgtgcatgtgtgtgtgtgtgtgtgtgtatgtggcaggcacctgtaaagcttatcttatctccccatcaatctcaccagcagcacctagactcctaccaaggaccactccccaccaacaggcgggtggcagaggcaacaggtcagaacgcgctgggccgctccagtgacaagattgacattggccacccagctcttatgatcacttctctgcagaaagggatcattttgtgatttacgggctgagtaaagcaaggccgagttgaaatctcatctgagagatttctctcatcctgggcagcttgggccagatatagggagattgctgtggctcctctgtattttcctagcacccattacttacttttggaacagtggtgctttcatttcactttgtaccaccactaaaaatttcatcacccagagattactttagggcaataaagaatcacctaagaaggaggttaagggattgctgctggtccctcaaacaactgtatgaaacagacttcttccccttaactcctaaggaataaaggcatcagccataccaagggaatcaagagatttcattta

SEQ ID NO: 9985 - DNA, 1101 bp, Homo sapiens
ctagccaacaggtaggagagaggagtcattgtcctctacaccctggggttcctgatcagcacgagcttggtctagtacacagtacagcaaggacagcatatgccagatgtgaaggccacagggctggaggactgtctgtacctagatacagcgtgtcattattgtcatcattaaacgtttattgagcacctaaaaagggcaaggctttgtcctacttggcaggggtcacgtaattttggtttgatatggtggtttcagcctaaatgaggaaacagtgcatcttgtctccaaattaggaatgggcttggttccgactgcttgtttataaattagttgttgggactaaaaataaatttccatatagaaacggtgtgacaagtggtggtgaagtcccttgggccagccttcaggatcggggtgaacttaggcagcctgccttctgggtcctgcagtcaaattccgtgctgctgaagggctgtgtatcaaaggggaatctctggggtctgccctggaaaagcttgtcctactcccttcctctcttctcatacctgccagggcttttatgttgccctgaggtggccttcctcagacagtttttcccttcaaggggctctggcttcccacatttctttctttatccctttaaatgaaatctcttgattcccttggtatggctgatgcctttattccttaggagttaaggggaagaagtctgtttcatacagttgtttgagggaccagcagcaatcccttaacctccttcttaggtgattctttattgccctaaagtaatctctgggtgatgaaatttttagtggtggtacaaagtgaaatgaaagcaccactgttccaaaagtaagtaatgggtgctaggaaaatacagaggagccacagcaatctccctatatctggcccaagctgcccaggatgagagaaatctctcagatgagatttcaactcggccttgctttactcagcccgtaaatcacaaaatgatccctttctgcagagaagtgatcataagagctgggtggccaatgtcaatcttgtcactggagcggcccagcgcgttctgacctgttgcctctgccacccgcctgt

SEQ ID NO: 9986 - DNA, 1888 bp, Homo sapiens
gagaagagaaaaagaaaagaaagtcagtctctggtttggttgggtgttaggggtatatgtggaatatccctcgctggagtctgtctttggggctcactgaaggaagatcagatggattgtcatagctggggaccaagggagggacacatgaactctccctaatcctctggagtcctctgaaaggacaaggtctgtcttccttagctggtctctgaattgcagcccatctcaggatttcaggactgcagaattatcgaagggttcccaggatatgtgcctgtttccccttgtttgtagtcccaaagagagtatcccaggtattttgtgtcagaattgtttgaaacactcacttgacttaacattgacccctgttcctgggttgctctccactgatttgacatcttctgtctcttctgtcccaggaacctatccgcttacggtacaagctgacattcaaccaaggtggacagcctttcagcgaagtaggagaagtgaaagacttcccagacctggctgtcttgggcgcagcctaacttttcacaagatggacccttcatttcaagcttaggctggcgttacttttgctgtctagtcaggactaatcacggtgtttcagtgcggagtgccaagagtcctatcctgacgtcaggctctgggtgtcaacctctgacttattctgcagatgctctgtgtgtgtgtgtgtgtgtgtgtgtgtgtgtgtgtgtgtgtgtgtgttcggggagagggtggtagcacagggcttgggatatcggcagtgtgggaaatgcgaagcatttctcatcatcatcatctctgctacagtcatgtttctgcatgtcagcgagcgacactgtccctgcctcaggttggaggttttatcagccaaagtgtttttttcatgtatcgttcgttccattcatccactctgtgccttgtcagcctttgaaaggcttggttgctcccaggctgctgttctcagggaccttaaaagggacctggttagtcttggggcagagagtatctacttgggcactctcttccaagaaagaccttgtctccattttcattagacaatgcttcttgtgtgtgttctggaagatcttctaaatggaatgcttgttgcactgttcccaggcgagtggctgccatgagacctgaggaccacacttgggggaccaatcatgtccttcaccactgtgccttagaatcgcccctggacagagttcctgggcagaggggaaagcagctcccaggccttactcaggcctcaggtccatgggttgggcagccagtctgggcccttctcaggatcctcatctccatcctcatcctcttccttcacagcatttacttggagctctttgtgacacaccatgtcagtcatgatgaatcggccaacagccagcccttgccagctgacgtcacagtctaagatgggaaactgtggtacagatagacatgaagagagcttagcagtgattgaggtggtgactaaatatacagtcattgaataaataccatgtagcaagtgtactttgtggagtgttgagtaagtggaaaatggaaagccagttgcatttagagatgataggcctaaagggaactgtcttctgtcgagaagtaaaggaaacttcatgaaggatgtagaagcttagctgcctcagagaagagagaacctgaagatctgaggcaagctggacaggagaggtggatatttgttgatggaagaattcaagtttataatcaattcccacttagcacctactgtgtgctaggaacttgaatgtgtatgtttgacaagtcctgcttggcctgatgggtgggagaaggaacctgagcctggctgagatggctaggcggagggctttgaagtccaagcagctgaact

SEQ ID NO: 9987 - DNA, 1272 bp, Homo sapiens
cgccactgcactccagcctggcaacagagcaagaccccgtctcaaaaaaaaaaaaaaaacaacagaaaagaaaaccagtggtgtattgggatagtcagagtgcctgcatcgtagtgtccttggaccatttggtgagatggtgcatgtaaaatgtgtgcactgttgttagtgttaactcttctgttgctgctgcttctgctctaggcctgagggagttgtggtctcacctactcttcctgttcactctctgcagcttctgacaaggcttctaaagagcaaccaccccgaggaccttcaggctgcaaaccggttaatcaagaatttggtcaaggaggtgggcattcttccagttggttcagtagaagtagcatttgacagaggctgaaggacagtgcatatgagcctatgcttgaggggtagaggaacggttgcctgggagaaagagtggctcctagccctgaactctggggaacagccatagtctccctcaagggcagcaaggtggtgattggaaccagaaatcccgctgccgtacttctcagctgctttcatccatgctgctcaaagcatttcctagacaccagcttgggtcccagcaacaggtattggtatggacaaagtccaggtttaggaatctgcttttcagaggacttgaggctggtggcacaaaggcagaggtcatggtcaccagtccccaaactgcattttcctccccaggaactctgggcttttgagtattttttcacccactgtgtgagttctcccatgcacttaacatcctggtgatgcccctgagcgagctctctcaatagtgactctttcccatcccttgttcaggcttcagccagggtttctgctccctcactcccatcctcctctttttcccaaaaggaacaagaaaaatcggagaaggtgtccaagagggtcagtgcggtggaggaagtgcgaagccatgtgaaggtgctgcaggagatgctgagcatgtaccgcaggccagggcaggccccgcccgaccaggaggccctgcaggtaatacaggtgtaacacagggggctgcacatgtttactaaagtgggtttgaaatgctttcacctgtttgcacccatgaagccatctcagagtcaagacggtaaacatatctgacacctccccaaatgtcgttgtgctgctttgtcctccctttgtctgtcccttgctccccagtccccaggcagctgctaatttgctttctgttctgattggctgacaactcccagactcttgtataaatgg

SEQ ID NO: 9988 - DNA, 2188 bp, Homo sapiens
caccattagcttaattttaacttaaaattaccagttccctttcttgcagtcagcttcataccatttttaaagtcaatacgatggaaatcaataaatctgaattccgaacatgttgtgtggaatactcttaagtgtgtttgagagtagatctgccaattatgttgacaagggaatgatcaaaagctttgttttttttaaaaaaaaaaaaagcagtttcaattgaaatattttcatacatctttggttgcaaacatttggactgcattgcaatgagttggggtgttttttttttccttttttgtataaaattgtatgcaaaatgggggtgggttagtaagccacatatttctgtccattgattcagatttaattctttccctttttcattctctcgcttcctcaatttgagtttttgttttaagaacccaaagatgtcagttcttcttttggtacctcatcaacgcttcctttcctgggctccctcccgccgtgctgctgctgcctgtgaacgcacggtgggagaggaagagctgctcagtcttgggcaaggagctctcacacttgctgtggtgttcgttgagcagcagagtatctcccagtgactcctgtttaaatgtcttgccctttgggcccccatctccaaggagttccattgctggttggatgattgtctgcacccctcactgagcttggcctagaggcccagcctggcatggttgtgcctgggctgtgccgctcaacagccccagctcccaagcagacaaagacctcttccaggaggagccaggtagaagatagttatacagccatatagctgcagatccagataaccttctttctttggaagttttcaagaaattcttaagcagtccaaggatgatttcaattatgcttctccattgggtccttctgctcatgcattcagttcaagtgtcctttatcccaggttcagagatgctgcctttctgaagaagacatctgaccctagcaggttggccagtgttattgaacaacaaaaatgggataaattgctttcatgattagctcaccttcttctggttttagcccttctgttctctgtacacgtgaacttctgtcatctccttctggcttggttgcctctgaaaggagggaaagtctcttggtaaattatctcttttgtgctgtttgctgtttctctgctgccgtctttgcagttctcctctcactggttgcaggctttcatagtaaggtttggcgagaaatgttccaaacatcacattttggattctaggctgtcacccctcattctgtgaaacgtattagcatgtgttcgcccaagatgactattccttgtgagccagttaatgatgatattctacgcccttcccttctaagctgtagttcaggaatccagcccacatagacagactcttgctttccatggtgtagtcaatgccaagtgatgcatctaggcaggaaaatctactctttgcttttttgggggcaattagtacatttgtgaagtgcagcatccaagaaacagcctgttttttcatcccttgagaaaggagcagtcattgcagcttttctgtccttgtcggcctgcagttcctggggaaaagagtacatctgagctacttgtccaagcctctgtctgcaggtgacaggttttgggggaaatgagatgcattaagtagaacatcatctcgggtcagacattgccccttttgtttgccaatgccccagtcctagagacttgtcctgacagtgccgcacacctacttttgatctctcagagcaggtggctccatccccagactagcctggctgctctccgaggcccctccacctgctccccttattgccccattcttgtggcttgccgggccacttggcctcccttcttgccggtgacagcgttccatcatctccccgctccccaagggccaactgcttctcactcaggctggtgtcatttcaggaggaccaaagcctgcgtgagcctttttattttcagtaaaatggtgcttttttccttacttcgagatactatatataaataataatgtaaatgacaccttttcgtacggagctgtttgagtattgctttacagagctcactaaatcagcttcaacaatcttgagctctgtggctcctcaccctgtctgcatggaagaccttgctggacgctctcgggagagcaga

SEQ ID NO: 9989 - DNA, 1048 bp, Homo sapiens
gctttacctgatgagggccaaagagattaactctgcctcgttgccatgtctcagaaaagttgccatatttcacccagaaggggcttgttttcctcttactcttactttaaccatgtgcctggaggagccattctgggctcttgcacttgcccagcctttctttgccaggggcagagaagggaaagggggtagattgagtgtgccaagggccgtgcaagggcaggcttgctttccacccatctgctgagggagccctctcctctcgctccttgcctctgttcacacctgttgtcttggaagaggatggtccctttgtcttaaggctttgtgataaagtcatctccagttaggatctgcacctgtttccttcgtaatagtgcctggcggcctttctgaagttacaggtggttgggagccctctcgcatgcagaacatctggtagattgatctgccaggctgggtggttctactgctttctcaatttctaagaaccttttttttttcttaaagagttctgctgaattatttgacaatatttgtaagtaccatgtttccttgtggtgtatgctctgttctggtttctgttttcaaatcaaatgcctgtttgggaggagatgaacgtatttagtctattagatttgcactgctggattttttttttaaagtgtaaccttgaatagctgtcttattgtttatcctgtaagattagtcaatcgattaaagtttgataattaattgcgtctctttttccttccaattcttcatgcgcctaatccatactggggattaaccaacatttggaattggacctggagccatttctttgccagttgtggtcttatttggctttaagtatattcaaatgtattctctgctgaaacagttgacatttactctgcaaaatggtgaaagtgaccggtgtgacagtgagccacactcctgttggagcagcatggtctgctccttggtgggccctggcttccacatgttggaagagaagctgcctccctgtactcacacctcctgactagtgccttgggcaacccca

SEQ ID NO: 9990 - DNA, 1195 bp, Homo sapiens
ctgcccaaccagaaaaaggtgttgatacattcctaagaagacctaatttcaccagggcgactacagttcctttacagactctatcagatagcggtagtagtcagcaccttgaacacattcctcctaaaggtagcagtgaacttactactcacgacctaaaaaacattagatttacttcacctgtaagtttggaggcacaaggcaaaaaaatgactgtctctacagataacctccttgtaaataaagctataagtaaaagtggccaactgcccacaagttctaatttagaggcaaatatttcatgttctctaaatgaactcacctacaataacttaccagcaaatgaaaaccaaaacttaaaagaacaaaatcaaacagagaaatctttaaaatctcccagtgacactcttgatggcaggaatgaaaatcttcaggaaagtgagattctaagtcaacctaagagtcttagcctggaagcaacctctcctctttctgcagaaaaacattcttgcacagtgcctgaaggccttctgtttcctgcagaatattatgttagaacaacacgaagcatgtccaattgccagaggaaagtagccgtggaggctgtcattcagagtcatttggatgtcaagaaaaaagggtttaaaaataaaaataaggatgcaagtaaaaatttaaacctttccaatgaggaaactgaccaaagtgaaattaggatgtctggcacatgcacaggacaaccaagttcaagaacctctcagaaacttctctcattaactaaagtcagctctcccgctgggcccactgaagataatgacttgtctaggaaggcagttgcccaagcacctggtagaagatacacaggaaaaagaaaatcagcctgcaccccagcatcagatcattgtgaaccacttttgccaacttctagcctgtcgattgttaacaggtccaaggaagaagtcacctcacacaaatatcagcacgaaaaattatttattcaagtgaaaggtaaatcaagatgtgtttgatgatgatgatgatgatgatgaaagttaacaattactatttgcctggcacttccttttctttcttttctaaaaagtgacagggccaagtgtggtggcttacgtctgtaatcccagcactttgggaggctgaggaacagagtgagaccctggctcaaaaaaatttaaat

SEQ ID NO: 9991 - DNA, 1197 bp, Homo sapiens
acacagctgaaatcatgtagcatatacagaggcacgtcataaattcacagatggaaaataatatgaacagagagatttgacagtatatgatacctaccactgagtggtttaattgtttttccaattaaaaaataaatctcatctctcagatcattgaatctgagtttctaagatgaacaaaatcatcactcagattcttcggggaggcatttggccattctaccgtgtcatgcatctctgcttttgcagaggaggaaggagagacttttgtttagtaatttctccatattggggtcctgctgtgaaaaagtttagctgttcttagcaagcactggaccagaacagcctcagcgattatttaagtgattgtcagacatgcatctgattgaggtgagaaggatattgccagagaaatatcttaacttcttgtaacttcttcaagctccttagagctgggtctttctttccccaggactcttctcaggggagctcccggagtgcactcaggagctgatgattgacgtcaccaagagctactaccagaagtttttgcccctgacgcaagtctagcatctctgcctcatgtcttgaatctgcttgagctctaagatgaacctggggacaaagtgagccagtcagcacctacaaagagcttttgtgtctttgacatctaccaccctcctccttttaaaaaatttctttagaatttctcaatcttcaaggctctaagtgcttaagaattcactaacagacagaccatctggaggagctgtcttcaaatgctgtgcttacaccttatctatgaacagtcactttgtaccattatctgtggaacacagaatcatctgttcccaacactccagccccttggtcctgtggatggctggatcccgcctgaaacggacctgcagagcagcagcacccttccggtgtggaggctatgtagctggtgcgctgctcacggccattcactgcccatgctgagcgcctctcacacaggtaatgcccagcttttctgctgctaacacatttggccagttgttgcagttgctcatcatcttgggaaaggtgtttgtgacttttcagagcccagattcctgttgtctattaaaacttgaagggaggggtgaatagtgtttctctcttcttcccaaaatgaccttagctgtcctaggatagttagtaaaagacttttta

SEQ ID NO: 9992 - DNA, 1157 bp, Homo sapiens
tgggatctcactctgtcacccaggtgggagtgcagcagtgcaatctcagctcactgcaatgtctgcctcctgggttcaagcgattcttctgcctcagcctcctgagtagctgggaccacaggcacccaccaccatgcccggctaatttttgcatttttagtagagatggggtgtcaccatattggccaggctgatctcgaactcctgacctcgtgatccacccacctcggcctcccaatgtgctgggattacaggtgtgagccactgcgcccagcctctttttattattatacttagcacggcacttggcacttaggaaatgttcagtatatgttagctattattggctactgttatttcttcttcttctcctcctcctcttcttctttctcctcttattcctcctcctcccccactcccttccaccccctcttcttattcctcctccttctcctcattattattttaagtacctccttaccaatgcctacagaaatagactgacctagtaccaggatctagaggagttcaatcaagttcgtctgttgccttcaaggtaacagcgtagtggtggttccgagccagatgccagacccagtctgcctttgttcaaatcctggttttacacttaatactgtaggtacctcgggcaagttacctaacatttcttcacctcaatttctccatttgtaaaatgtatataatgatagtacctaccacgcatggttgttaggaagattaaatcaattaatatttgtaaagtagagcagccggctcattgtaagtattgggagtattggttaaaataattacaaaataaacaatctcacttagatacatcccttaccccctgtggattatgtcaagggtgaaagaaacagtgtgcttgaaatcctgctgtgcgccgagctgtatatcagaggtgttatggtgattcgtcatcattctcctgaccactttccatttttcttttagagtcaacactggccaatctttagggaggagctctgatcattgagaaactgacactgtggaagggggcatttctgactctctcttcctagctccatttgatcttcctaaatctttcaataatgtgtcattggggtaggaccaaagaaaaacggggtgaatgtacggttgctgctttgtttccc

SEQ ID NO: 9993 - DNA, 1595 bp, Homo sapiens
ttatgttgctctcatttctgatcatttgaaacaacctctctgagtttctgaaagggaagggaatggagaaaagcacacccaattatgctaggttctgttttattttggcttttgtttttgttttttttcccacccaccacaagttcttttcttcccctctcatagtgtgggcgaaatgctgaaaacttcgaccgatttttcacccgccatccaccagtcctaacacctcccgaccaggaagtcatcaggaatattgaccaatcagaattcgaaggattttcctttgttaactctgaatttttaaaacccgaagtcaagagctaagtagatgtgtagatctccgtccttcatttctgtcattcaagctcaacggctattgtggtgacatttttatgtttttcattgccaagttgcatccatgtttgattttctgatgagactagagtgacagtgtttcagaacccaaatgtcctcaggtagtttggagcatctctatgagatgggattatgcagatggcctatggaaaatgcagctgcataattaacacattatcaaagtcctcttacaatttattttccgcagcatgtcagctaagtagacccaatggggagagaaaatgcctgctttctttccctctttttctgcactgccatattcacccccaaccatccaatctgtggataattggatgttagcggtactcttccacttccgggcctggagcttggcttgtatccaagtgtatggttgctttgcctaagaggaatccctctatttcacctgttctggaggcaccagaccttgaaaagaacatgctcaaaataaaatgttatctgttatttttgtaaactcaaagttaagatgatcaaagttctaaaattccaagaatgtgcttttagacggtctcaatctaaaagcacttcaaggggtcaaagggcaaccagcttgggtgctacctcagtgttgtagtttctgatactttatgtctttgctcaccctcatccccaaactacttgaaaagggcatttggcaccactctctgaaacaacacagtcactctagcaaggcccccaaagggccctggttttacattacatttcaaactttatttgctttggggttttgtttctgttgttgttcaaatgcaaaaaaaagaaaaaaaaagaaaaaaaaaggtgactcacattgttacacatgctttaaaatatgtattcaaatgttattaaccacaatgacgacctgctttgatttaaccaagaagacggctgcggagcctagcagactcaggcctgtgggaatgggatttgttacaaatctaggtttgttactggcttcagaaagctaattaagtgctctgaaaaagacaccgtttcttgaaacaaagatggttgtattcctcactttgatgttgttttgcaagatgtttgtggaaatgttcatttgtatctggatctctgttatgtgccatttttcttctagcatcgagatacaataaaaaaaaaaaaaaagaaaagaagaagaaatactatttcaaggaaaactgctctttttgagaaacgtggacctaaactacaaagtgggaactgaggaggga

SEQ ID NO: 9994 - DNA, 1203 bp, Homo sapiens
cagcttgcgggcgtgttctcgcggttccgggcctcaaggcgacggaaacgaaaggcgagcgaagcgcggaggatccggcgagaagaagcgtcagggagcctcggcggtgtccccggggtccgccgaagccacccggccgccggctggggcccggggtggtgaggaagtgctccgaggcctcgccgaggcctagcgccggctttgtgtccgaggcggcggcggcggcggggggaggcggagccgggggcggcctgcgggaaggcctctcctccgccgaccgcgcgttttcggcctaggccgtggggccgctcgtggcctccggggagcaggcgccaggggtttgtgtgcggtgggggcctgggcctgggcctggggaagctgacgccggtcgtccggaagccaggaggaggcgtgaggccgctcgtggactccgggcctaggccctctcccctcaaccttctcccggggcctgggtcaccccaatccacggagagagagacccgccgggaggtgcggccgcgctatggacccctgaccccgtggggtcgctcggactcttaacgtgtggactgaccgctactgactgcaccgccaatccccccgtctctgccggccccttagcatgagcgagggggacccagccgggtgacattgtgcccgttggcggattctcgatttcccctcttccccgtcctcgtcctcctcctcccccatgaagtgattctgagtatcggggggtctctggattattgttctgacgaacccctgcttgtggttggggggtatttaatctgaggccttagggtccttcggtgtctttgagtgttttgtgtgtacatattttgctcttaaagtttataaatatacgtatattgagagtgtccacgtctcctcgctgaaccttaggaatcccttggcaccatgtcctgtgtgcattataaattttcctctaaactcaactatgataccgtcacctttgatgggctccacatctccctctgcgacttaaagaagcagattatggggagagagaagctgaaagctgccgactgcgacctgcagatcaccaatgcgcagacgaaagaaggtaagggccgcttggtcttaagatatttggtggctggagagagatactagctagaaggtgcctggcaggaagctaaccgccattatgtctctagtggggactgttcgttctagtac

SEQ ID NO: 9995 - DNA, 1150 bp, Homo sapiens
aggatcccattatgaaaattcccagcggggacctgtgtcttctacaagtgattctagcacaaactgtaagaatgctgttgtaagtgacttgtcggaaaaagaagcatggccctcagcccctggcagtgatccggagttggcttcagaatgtatggatgctgattctgcctccagttctgaatcagagagaaacatcactatcatggcttcagggaacacaggtggtgaaaaagatggccttcggaatagcactggacttggttcccaaaacaagtttgtagttggtagcagcagcaataatgtgggccatggaagtagtactgggccatggggtttttcccatggagccataataagcacatgtcaggtctctgtggatgctcctgaaagcaaatctgaaagtagcaacaatagaatgaatgcttggggcactgtaagttcttcatcaaatggagggttaaatccaagcactttgaattcagctagcaaccatggtgcctggccagtattagagaacaatggacttgccctaaaagggcctgtagggagtggtagttctggcattaatattcagtgcagtactataggccagatgcctaacaatcagagtattaactctaaagtgagtggtggttctacccatggtacctggggaagccttcaggaaacttgtgaatctgaagtaagtggtacacagaaggtttcattcagtggtcaacctcaaaatattaccactgaaatgactggaccaaataacactactaactttatgacctctagtttaccaaactccggttcagtgcagaataatgagctgcctagtagtaacacaggggcctggcgtgtgagcacaatgaatcatcctcagatgcaggctccatcaggtatgaatggcacttccctttctcaccttagcaatggagagtcaaaaagtggaggctcttatggtactacatggggtgcctatggttctaattactctggagacaaatgttcaggccctaatggccaagctaatggtgacactgtgaatgcaactctaatgcagcctggcgtaaatggtcctatgggcactaactttcaagttaacacaaacaaaggaggtggtgtgtgggaatctggtgcagcaaactcccagagtacatcatgg

SEQ ID NO: 9996 - DNA, 2668 bp, Homo sapiens
ccgcctgcagccaggggccgcctgtgggaacagctattctctgcacattttccactttgttttccccaaaacatatcagtttgaatacttgaatcatgcaggccaatattataatgtgaaaaggtatctactctatttacactcccaaatagcgccatacatgctaaaccgtagagaatgagctcgcttgtgtctattcatcatgtttagcctttggattctttttttttttttccttctattcctccccaacccccccccccgcccctttttttctctcttgcaaaaccattttttgggctgataacgtatgagcttttccctttgcactgaatgatgttctctccgtctcatcggcagtatggggggcagctgtcccagtgtcaatgtttactcaagggtgttcttaggaggcgtgcgctctctactatgccttgatgttgcctaccttattgtggtatcgtggagtttaaaagatcaagttaggatgctgacttaggattattaatgaaagtgttgcaccagttttttcatgttgtaaaactaaagaatttcgctctgcagtttgaaaaactgtggccacagctgtgacttgcagcccacctgccacccaggacgggccctgcactttgaataggctttccattttgttttggaggttctcactttgaaccttcttgtttacagatttttttgtttgttttttgagaaaaaaaaatgtttactcttccatcatttaaaaaaaatgtaaaagacaaaaaaaaaatggaggatgatttaaaagatgctttctatctctgggaaaaaggagcagcatttggccatgttcttttgtttttctattcctgtcccaaatcaaagagcatggttctcaggaaaaccagttccccagtttaaaaaaaaaaaaaaaaattccttgtagtttcttagaggaaaaaaagaaaaaccccaacttttagcactgatactacatattgctctgttaaagaattttctctgccaaaaaaaaagaaaaaacaaaaaaacgcttaaagctggagtttgacattctgctttcagatgctgtctttttattagtgagtgatgatggtttgctaataatcaataggtaataattttttgtaatcccatcaagtggctccatatgtttctgctctctcgtgactgtgttaatgtttaactgttgtaccttaaagccgaaatcagtaactatgcatactgtaaccaaggtattgggcttacagagttgtttgttgtataaagaaaattttaaatgttgttgcaaactaacgagttacaccattttaaactttctttcctcccccctttttttgcccacaaatggtattataatgcttgcttagtcaaagaagagagactaaacaagggtaaaaattttaacagtacagaatttgccatcatatcattgccttgattctaactgtttgtgtcctaagatgcaaaagaagtcagtggcttttaactgtttacaaatagaatgtgattgtaaaatgtacagtttggttgtgtttgaattatgaaatttcttcagatataataaaccatgactttttggctgctcaacattaattgtctcctttttgtgaatttatttgtaggctcttttttataatgaaagtttcaaagttgctatgtatgagggttctcatagagcaaccgattaaaaatctaagcaaatatttgaacattttatctgaactcatcacaatttcaccctgaaataatgtgagaacaatgggaaactgtagcttgctccttcccaccctctctgagcatctttgggatcttgttgctcaaaactcttctgtgacttcatcttccccaccatttgtgcccatctcaagcctcagcaagaaaccatgtggaacatgaagcttaatgacttgacagtgtactagtgttaaactctcatacctctgttacaaagcgagaaacgccacacccggactggccttttcttcccccttcacggccctcgcttctccctgcaggagctcgggggcgaaacctgtgtatggatttcagtgtatgacttcagatcatgctccaacttgccaggtgtgagctaatgttgtcggacaccttactataagcaaatgttattcagtgcgttcaatgtatattgacttccatactggtttttccaaaaaccaaaggtagctttgaaaaaccatgtctggaaatgtttggagcgttaagctgattgaccttctgaccttggggctttgagtagtatataattcataactgcgttaattgtattgttaaagtgtttgggagttttttgcgcttgttatgtggaaataaagtgtttgatttaaaattttttaaagtggtttggatctttgcctagtccttaaataaatacagctctattccctaagccacccttacttctcggtcttaatcccgactgccagtgcctggatgctgccctttgtctggcacagacctgcagctgaccatgctgggcccatggctcggggctttctagtcacgcagagccaccaagagtcagggtaaactttttaacacaggcacttaacacgttttttctttgttttcttttttccttttctctttctactttcttcctttttcttttttctttctttttctttctttttttttttttctttcgacaggg

SEQ ID NO: 9997 - DNA, 1147 bp, Homo sapiens
ggtacccaggcctgtccagcccaatcagttgagaccagggagaccagggattggcatcagcaagtacagcactagccatttagtgctataccaagaagactatctactttgataagtaagaagcagatctgggggagtaacacaggcttcctgattctcatcatgaatcactttctacattacctgtcaccttctttcccgacccccgacccccgcagggatactgcatatagttgttgaagctgtgcactgcacaaccctacagggtgcaatctgcattttaggccctgtagtcctgaatatttattctaccaatttctgacaggtgggctctgaccaagtaagagtcttggggaagaagaatctcattctaatgtaaacaaaaatgccagataggctaggggtggccctgccttcctctacttctcttctctgtccctttggagcatggaaataattgggggtggggagcaggtacccttgactttgtctccaagatctgacccgtccatctccccacaggtgggtgcatccttgtttgccagcaatgttggaagtggacatttcattggcctggcagggtcaggtgctgctacgggcatttctgtatcagcttatgaacttaatgtaagtattttacctagggcatagatgacatcttacctctacctaacaggtagatctcaggggaaagttgtgtgaatgccctgcactttaaaaatagaatggtggggccaggcgcggtggctcacgcctgtaatctcagcactttgggaggccaaggcaggtggatcacctaaggtcaggagttcgagaccagcctggccaacgtggcgaaaccccgtctctactaaaaatacaaaaaattagccgagtgtaatggcgggcgccgtaatcccagctactcgggaggctgagttaggagaatcatctgaacccgggaggcggaggttgcagtgagcagagattgcactactgcgcgccagcctgggtgacaagagtgaaactccgtccccctccccacaaaaaaacaaaacaaaacaaaacaaaaaaaacaaaaaaaaacacacacacacacacacacacaaacccaaaaaacacaaaaaaaaaacaatagtgggttgggcgcgatggctcaggcctgtaa

SEQ ID NO: 9998 - DNA, 1226 bp, Homo sapiens
tttcctgaaatgcactcagactcagccagcaaagacgtgcctggccgcatcctgctggatatagacaatgataccgagagcactgccctgtgaagaaagccctttcccagccctccaccacttccaccctggcgagtggagcaggggcaggcgaacctctttctttgcagaccgaacagtgaaaagctttcagtggaggacaaaggagggcctcactgtgcgggacctggccttctgcacggcccaaggagaacctggaggccaccactaaagctgaatgacctgtgtcttgaagaagttggctttctttacatgggaaggaaatcatgccaaaaaaatccaaaacaaagaagtacctggagtggagagagtattcctgctgaaacgcgcataggaagcttttgtccctgctgttaatgcgggcagcacctacagcaacttggaatgagtaagaagcagtgcgttaactatctatttaataaaatgcgctcattatgcaagtcgcctactctctgctacctggacgttcattcttatgtattaggagggaggctgcgctccttcagacttgctgcagaatcattttgtatcatgtatggtctgtgtctccccagtcccctcagaaccatgcccatggatggtgactgctggctctgtcacctcatcaaactggatgtgacccatgccgcctcgttggattgtcggaatgtagacagaaatgtactgttcttttttttttttttaaacaatgtaattgctacttgataaggaccgaacattattctagtttcatgtttaatttgaattaaatatattctgtggtttatatgaaaacttcataattcttggaggtaaattgtggagtgtgtgtgtgtgtgtgtgcatgagtgtgtgtgtgttgccactcaaccagatagaattgtggctgggacatcttgggggagagggtctaattgtagctgtaggagtttgaagaaacagagagcaaggtcgcaacagtgaaaaaggccgccaggtgccccaaagacctcctagcctggccatcctcagtgcaggttctggtcaaggctgcacccttggtcctcccagtgctggcatccctttctttccatctagagatactcagactcccgggggcagctcacaggagttcagccccaccgggttggtgcattcgtcagcagttgtgaattgccatagagagccctttttccaatggctggtgc

SEQ ID NO: 9999 - DNA, 1102 bp, Homo sapiens
ttgtatttttagtagagacggggtttcacgttcttggccaggctggtcttgaactcctgacctcaagtgatccgcctgccttggcctcccaaagtgctgagattgcaggcatgagccaccacacccagctaaatgtctctttttgaatgattcaaataagtgatctgtgctcatcgtcctcttctacattctagatttgtttttatttattttttttccacaaaagagaaagcacaaaagtgtgtaacttatattctgacccatacttcttcccctgtcttgtcctcttaacattacttcccactggtttgatggaccattcttgcgatgtgagtgcctggagcttccactttgaaatagtgagggctgtggactgaagaacgaggttcccgttccaatgaggggtgtcttagagctccctcgcctgctgtgctcagtgtctcatgcacttgtttatttttcctcttgcagaggtggaatttaatgtatcagaagcatttgtacctctcaccaccccgagttctaatcactcattccacactggaaacgactctgactcggggaccctggagaggaagcggcctgctagcatggcggtgatggaaggagacttggtgaagaaggaaaggtatgatttgaccgttcacttccaaaccagcagtaaatatgttgttagacccgtggtatctggtatcgctcagtggacttgggatttgagagtggtcgccatccacccatgactgatggtgtccagatagtttctggaattctgctgtaggtcattccaagcactaatctcaccataaagtcagtgtgtagcttctcagttaacgtttcttccacgtgtattccagcttaacttggtggtgtgcttggtaagccctgcagtggaacggcatcatacacatgttaaaagtgacccagatgtacgtgagtggggggaaacagaaaggaaaataaattcaatagtgtggacttttgtccagaattgagtgtgagaacacccacctggcacagtgagttgagtgatttggcgtttaaggagacatatttctggtataatgtggccccacaatggaagccaaccactgaatttgatgtt

SEQ ID NO: 10000 - DNA, 1309 bp, Homo sapiens
gaccagaccctttcagttcttagtcacatcgtttacaggcggtcaccaaaacgtccatggtagttatctaaaaagagtgtattttctgaattacttggattttttttttttttttacaattgtcatgtattctttaaataatttatataagtaagaacaaagcagtttttattgtaggagggaaggtatacccttctgtctgctcctgcagcaaggctggtgttctctagccctgtctgctctctctggctgtgacatgggccctgcttcccagcaggacgaggccttcagacttttcagtccatttctcagcgtctacagttatctcgctgtcctagaacagtttcctcccattcgtcaccattcctttctcctgtctgcttccatgtttgggggccctgggaggagggtggcctgtgcccacctgccagcatcctccttccctccagcctggaagtttttcctgtttgtgcttccacatgctatggccatcctcatcacaccagagtgatactgcgtgctagcatggttataagtgttttccaagtaatagctcatttaatccttaaaacaacctaggaggtaggtcatatcagcacttagaaccatgttaacacacaacatcactcccattttacagacgaggatactgacagagagggcagggaaattgcctgagaccccacagtgggagaagagcaaagcctgtattcagacttgggcagcttggcaccagagagcatgttcctgactatgacaccatggccacctcacaccaggcaacgtgcatttctggtgtcaaaaaaaccccatagagagcttgcaggggtggaggggaaggaaaggagagagggaggagggagggatagagactgtggagttatatcactgcacgtgtactttgtatgatatcagctgcatgttcgcaagcaaactaaaaggaaacatgatatttatgtaacagggcccttaagtgttagccagctagctcatctgcatagcagaaagggagcctggccaaggctggactcgcagacataagataacatggaatgaacttaatgtctaatttaaaagatcttcagagtattttgtgaacacttggctttcacctgacttgagaatttaattcttgagtaatttgttatttcactgttcacacatctgtctgccacccacacacacaaagtgcatccctgagacagtcatttttattttaaagcacaaatctgtggactcatgttttaggcagtaccctacatttataatattttcaaggctcgttaggtagcaccctaatgcgttcctg

SEQ ID NO: 10001 - DNA, 1178 bp, Homo sapiens
gcctctgctcaatttctccaaggccatagatctggtaaaaaggctcagccaagggttagacccagaattgcctgatagtaaaaatagctcagacttatttagtgcttactgtgttaccaggctattacatgtattaacccatctaatcttcgtagcagttctgcagaggacgtttctatcattagtcccactttacagatcagaaaccaaagcctgtggggactaagttgctcaatctcacacgcctagtaagtgggagagccaggccctgaatcccggcattctagctccagaatccacacctcttaccactgcccagtcctgatgctgtgactcgtgttcttcttctcacctttgtagtaaacagcatgaagaatgacttttaaaaatgatagcaaatttatatttgttaatgtaaattagtacaagacccaggacgttgcttctgatgtgcttggggttgactagtgtcatttacttccttttcagttcgttcccacatgcagggcagcacaaggagaatgggcgtcatgactgatgtccaccggcgcttcctccagttgctgatgacccatggcgtgctagaggaatgggacgtgaagcgcttgcagacgcactgctacaaggtccatgaccgtgagtaccgtttccctgttcccagggcgctctggtgctgtgttgatcagggaccagtgacataggtacaataccatgtaacttgttaaccggtactcctgagctgagcattcaagcctcttcacaatcttacacgggcccatctttctaatttcatcttccacttttattttttttccaagtaaacctgacatttagccctgtggataaaaacttagagtctaaagctgtatagttgtggttcacaccaagcctccaggacctgccccagcctcagtttctgtatctgtaaagtgaggatagtaattgtacttaacacataagtaagtgcatggttcagggaattgagagacatgatatgtacaagacagtggcgcagagacagtgcctagtggggtattgatggacacagggcagcttggctgggtgcggtggctcacgctgttatccctgcactctgggaatcaaggtgggaggatagcttgaggccaggagtttgggaccagcctgggcaatgtagcaagaccctctctattttttta

SEQ ID NO: 10002 - DNA, 1143 bp, Homo sapiens
ccccactcgtgggccccgggtggctgttcagtctctggtttagtaacagaaacgtctgtttcgaggaaagtgtgcctggaactctgcacatggcgtggagcagagcttcagggtcacgctcccgtgagttttgccacagcctggaggtggtttctgcctgggctgccagtagagctggcaagtccaggagtcacaacccttgtccctctcctgccaatgtgggtgggcccactgaggcctcagttacagctacatcagagcggacaccacgtcctggttccacccagctggcggtcaagggcccctctgtccagacaggagagaagcagggagtttggaaagcagagagcaagaggtggctggtctcagccctgtgacctgggccaggcctaggacgcccctgagcctcagtgttctgtctggacgagctgccctcctgcccccaccaagccctgatgtcaagccctctccctgcagggactgtgagagtgtctgcttcatcggccggccgtggcgtgtcgtggatggccacctgaaccttcctgtatgcaagggtatgatggaggccatgctgtaccacatcatgaccaggcctggcatccccgagagctccctgctgcgccactaccagggggtcctgcagcccgtcgccgtgctggagttgctccaggtgtggggccttcctgggttcagcagggtgtggaggcggctgggtgcactcagtggcccggctgtgatgttcaggccccaggcaacatgcagtaccaccatactgcttgcctgcacctcctcccccagcttgtcctgggctcctgcctctcaggctgtccctcagtgtccttcaccagctccatgctgctgaccaggctggaagatggggtgcccggggtgcttgtctctgatgctttctctgtgccaggggtcactaactcatgagtccgccgggccccacgggtcaagcagctgccccctggtgcagctgcttcctgcttggctgactcccatgtgtgcctggggcctccagctcctctggcagctaggagcttgaagttgagtgtcaaattccccatgagccaaacaaaaccccacctggaagccagtcttggctcacaggaagctgggatttatcccgcgctgcaggcc

SEQ ID NO: 10003 - DNA, 1209 bp, Homo sapiens
ggtctggccacgtgctaggcattggccagatacagacgggcaggggtcagcagtgccttctgggagcttgtgggatgggagttgcagatgagtgactggggattataggccggtgtctaaggtgtcctctgctggtgcctcccaggtgttatgggaatcagccaaagagaaggacgcagcacagcggggcaggggaggggcagggaagagaagggaggactgttcctgagggcctcgcaacagaactggggcttcctggggaaatgggtgttttctgggctgagagacgggcaaaaggaacagtccccacagagatacagctatgtgacaaggggtgagcgcggtgcacgggaaggtgggaaaggggatggatctggggcagccatccacaccagccttggtaatgaagcatagccagttgctggggccactgctgaagcccagccacagaggcctcttgagggaggggagaggctgcagtagcaactggctggcctatgctcaggtatccaggtcacaattcccttctagcttggggaaggacggcagcctggaggatgacgaggatgaagaggatgacttggacgaaggtgtagggggcaagcgccggagcatggaggtgaaacctgcgcaagcctcccacaccaactacctgctgatgaggggctactactcccccggcatcgtcagcacccgcaacctcaaccccaacgacagcattgtggtcaactcctgccagatgaagttccagctccgctgcacccctgtgcccgcccggctcaggcccgctggtgagtgctcctgctggtgctgtgggagggcctggcctcgccatcatccaggaagaccctgaggcctggcctgggacctagaccttcaggctccccaggccaggcgtgcagccacagaacacacagaaaaacacaccccatccttgcagccaactcaagggatgccttccccaggtgcctgtgctgtgcccacacctctgtgggaaagctccccgcaccgcctcttttagtcacagctgtgctgcaggcaccagcagtcactcaggtgggctcacaaggaagagcagagcacttccgcttccccaccccgcccactctccacgggcggccctgtcactgcccgggctctagtctcctggtgcttagctctgcaactctaaagtgtgtgctcttaggaaacttttaggtattatctttt

SEQ ID NO: 10004 - DNA, 1194 bp, Homo sapiens
caacaccgtggagaagccaagcttcatcagtgaacggagaacgataaagcaggagtcaggcagggcaggcgtccggccgtcctcctctggaagtgcctgggaggcctgctctgaagccccatctaaaggcagccaagatggtgtcacctgggaggctgaagtggagcttgccacggagacaggtgagaggcccctgccactcctgcacctggggcgggcaggcccagtagtaggatccagggagaaacatgatagttccttttccttatataaactggctgcagcctctgatccaaatggaaacataatccacacttcctgaacctgcaggctttcttcctcatcttccttcctgcctgacaagtagagttttcctcaaattaggggtaaagacaccaagacctcctgggagatgacgttaccatgtgtcaccatggtgactggtatcctggctgccgggggtaaccgtgcgtttttttcctagtgtatgtcgacgatgcctcgtggatgcgctacatccccccaatcccagtccacagggacttcggctttggctgggctctcgtcagcgacatcctcctctgccttcccctctccatcttcatccagattgtgcaagtcagctacaaggtattggtgacaggagccattatcacaggaattgcccctcagctctgggctggagggcctacactcacctgggcaagggaggatacttgaagacccggtgttgcccagatgaatggattggtggatagatggataggcagatgctcattcaagggaaaatattttaaggatttgttcgagatagattagactagattagattagaaagatgattgggtggatgggtgggtggttggcgggtaaatactttaaagactcgctcttctaaatggatctattggtaggtaggtagacagaaagacaattatattacaacaataaaacgtggttttttttgttttttttttttgttttttttttatgagacagagtcttgctctgtcgtctaggctggagtgcagtggcgcgatctctgctcactgcaacctctgcctcccagtttcacgccattctccttcctcagcctcccaagtagctgggactacaggcacccaccaccacgccaggctaattttttatatttttaatagagacggggttttgccatgttagccaggatggtct

SEQ ID NO: 10005 - DNA, 1157 bp, Homo sapiens
ctttgtgtgcccagcatggtattctgtttggtttttaattttatttcattgctaatatttaaaaacctggatttctagcttttcttgaaaagtcacaagatctagctgcactgagaccaattttttacagggtgatataggccagagttaccctcagctggccatgtaccacccggttccacacaccgtgagtttgtgttcgtgttgtgttcgtgtgtgctccctgccctcctgattgggtcccggcaggctatatgtgattgtgcctctgctcacccagtgctccgacctcagtttcttcactctgcactgcacttcagcctcaacatgctgggctcctttttgtctcaaggcaatcctcgtgctgttccttcgccaagaatattctgtccacaaatcttcacgtcgccacatcattcagacttcaacctgactcctctggaagtgtcctccattgcccagacaccatcgtagtactctttatggcaccaaaaatggttttaagtgtttgtttatgtcactgtttcctcactagattatacgttgctcaaaggcagggactctatccttcttgttcaccgctatgtctctcagttctataataatatgcctggcacaaagccggcttctagaaatacatgtttgaagttgtaacccctgacccatgttatagaatctgaactccccagcacggcatcagagggccactggggatgtaggcgctgctggcctctcgagctttccttccttccttctgcttcctagctggctaccacactccagactttgtagccgtgctgcacctcttacctccaggagcaggcatgcttcttcatgcctctgtaaccgtgcagcttctgcatccttccccttaattctctcattcacacagctcactgctaatacaagcgtcacctctttgcctggtgcagtggctcacacctgtaatcccagcattttgggaggccgaggggggtggatcacttgaggccaggagttcaagaccagcctggccaagatggcaaaaccccatctctactaaaagtacaaaaattagcctggcatggtggcaagtgtctgtaatcccagctacttgggaggctgaggcaggagaatcacttgagctccagaggcagaggttgcagtgagctgagatc

SEQ ID NO: 10006 - DNA, 1171 bp, Homo sapiens
aggccgtctctttgtgaaagtcctttgatttatagagtatgtagcggttcccacagaaatgagaccaagcctagtttcacacccccagcactgtggttttcaaaagcttgcatttctagcatttcacattttcttttctttttttggtatcttcgacttccaaaatttcatacatcagtctgatgctatgcatcttcactttgttaaatcttatggtttcaggatcttgacattggtgccaagaacgtgaagctttacgtcaacagaaacctcatcttcaatggcaagttagacaaaggagatagggaggccccagctgaccacagcatcctggttgaccagaagaacgagaagagcgagcaactagaggaggccatgaacgctcactcggaagaaagcaaaggcacccatgagatggctggtgccagcggggacaaggagcttggtctcggttgctcaccgccagctgaaacattagcggatgcaaagctttcttcacaaggaaatgtgtctggcaaaagaaagaattctactaattgcaggaaagacagtttgtcccagttagaggaatatttgagactgtcggcagtccccacttcgatgggtgacatgcccagtgctcctgccacttccccacctgtgaagtgccctcctgtccatgaggagccctctctcatccaacaactggaaaacctcatgggcagaaaaatctgtgagccacccgggaaaaccccatcctggttacaaccttctcccaccggcaaggacaggaagcagggaggcaggaagccaaaacccctctggcttagtcccgagaagcccctggcctggaagggcaggctcccatcagacgatgtcatcggtgagggtcctggagagaccgaggccagggataaaggcctacggcatgagccagggtgggggaccagccggagtgtcaacaccaaggagagaccccagagggcaaccaccaaagtccacagtgatgactcagacatctttaaccagccccccaacagagagcgccctgctagtgggaggaggggctcaaggaaggatgctggcagcagtagtcatggggacgaccagccagccagcagaggtaagctccaaagagcagcccgacttgggcatcatcatcccagcccctctaattggcatgaagccagtt

SEQ ID NO: 10007 - DNA, 1159 bp, Homo sapiens
tgtagataatttggaaatgcagaaaaatagagggaaaaaaatcatccataatctacccactctatcctccccctaaaacaagtggtaccaataagcatattttggtgacacttcttcccgcctgtcttctgttaatagatgaacattcacgatgtattctgtatgtatatttagtacaaccatgtcatgtttaaaacatcctgaatatttatcattaaatatgcctctaagcatggtttttattgtatatattgcattgtattacctcctctgggttggatatttatattgttttcaaagtttttgacaccttcaataaggctttagttaatatgcttgtatataaatctttatgcatatctcagattatttccttggcataaaattgaaagtctggtcttgattcttttttgtatatgaaaaagtctgcccttacgctctttgctggtaccagccttgtctgttttgtctgtcttagttcataagctgaatgttcttgtttacctgcctctttgccaacaggttggtcaaagtcactctgtacggatctcagataaaattgtacaacattgaaactgctgtgccatcagtattgaaacctgacctcattgatgtgtaagtctagagtttgatgtttgtgcatttttaggaaagaccttgcccccaatctccaaataatttgattgagaaaaaggaacagtagtggctgccatgaatcagggaaaaactcttaaactgcaaacctagaaagagagagagatttttttgactatatgtctggggcagaggcggttggagaaagtggaattaggtaagtgagagctgggatggagattctatggagtaggcatttcaggaggaaagaacagtacaggctgagacagtcacacaggcaggaggtggctactccatgtagtgcaagaagagactggataggtgtgttgggactaatgggaaacacctcagatgccatcagtctttcctgtagatcattgactaaaactgtaggatactgtaggatgcagaagaatgcttggggaacacatttctcagagattctgattttagcagaatggcataaggccataaggcttgggtatttgcgtattaaacaagaaccccaggttattttgaagcaggacatctagagaccacactc

SEQ ID NO: 10008 - DNA, 1175 bp, Homo sapiens
tttggtgcccaactttgtatgtggtgttagggatttttatttgtttatttatttaatggtcatgtatcatgcttttcaaaagcaaggtcatgatttgggggaacagtagcaagaaaacaaaaacttgagtggatttggggttttgcagccagagaataatcccatcttctcttcacttatgtctcctgggaaactgctgttgtacaaatctcactaaaactaaatttgagtcaaaacactaaagattgtatccagatccccctcactaagaatcataatcaattatcttatttttgctgtactgttaaaatttcctaattagtgtttaactttgagcatatagattttatttttttatttcataggtaactaaactgatacatatatgtatacatatatatatatatttttttgaaggagaattacttaaagtcatttgtaagagatttgatgctggatagcttaaaagcctttcttattttcaggtgacttactgagtaacctgttgcagagtcccagttcagccaaactgttgaatcagccaattcccatccttgatgtggagagtgagtatatctgttccctggctttggagtgcctggcccatctcttcagttggattcctctgtctgccagcatcaccccatccctccttaccaccatcttccactttgcacgatttggctgtgacatccgggccagaaagatggcgtcagttaacggcagcagccagaactgtgtctcgggtcaggagcgcggccggctgggggtcctggccatgtcctgcatcaatgaactcatgtccaagaactgtgtgcctatggaatttgaggagtatttactgcgtatgttccagcagactttctacctcctgcagaaaatcaccaaggataacaatgcccacacagtgaagagcaggctagaagagctcgatgagaggtaatgaaaccaagtgtggagctggtgtgccccaagaaagggccctgactgtttaccatgctgtgctgcatggcatctgtaatcctctttgatttcagaatatggggctcctggtgaggaacagaaaggtaggtgtgtgccagtaagtctgagattagctggaagggcttgggtggttaagggaagtgactgagtttgaaaaatgcttgtgccttgtgtaggtttgttgtcttttc

SEQ ID NO: 10009 - DNA, 1250 bp, Homo sapiens
taaaaagagctacctaaatatcctctaagtgatgtttcttttttttttttttttttgagacagagttttgctctcggtgcccaggctggaatgcaatggcacgatctcggctcaccacaacctccacctcctgggttcaaacgattctcctgcctcagcctcccaagtagctgggattgtaggcatgcaccaccacacccggctaattttgtatttttagtagagacgggatttctccatgttggtcaggctggtctctaactcccgacctcaggtgatccgcccgtctcagccacccaaagtgctgggattacaggcgtgagccattggagctggcctctaagtgatgtttctgaagtgttgatttatgttcatgtaagattaaacacacacagatgcttcatagctttaatgctactgagtcctctttgtactttattagtccaacactctgctcagaacatgctttttcctggcagttgatccagtcccctgtgacaaccccccttgggctgatcatgttgaagacaacttcagaagagctggcttgtccccgtgaggacctcagtgtggctcggaaggaggagttgcggaagctgctactggaccaggtgcagacagtgcttgggctactgacaggtgagcagtatggtagtgcccagagatagaggcctgcccgcaggcacccagagttcaggccttggcactcagcagctttgagcagttgtttgcgctgtttctgagatagcatgaaaatgggaagctgcgttcccaacacctatagcccagggtctagcacacagtaggactacaaaatagatttgtaccttattttcctcgtagtctttcacgaagtggtcttcactgtaactgtgatcagtgaggtagagtccaggtcataggagtatacctacagtgccgatcactgcatggtaagttaggtgggtggcaagcactctatttaaaataatttgaattgaagatcaggagaagttggagtaggaggatatgaaaatttcccgttctgggtaaggaagtgagacatggtgtggagccagccccttgtgcactaggttgtagttgtatgtagcattttgtcttttctgtttgatgagagcctcatgacaaggtgtaaagggtaagaataaacagaaagcaaaccacaacatgagacaggaaggtaggaggagaggggagtgccctgggtgactggggtggctgctgtgtgctgctgtgatacctgtttgcta

SEQ ID NO: 10010 - DNA, 1457 bp, Homo sapiens
gttccgcttcctcaagcacgagctcacgtccgagctgcgccgccggccctcgcaccgcgcgcgcaagccccccggggaccgcccgcccgccgccgggccactgcgcctcgaggcgcctgggccgctcaagcggacggtgctgaccgagagcggcagcggctcccggcccgcgccccccgccgtcgggtcggtgcccttgcccgtgccggtgccggtgccagtgcccgtgccggtgcctgtgcccgagcccggcctagctccccaggggccccccggccggaccgacggccgcgcggacaagagcaaagggcaggtggtgctggccacggccatcgagatctgcgtctgagtcgcctccgccgccctcggacccgggagcagcccgggcccgccccgagccggtgcccggtgcggcggtagggaatggagccacctcgccgcggggcagggggcgcagcggtagactaggcaggacgcggcccggcacctggtccgtccccggcgggctggtgagggggccaccaaagacccctagcgcggcctggtgagcgggggcttggcccagaggagccaagccgcacagacccgagaattcggaggccaccacacaacacacacacacacacacacacacacacacacacacacacacacacacacacacacgccaggagcaagggagctttcgggccacactcccagacgcctccctgagccctggaacccggactcgttgctcctggccttccataccccctggcagatcatcctgcggtcccaccccagatcccctcctcctcgccatcccattctgccccctccccaccctgggtacagaaagggactgaagtgttgggcagagagggggcttaaggcccctgggcacaggctgggatcagggcagtgagcgaagggcagctgtgtcctgccctcccttctggaggctggaggggagaggccaagcccttggaaaatgtagcaaatgtctggatgtcgcataagtgcgtgtatgtgcgggacaggccccgagaagctagtgactcctgcacacccccattgcacaaatgaaatcacagcccaggagggagggtagcttggcactggctgagaaatagagctctctccccgcccctccccctaaccacaagggattgtcctgacaacttgtggggatagaagggctcacagggcaggggtctcagctgcccccatccttagggcaggggagttagtgtggagccgagagcaggtcccagctccccctgccagccgcactgtcccaggcccagggacctctgccgggtcctcccagcccttgccacacagcctagacgtagtagcctgggcttccagcaggtggcgagctggttcgtgctggaaatttctcctgggtttcttggggtcaaacatgccaacctccaagaccccatcctcacgtctcccacttttctggcgct

SEQ ID NO: 10011 - DNA, 1119 bp, Homo sapiens
ctctctttctctctctccctctctctgttaagatcctgttcgggagtttccccagccgttgtagtatctagtatgttagagttgggaggggaccatagttatgtagcccagccccctcattcccagaggcacccagagggccagcctccagcctgaccccagagcagaaccggaacaccaggttggggccctggtgctgccacctcctctgctggtcgggctgggaccctttgccccttaggagaggtgttggtcacagatgtttacctcagtttatgtcactgtcgaagaaacaaaaaataatagcaaaaaataacactgtagacatgaagacttagaagacaaaaaaaaaaaaatcacacaaaaaatctcccttgttgcgattcttctgtgaaggtacagtgtgtatgtgtgtatgtgtgtatgtgtgtgcgtgtctctgtcccagaccctgtgtcccccacactgccccctgtccttcggtgcttcccagagacccctctgagctggcctgtggggcacgggaagccccctggatgggaggcggggccacaggtcggctagagggtctccaccaggcccactgaacagaaccccacggctgccagaatgttccctgagcccacactgtggccagtgggacagtcctggtggctgacatcagcgtccatgcttggctcagggcctggggcggggtcctgggtagagtcctagccccagagccccagcccctcatgtcttgccgcccttcctccatgtgtttgtaaatactctggcatcctttggccctgagaaggtttttaaatgtgttatttacttctctaaacatgacgattgctataaaaataaacaaaagtttagaaaaatgaccactgggtggctgtcttttctcaagtttggggtggagagggcggtgggggtgggggcacacaggtactctagaaactgaaaacttgggctgggcggagcggctcacatctataatcccagcactttgggaggccgaggcgggcggatcacctgaggtcaggagttcaagactagcctggccaacatggtgaaacccccatctctactaaaaatataaaattagctgggcgcgatggcgcacgcctgtac

SEQ ID NO: 10012 - DNA, 1182 bp, Homo sapiens
gtagttatatgaacatttgagcctccaccactgcgcagactgccttcctggctccgtcctctgctttatttttcttctcagcatgagtcaccatccttgtagtgcagctctcttgcccaccacaccccacccctagacataagctccatgcagactggggacttgtctgttttgctctccctccccagcctagtgctcagcacatagtaggcacttgaagtagatttgtttagttttgtttttgttttttatctttagcgatggggtatctccatgttgctcaggcccatcttgaacccctgggctcaagtgatcctcccaccttagcctcccaaagtgctgggattacaggcgtgagccactgcacccggcttagttatggaataaatgaagacttgtcttgcagctgtcatctctgagtgcattatgaccctttgcccccagatcctttacaaccgcaccatggtgcagctgggcatctgtgccttccgccaaggcctgaccaaggacgcacacaacgccctgctggacatccagtcgagtggccgagccaaggagcttctgggccagggcctgctgctgcgcagcctgcaggagcgcaaccaggagcaggagaaggtggagcggcgccgtcaggtccccttccacctgcacatcaacctggagctgctggagtgtgtctacctggtgtctgccatgctcctggagatcccctacatggccgcccatgagagcgatgcccgccgacgcatgatcagcaagcagttccaccaccagctgcgcgtgggcgagcgacagcccctgctgggtgagtgtggagctccagggttcagcaggctgccttgctccctgattacacataaggattaagagaagtgaagggagtaactctcccaccactcgactccatctgatttaatgacacctcctctgcctggcactgtgctaagtgttttacaaataattatttaatctgcattagtaataaccctatgccggtaggtactagtaataccctttttcccagtggagaaactgaggcacagagtagttaagtgacttgcccgagtttaatgcagctcatgtgtacctctgatctttctttcccttttcttcccttcatgtacattatattccagccaaaccaactatcatagagccttatcgttcaagaggctaacg

SEQ ID NO: 10013 - DNA, 1182 bp, Homo sapiens; identical to SEQ ID NO: 10012

SEQ ID NO: 10014 - DNA, 1141 bp, Homo sapiens
ctagacttttctgacgggtgcagaagagggacgggttgattggaatgagtggggacagatgggaaagcctggctgcccagctgagacaagggtgggtgctctccctgccagagtacgtggagcacttgaaggatgaggcccaggtgtgtgccatcatcgagcgtgtgcagcgctacctggaggagaagggcactaccgaggaggtctgccgcatctacctgctgcgcatcctgcacacctactacaagtttgattacaaggcccatcagcgacagctgaccccgcctgagggctcctcaaaggtgagcacgtggcagtcatggcagaggggaatgggtgtgtccacctgtcctccacttctgtcaggacttgacagcaaatctgttactctctagacttccgcaggtggagcagggagggaaactgaggtattagaatgagactggatagagtctcatctttagttgctagagcctgtgccttttaaagctggatctcctttgcaaataacctcccttcctccccagtctgagcaagaccaggcagaaaatgagggcgaggactcggctgtgttgatggagagactgtgcaagtacatctacgccaaggaccgcacagaccggatccgcacatgtgccatcctctgccacatctaccaccatgctctgcactcgcgctggtaccaggcccgcgacctcatgctcatgagccacttgcaggacaacattcagcatgcagacccgccagtgcaggtaggatggggaggccttggaggtgaaggagtgccaggcccctggcctcttggcaaactggcttaaccagaacagccacctgtctggccggtgcaaatttaagtagacacttggtctttcccagttgccagcatcctgcagtcctcctgcatgtaaacacataatttcgtgtcaaaaaaaaaaattatccaggcttggtagtgcttgagcccaagaggcagaggttccagtgagccgaggttgtgccactgcactccagcctgggtaatggagcaagactgttcaaaaaaaaaaaaaagctgtgtctggaagtgtagatcatgtaaaagtatatttgaggcaactaggaaatgtttatgtgtagagcacctggtgaacctgtctggggg

SEQ ID NO: 10015 - DNA, 1141 bp, Homo sapiens; identical to SEQ ID NO: 10014

SEQ ID NO: 10016 - DNA, 1197 bp, Homo sapiens
tccgaaatgttgacttcaactatgctactaaaggtattgtcctaggctgttacctcagacctgctctgtgtgcatagaggacagagggtagtttgtgtgcaggtggaacatggtgatgtgtttggtttgtttttttgtttttgtttgtttgttttgctttaatgccttttttttcctgagcgaagtgggtggatttttcttcttaaaaatatgtcttgatgtctaatatataatgcgatgaattcctgtctgtgttgtggttcttcatattttctttgcttggtttttaacttcttttttctttggaatcatagtactgatagactttttatactcttcttctcttgcctccccaccccctggccatcctaacacacgggcacacgtactctggacttcttaaactttgttcctgaactacttacggagagtggggttgggggatattggaaagaagtctgtgaaatatagcctgactcctgatcttcacctctgcccccacagacaagttcaccgattcagccattgccatgaactcgaaagtgaatggggaacacaaagagaaggtgcttcagcgctgggaggggggtgacagcaacagcgacgactatgacctcgagtctgacatggtatagcctccttccctgagaacttgggagctggacagacagaatgggttgttgacagtgaggttcatttgagtggggagggaaatatttactgttgcccattgatggtagtcagataacaaatagaaaggtatagaaaatagcaaagtaaaaatatctattcttagctgggtgcagtggctcatgtttgtaatcccagcactttgggaggccaaggccggtgggtcacttgaggcaaggatttcgagaccagtctgggcaacatggtgaaaccctgtctcaacaagatatataaaagctatcaaggtttggtggcatgtacctgtagtcccagctacttgggaggctgaagtggaaggatcacttgagcccagggaggtcgaggctacagtgagctgtgatcataccactgcactccagcctgggtggaccgtgtcacacgcaacaaaaccaaaacatcaacttactctcttactatctataattaaccactcctagcatttgcatcacgttatttttcaacataacaaaaagtatagattaatgtgtaggcccatttctcttccca

SEQ ID NO: 10017 - DNA, 1191 bp, Homo sapiens
gctaactttttaaaacaggccgaggtaggcagattgcttgagcccaggagtttaagaccagcctgggcaacacggcaaaacccttctgcaaaaaataaaaagattagctaggcttgatggcgtgcacctgtactcccagctacttgcgaggctgaggtggggggaatcgcttgagcccaggaggctgaggttgcagtgagatggcatcacaccattgcactccagtctggggaacagagcgataccctgtctctaaataaataaatcaatagaagccatagaaaatttttagtttcttttgaattacaggaaattctgtcaactgagcttgccttgctgcgtagcttgagttgactggaacagaatccctgccactcctttaagcattccagttgtcgatgatgcccatgaggccatttacctgcttgtgttacctgccttgagcttctagacatttaagttggtgactctggttgtatagtgtgtaaactttcttgctgttttgagtaaggcccttgtactcactgctgttgaccagcagtaaccatcctacagctcccccttttcttccagtgggccggatgtatcccccgcgttctcccaagtctgctgcccctgccccaatctcagcttcctgtccagagcctcccatcggctcggcagtgccaacctcttcagcctccatccctgtgacctcatcagtctcagatcctggagtgggctccatttctccagcttctccaaagatctccctggcccccacagatggtaagagctaggtgtttgagtgctgtgaatgcatatttagtgtgatttgtggttctggacagaaggacctttaggcatttctctttacttgaacagtaaaagaactctctaccaaggaacctgggagaactctggagccccaggagctggctcggatagctgggaaaggtgagggtggttttttttctgctgaggattaatgctcctttgtctgggggagagtatttcagttaggaagtttgttggaattcagaggcaaacaatgtctatcagtccttggattataatttcacttctgtgatcctcaagagtttctcttttttctttgctttcttgtcctctgttcttttggcactgtgtagccaccttagagaaagaatgttttgtattttcttctttttgactgttttctcatagtccctg

SEQ ID NO: 10018 - DNA, 1181 bp, Homo sapiens
gtgcagaatatgtttggtatgcagcatttcacgaatgttaattattaccactctaggcatggccaggagtagaggggaaaatacaaaataaaattgtcctcccttgtttttgcagaataaatccaccagtaccccaacttctccggggccccggactcattcaactccctccatcccggtgctgacagcaggccagagtgggctatacagcccccagtacatctcctacatacctcagatccacatgggaccagctgtgcaggtatgcagagagactggccgggcccagggttagcggggtgggatttggttgcgctggttgagggaccaggtcaggcctgtctgggcattcgtgagcgagtcattcagcctcatctgtgtcctcatccccaggcacctcagatgtatccatatcctgtatccaattcagtgcctgggcagcagggcaagtaccggggagcaaaaggtgagcagggctgggaggggcaggcggcgaggctgccaagggcctactggcaggtggagcttgagctctcctctcctcctcctcttccaggctcccttcctccgcagcgctcggaccaacaccagccagcctcagccccgccgatgatgcaggccgccgcggctgctggcccgcctctggtggctgccacgccctattcttcctacatcccctacaaccctcagcagttcccaggccagccagccatgatgcagcccatggcccactacccctcacaggtgactgcggcccaggagggcagtgaggatccagggcccctgctagggatcccatcttctccagagacttgggagctggctaggggtggcaggcagtgttgtaggtgggatcggccctctgtggtattggcggtgtcagacttgggcttgagccctggctctggtggtacctgtaacaaggcattggacatctgtatctctgaagtgtagagaaaatagtgtctgctgggtgggatcgttatgaatgttgaatcaatagggtgattgtgaggaggcccaagcggtgctgtgcacgcagtgactggcaggaggacaccttcccagctggcggctgtgccaaccactcctctctctgtcccgccagccggtgtttgcccccatgcttcagagcaacccacgcatgctgacgtcgggcagccatccccaggccatcgtgt

SEQ ID NO: 10019 - DNA, 1617 bp, Homo sapiens
cttcccggctacttttttgttttccacaggcccatgtccaaactggaatcacagcagccccgccccctcaccctggggctccccacccgccccaggtgatgctgctgcacccaccccagagtcatggggggcccccccaaggcgcggtgccccagagtggggtgcctgcactctcagcttccacaccctcaccctacccctacatcggacacccccaaggtgagcagcctggccaggcgcctggatttccaggaggagccgatgacaggattcgtgagttctcattagctgggggaatttggcatggaagagctgaggggctgcaggtggggcaggatgcacgggttctgggtggggagtgaggggtcttggaggcagggctgtcccacagggcgcccgccgacctgcacctgtctgtgaagtatgtagggtgggcagaagccacagtcgccgccgccaggggcttgctcctggctctgtcctttgcttccctccgtcctcgctcagttgtgatccagcagcccccctccccactgcctccccagctctcagtgaccccgactgtctcctgacttagccgaggtaaggtcagtgcagcagacagggccagactggggtgtggggggctgagctgggcacatgagtgagggctctggcttactgggaaacagcgattgacctgtgcttctgacagcccccgagacaccttgaggaggccgctccttcccagacacacccccacgcccccactggacggcattggaggaagggacagctgcttgggttctaatgctcctgctctcttctctttcccctccaaccagttcaatctcatccctcccagcagctccccttccaccccccggggaactgaagattgtcctggccgcgacctgagacctccatgagtggagggaagagtgatctatgtctcttcccccagcagctcggaccactcccagccccccatccccccgttccccaggggagctggggaattcctgccaagcaccttgaatgggaggggcctcacagagggcagggccagggtccagcaggggtggggggttcctgctctgcccctgcccgtccccacccagtcttgccctcccatcctctcatctattcccccgctggagacggaagatcttttattttctattatttataacttcagacttgggccccctgttctttctttcccattaacttgagtgacctgtgtgagagacagacagatgccccacgaggatggctggacaaggacttttactttttattacataaaaatattaaaaaataaataaaaaaaataaaattttaaactaacttaacctgcctggagtttcctccttggagactagagtggggtgacagctgtcagtcttttgtggcattgataggtgctgcattgtgacctgttccttcacctccatgtaaaaatcgtgtccagtggccagccatggtggctcacgcctgtaatcccagcactttgggaggctgaggtgggcagatcaccaggtcaagagatggagaccatcctggccaacttggtgaaaccccatctgtactaaaaatacaaaaattagccagatgtggtgggacatgcctgtaatt

SEQ ID NO: 10020 - DNA, 1158 bp, Homo sapiens
tttgcctcctacctcacctcccccatcccgccctcagcacctgcgtttgtcgctgaacgaggagggtcagtgccgggtccagcacctgtggttccagtccattttcgatatgctcgagcacttccgggtgcaccccatccctttggagtcgggaggctccagtgatgttgtccttgtcagctatgtcccatcctcccagcgacagcagggtgagcagagcaggtctgcaggggaggaggtgcccgtgcacccaagaagtgaggtgtgtgtgccagaaagatggggcggggaggggggactatcacaaggagaagctttgcttgggagagcagggtagaggaggctgttgtgcctcggggtttggaagggaaagaaatgcgctgataggacacaggaaggcagaaggctcctggccggagccggggcggcagctgagaggtgggcgggcgcatccccattccatcggatcctctgttccattgtctgtctgtctcctggacccatcctggcctcgtctttgccctccgtcgcagcctggccttgggcctgcccttcccggggacactcggtctgatccccttccctcctccctcaatgtctcatgtccctgtctgatctctccctttcccctgccccaccgtcccatctgtccccacgttgcccctccccccaggccgggagcaggctgggagccatgcgggggtgtgcgagggagatggatgccaccccgatgcctcctgcaccctcatgcccttcggagcgagtgactgtgtgtaagtgtggtcctcctctcaccaccgcccatgatccatcttccatggatggggggttgctcaggagatgggatgtggggagacagccacgctcctggggggctgagtgaaggggaggccacggcaggagctcacctgcctccacaatcagtctgttttcttaccattcctatccagaaccgaccacctcccatgacccaccccagccccctgaacccccttcatggacagatcccccacagcctggggcagaagaggcgtcgagggcgccagaagtggcggcagcagcagccgcagcagccaaagagaggcaagagaaagagaaagcgggcggtggaggggtcccggaagagctggtccccgtggttgagctggtccccgtggt

SEQ ID NO: 10021 - DNA, 1865 bp, Homo sapiens
ggcccccgtcctctacctgagcaacttggagcccagagggatgacaggattcgtcccagctcccagagaggagcctggctgggctggcttctttgtcctctctcctttccccgcatggggccctgactttattgtttccgcccctgccgccatcctccctgtcccaagttcctcgtctatccctacgggatccccgccccctttcatgttctgacgtccattttcttttgtctccatccaggattcccctctaaagaccctcatgtcccactatgaggaggccatgggactgtcgggacggaagctctccttcttctttgatgggacaaagctttcaggcagggagctgccagctgacctgggcatggaatctggggacctcattgaggtctggggctgacaccccactccctgtttgacggcccagcctggacttggggagaatgactttcccttttttgccccataagggctagcataagctgaggtagaacttatctttaagctgcagcaaaatcaaggagtgacttttgtcccctctcctgttgaccctggtttagagccgttaaccacttggtgagttatgtgggtgttgttgccctgggtggcctgtggctccgtccacaagtcatgctgagttttgcagcctctgtgacttggagatgtcccttcacccctcccctttcaccaccatcctcttttcctcatggaaatgtctgctttatgaaactatgcacatattgaaagtgagttgaaacaaatgagggttgggtaggagcttccaggcctgggatttacaccacgcctagcccagcagaggccttagtcccatttggggcttgggagtgacatttgcttgaggcttatacactggtgtggttgcctggcttgcaggaaatgaccaagctcacacatgctggctgaagcgtaagcagacaactgaggtactcttttgaaggatgaaggtggtggattctcagccctgggggtcttcctcacctgaggacccttcagagccaccctttctagtttgcatttcctggtgcacacatttaaggcataacagcacattcatccctttggtttgggatctcaggaatacagtcccatgcaaagattctctggttttatggcttttttccctttctttacaccatcctctcccataagcacccatgtctttgaatatgaatgtatttgtaaaataccacgtttcatgtgtgaatatgtgcttttactgtacatagtgctattgtgcaataggtcttatgctgttttcactcaatgtgtgctaagatctagccccattgactcttctagaaatgcagtattgctttgacctgccatgtggcactccacaatgtcaattgcagtttacacacattgcctaaagtgggggacacctgggtgcccctgaccccttggcaccggatacaggccacgataaacatcctttcgtgtgttcccttctgtgcttgtgtggcatgtgtacccaggatgggcctataggtcacagaggtcagtttctctttggttttccagattttctttagaacggtgactgaccctcctacttgaggccgcccttttctccttatccttgccagcacttgtattgccagactacctaatttttgccagtctcatgggtagatagtggtgcagtgctttaacatacattcatctgatcagcattaatttggggaattttttcacttagcctttctggtttcccttcctgtgcattgcccattttctcatggagtttcttatcttttttggtttattctcaggagttgcttgtacattcttgggcaattgcagataattccaagaatgcatatttgggctgggtatggaggttc

SEQ ID NO: 10022 - DNA, 1085 bp, Homo sapiens
gtatctaggggtatccgtcactgaacagaaattcttaattttggctaggcgtgatggctcaggtctgtaatcccagcactttcggtggccggggtgggtggatcacttgaggccaggagttcaagaccaccctgaccaacttggtgaaatcccatctctactaaaaatacaaaaattagctgggtgcagtggcgcatgcttgtaatcccagctactcaggaggcagaggcaggagaatcacttgaacccgggaggtggaggctgcagtgaacagagacagtgccactgcacatcagcctgagtgacagagagactttgtctcaaaaaaaaaagaaaattttaattttaatgtagacagtatgaattatcttgttctgcagttggttgctttttgattgcttatttaatagagttgttaagatattttacatcttctcctgttagctgttcagcttttcctttcatattgagaacactacacagtgctgaagtccagctggtacacaccggggtgacaccttggctgcatctgttctcaacagtcagacacttcttctaattggttgatgctgggctgtactggttgctaaatattgcacatcattttaaaactatttgagatgcacttttgtactcaggaggccaaggcaggaggattgcttgagcccaggagtttgagaccagcctgggcaacacagcgagaccttgtctcttaaaaaaaaaaaaaaaaaaaaatgagagaaatcggctgggcatggtttctcatgcctgtaatcccagaactttgggaggctgaggcaggtggatcaccggaggttaggaattcaagactgaaaccttgtctctactgaaaatacaaaaaaaaaaaaaaaaaaaaatgagctaggtgtggtggcaggcgcctgtaatcccagttacttcgggaggctgaggcaggagaatcgcttgaacccaggaggcagaggttgcagtgagccaagatcgcgccattgcactccagcctgggcgacaagagtggaaactctgtctcaaaaaaaaaaaaaaaaattcagtgaaatacacctttatatatgagatccaagttt

SEQ ID NO: 10023 - DNA, 1115 bp, Homo sapiens
caggggcgtgccctccctggttcatccatgaggctgactcccctggctttcctgtctcctctccctgcagatctctgaccgcctgcgccggaactggcccccctccttcttgtccgagttccgggctctgcagttctcgctcatgctctgcgcgtttgttggggcactgggcggcgcagccttcctgggcaccgccatcttcattgaggccgaccgccggcgggcacagctgcacgtgcagggtcagttaggagctgtgcccggcccagcttcttgatctgcctgtctgtctgtccatctgtctgcccactcctgtgcacctggcagctcagtccacagccctccccttgtttggcctccagtctgtctgcatccacccctggggtggctctgtggctgccccatccatttcccgctgcctgtttgcccttctctggctttgtctgtctgtccatccagctcaccctggctctgaccctcccccctcaggcctgctgcacgaagcagggtccacagacgaccggattgtggtgccccagcggggccgctccacccgcgtgcccgtggccagtgtgctcatctgagaggctgccgctcacctacctgcacatctgccacagctggccctgggcccaccccacgaagggcctgggcctaaccccttggcctggcccagcttccagagggaccctgggccgtgtgccagctcccagacactacctgggtagctcaggggaggaggtgggggtccaggagggggatccctctccacaggggcagccccaagggctcggtgctatttgtaacggaataaaatttgtagccagaccccaggtgcctgctctcgtctttctctgggtggcctctgatcttgcaccccgtcttcaccccagggctcctgaagactgtgggtcattcctcagggctctgggtgagtctctgcccttctgggctgggcgactgagatgggggactgctcttctccgagtgagctggctgagtgtgaccgtgagtcacgcccctgcttccctggagcctgtcccttgcctcacaggcctggctgaggtgggggtgggcactgccctttgtaccccagaattcccactgtcagggcc

SEQ ID NO: 10024 - DNA, 1115 bp, Homo sapiens; identical to SEQ ID NO: 10023

SEQ ID NO: 10025 - DNA, 1153 bp, Homo sapiens
acctaagcagtcaagcaagaaaccacacatatgcacatacccagaatcgaacaccactagaactacccaaaaactgagatggttgggggaggtatcatttattcatattactttctcccatgtactttttgaaagacagcttattctttcccttttagagatgagggaccagatttaagagcttattttgtgctttacattcattaactcacttgatctccacagcaactccatgagaagggtgctaatattaccactgggtactgagtagtacctctctttcactagttgcataataagaattaacccagagagtgacctgagggcgggattttggacacacttgacaagagaggaagaggctggagcgcaggaggtagctggtgctgggctcctagtcttggcagaggagcccaaagcacttggctgccctgcgtgtcactcatctccctttgcctcccagctggagtccctggatgccctagagcctgaggagaaggctgaggactgctgggagctacagatcagcccggagctactggctcatgggcgccaaaaaatactggatctgctgaacgaaggctcagcccgagatctccgcagtcttcagcgcattggcccgaagaaggcccagctaatcgtgggctggcgggagctccacggccccttcagccaggtagcagcccactggactgggggagggcgggggcgggggagaccgggtacccccgagaccctgtcccctatcgatcctgtcccgccaggtggaggacctggaacgcgtggagggcataacggggaaacagatggagtccttcctgaaggtgaagtcacggccctgcccctcctctgcctgtcctgcgccccgcgcccctctctaacgtcgctgtctccctccctcctgtgttgcaggcaaacatcctgggtctcgccgccggccagcgctgtggcgcctcctgaccgtcgtctcctcactccgccttttcaaatttttgtataaccccgtgttgtgtaaatacagtttttgctccggtgcttccgcctgatttttggggctgcgggggcgggaccggggtgtgaccgcctcggggtgggccgcgagcaaggcaggcgactccactgggcgccatcttcggggaacgactcagcgcag

SEQ ID NO: 10026 - DNA, 1830 bp, Homo sapiens
atgcagacccatctggggggggccgccccccctgtcccgggagacgccccccagccacagcccacctgctgagggggacccccgcacccaccaggcaaggcgtggggcatggctggggggcgggatggggggtgtgggggacaacggggctcaaagggcccaataggggatctcaggaaggcgagggatgcccatgtaccactcaggctagggagacttctgggcacagggaggatccttgagaactgctctgtctgggtgaggatgcaggctgaggcctctggggtccagataggaagtgagcaacggctgtgtcccaggggaagcaggctgggaaggtgtggggtgagggcaaggctcttgccattcagatcgcgctgtgatccgtggtgtttctcctgtgcaggtactggtgaggtttgtccaatggcggcggcagcggcagcggcggcagcggcagcagcggcagcagtagcagcccctcccacagctgtgggctccctctcgggggcggagggggtgcctgtgagctctcagccacttccctcccaaccctggtgagctccaagttggttgcgggggagaggggagaatggagtagagtcccttggtacaagctcctctcccccctcttttcccaccaactcctatttccctaccaaccaaggagcctccagaaggaaaggaggaagaaatgttttcttaggggaattcgctaggttttaacgatttgtttctcctgctcctcttctgtcagacctgaccccacacaaacctgtcccctcggttgtgttgaagtcccctggacagtgggcaggggtggcagaggacacgagcagccactgcccgtaccccctctcctctctgtaagcccatgccctgtcttcccagggacttgtgagcctcttccctcgacggtcctcttctctccttccagtcctctccccctgctgtctgcagcccctccccggggagttggtgctttcttttccttttttttttttttccagggggagggaggagaggaaggagggggatcagagctgtcccaaagagggaaagcggtgaggtttgaggaggggcagaagcagggccggcaaaggttgtaccttcataaggtggtatggggggttggggtcaggccctgaacatcgtcctacttgagaatctgtcaggggaaaaagtcaaggggagcaggaggaagagccaggagggccagaggcagagaagagatggagtcttaggggccagggtgagcgaggggtccagggcctagaggtgcttcctgggggcgggggaatgcagccagtgtccccctcccctcttccaccccagctccagccctggtcttgtcttttcatccctcttccccacgacagaagaagttgtggccctggccatgtcatcgtgttcctgtgtcccctgcatgtaccccaccctccaccccttccttttgcgcggaccccattacaataaattttaaataaaatcctgtttctggctctggattgaatgaattgccctcactaagaactgccgccaaccccaagggtttcttctcggcctggtgtccgtcaatccagccttgctctgccctgtgaggctgtgaggttctggctccgccctccccaggggcagccttactggcggcagcacagatacagggcggggccaaggctgtggctgtggagagcaagttccaggtctctggggaattcccaactcggacaggcccagaatagcccctggaggtttgaagaggccccgtcagaaacccaaacagagctgccagacgggaatgccgccctcccccgtccacactcatggccg

SEQ ID NO: 10027 - DNA, 1139 bp, Homo sapiens
tcgtgagttgcccacctcagcctcccaaagtgctggcattacaagcgtgaaccaccatgcccggcctgcactcttctttgaacagaactctgttcttgtcctggggcctctacccttgccattcccctgcccagtatgttcctccctgttcttcacattacctgtgccttcctgtcaatcaagatctttgcttctcaccctctctgaggtccaaccctgaacctcaggtcctccaagacagaggcctggggacctgcatgtttaaccagctccccaagtgatgagtgaggtccaggcaggtatggtgtacaccacctccatcccttccatgtatcttaccttcctcttctccaggaagctcagcccggagccagaaacgggaggcccgcctggacaaggtgctgtcggacatgaagagacacaagaagctggaggagcagatccttcgtaccgggagggacctcttcagcctggactcggaggaccccagccccgccagccccccactccgatcctccgggagtagtctcttccctcggcagcggaaatactgattcccactgctcctgcctctagggtgcagtgtccgtacctgctggagcctgggccctccttccccagcccagacattgagaaacttgggaagaagagagaaacctcaagctcccaaacagcacgttgcgggaaagaggaagagagagtgtgagtgtgtgtgtgtgttttttctattgaacacctgtagagtgtgtgtgtgtgttttctattgaacacctatagagagagtgtgtgtgttttctattgaacatctatatagagagagtgtgtgagtgtgtgttttctattgaacacctattcagagacctggactgaattttctgagtctgaaataaaagatgcagagctatcatctcttaaaaggaggggctgtagctgtagctcaacagttaggccccacttgaagggagaggcagaattgtactcacccagattggaaaatgaaagccagatgggtagaggtgccctcagttagcacctgtcccatctcgggccctccaactcctcccagtcccactccagtgcagccagctggctccaaggtagaaacccatgagcactcagggagcagtgtgccttcagct

SEQ ID NO: 10028 - DNA, 1223 bp, Homo sapiens
gggtcagcctctctttggtgacgtcacgttctctgggatcctgaggacccgggcctcaaatcagggaggatacgcgggaggccccctccatccaggcggtgctcctggggtgccgggaccgggcagtgtcacaccctgcctgctcagtcctggggtccgagatgctagggacgcttgagtgagggaggtggtgtgagggccaggtttcctgaaaggcgggagtcagacctccgcccccagccagagcaagcttggggcaccatgcccaggagggaagaagccatccacagccttccctgtcaccggctcctctgtcctgcctaccctggtcctggcgggacttcactatttgacttggtttcctttcagatattcttggctcagggcctgggttgagggagcttagggaaggacgtccgtctgggtgcttttcctccagtttgctggctggcttctccgtctacccacagtgacctcacagagaggccctcctgccacccatgctcatgtggtgtccccaccgcccacttgtttgatgtcactgactgtctacatgtatttatattcttgatattttctaccctcactagaatgtaaactccatgaaggcacagacttttcttgttctcttctctatccctagagtaagaccaacttgaacctggcatatagtagctgcttaataaatactcgtctgtcaatgagttggtttctcagagtgtggtccttagaccacctgtggtatatttctatttctcttttttgcttttctttctttttttttttttttttttttagagacagagtcctactctgtcgtccaagctggagtgcagtggtgcaatcatagctcactgcagccccaaactcctgacctcaagtgatcctcccaccttagcctctcaaagtgctgggattacaggcatgagccacaaagcctggctggatatttctttaaaatgcaaattcaagccaggtgtggtggctcatgcctgtaatcccagcattttggaaggccaaggttgggtggatttagtacaggagttcgaggccagcctgaccaacatggtgaaaccccatctctacaaaaaataacaaaaatagccaaatgtggtggcacatgcctgtggtcccagctactcaggaggctgaggtgggaggatggcttgagcctgggaggcaggagggagaggttgcagtgatccgtaatggtgccactccag

SEQ ID NO: 10029 - DNA, 1185 bp, Homo sapiens
ggcctcctgcccctcctgctgctgctgctgcttccattgctggcagcccagggtgggggtggcctgcaggcagcgctgctggcccttgaggtggggctggtgggtctgggggcctcctacctgctcctttgtacagccctgcacctgccctccagtcttttcctactcctggcccagggtaccgcactgggggccgtcctgggcctgagctggcgccgaggcctcatgggtgttcccctgggccttggagctgcctggctcttagcttggccaggcctagctctacctctggtggctatggcagcggggggcagatgggtgcggcagcagggcccccgggtgcgccggggcatatctcgactctggttgcgggttctgctgcgcctgtcacccatggccttccgggccctgcagggctgtggggctgtgggggaccggggtctgtttgcactgtaccccaaaaccaacaaggatggcttccgcagccgcctgcccgtccctgggccccggcggcgtaatccccgcaccacccaacacccattagctctgttggcaagggtctgggtcctgtgcaagggctggaactggcgtctggcacgggccagccagggtttagcatcccacttgcccccgtgggccatccacacactggccagctggggcctgcttcggggtgaacggcccacccgaatcccccggctactaccacgcagccagcgccagctagggccccctgcctcccgccagccactgccagggactctagccgggcggaggtcacgcacccgccagtcccgggccctgcccccctggaggtagctgactccagcccttccagcccaaatctagagcattgagcactttatctcccacgactcagtgaagtttctccagtccctagtcctctcttttcacccaccttcctcagtttgctcacttaccccaggcccagcccttcggacctctagacaggcagcctcctcagctgtggagtccagcagtcactctgtgttctcctggcgctcctcccctaagttattgctgttcgcccgctgtgtgtgctcatcctcaccctcattgactcaggcctggggccaggggtggtggagggtgggaagagtcatgttttttttctcctctttgattttgtttttctgtctcccttccaacctgtccccttccccc

SEQ ID NO: 10030 - DNA, 1183 bp, Homo sapiens
ccacttctattcctgaggtgcagcggggaggagcagatgagctgggcagggcaggggtgggtggagcctgaccctggagggcactgagctggaggcccctgcaagggtaggggacaagatgtaggctccagctcccctcagacctcctcatctcatgagcttcttggggctggccagtggcccagggccagcttggcgataggtgcctcaaggctgcctgggagccccgcctccctaccatggtgccaggggtctccctccgccacctaggaaaggagggagatgtgcgtgtcaaatattcatctagtcccctgggggaggggaagggtgggtctagacatactatattcagagaactatactaccctcacagtgaggccctcagacctgccacagggcagagcaggtctggggcctgaggcagggagaatgagaggccaccttactggcaggaaggatcaggatggggtcttggggtcaggatgcctgggtctcttcccgtaactgtctgacgtcctgtgccgtcttgtcctttatctttttttttttttttttaattgggatcagggctggggcggggaaacaagggaaggaccttggaaggggctgctcccaggcctggggggcagtcgtgggagcccctctcagctgtggggctggcacagagccccaggcaagcttttaataaactgttggttattctaacagatctcaggactcacccttctgtctttggtgtgcgtgaaggactgctcagtggccactgaatagtactgcttgtgttttataaagagaatttattgggctgtgtatctaaacatttcagtgattttaatgactttaggtgtgaccagatctcggatctcaaaggtggtcttcaaccccttgacctctaattcgttttctttgctttgacttcaaagattcttaggtttgcctcccacacagaccccaggcagctccatgctcacgaatcttcccgcaagcctcagcagccagagttcagtggagacctcatgtgactgcagaggctgggcctgtagccagaggcctagagggctaggactggcccaggaggtatgggcttttccccacccctttgaggctaacagcccatggacaaagtggctgtttgcataagggagaaggcttaagcactggctgccctcaagtcattctatcc

SEQ ID NO: 10031 - DNA, 1234 bp, Homo sapiens
ctgccgtgcggaggagctggatctgggagaggctgcgggcagggagtccagttaggaggctgggaccgcagcccaggtgagctaagaggagggctgggcctaggccacagctgccgggaccccgaggaggggcccatccaagacataatacaagcttcttgggggcagataagccgctggggctcctggctcaggcagcctgcaataccctccaccgaaccagtgagtgccgcagaagagggagaggaggagtagggagaggaagctggtggcaggtggcacctccggggccggcaggcaggcaagcactccaggccgactccgcctctggcttaacccctgtctcagggcagcccaggcgcctccctggagagggcaggtgcccgggcctttccctcccggtttcctgtgagacacccccatcccctcatctcacctctatcaccacccccaggcacttgctggtttgaggctctcgaggggctgaggggggcaggccctgagtgcagcatgggttggcccagctgtgcccagggcctcttccccctccccagagctgccctggggggcaaagcctagtctcctgaggccccagtgcctccctgactagtccccctgtgtttcttccccctgctgcagatggcggtgggaccccccgactgccctgtgggagggccgctgaccttccctggccggggttctggggctggggtcgggacaaccctgacccccctcccaccccctaagatgcccccccccacgatcctgagcacggtccctcggcagatgttcagcgatgcaggtagcggggacgatgccttggatggagacgatgacctggtgatcgacatcccggagtgaccgtgacatcacgccatgcccaccacggccccgcccggcgccctccccgtgccagcacacacgagtccagcttcctcggaggtgtttattgatgcccagctgccatgctccggccactgacacaaccagaaaaggcgtaaacatgcacgggtgtcccccaggagggtggcaggggccctgccttcaaaccccggccccctccaggggacagttatttaaacgagtggccgggagcatctgccacctgctggggaggcagagaccctgcaatggccacctctttaaaagggcagctgtacagggctaggttttttcaatgaagtttctgtattaaaggagtggctctgggtttgttttttgtcctttttttttg

SEQ ID NO: 10032 - DNA, 1140 bp, Homo sapiens
ctccctgttgggggagagggacggggcagcgtggagaggcaggagtgaggagcgcgggggcctggggccgggctctgagcactgcccgggtgtgcagatgatggggggtttgcatatttgcagggactagcgagtcaggcaggaggtttgcatatgtgaatatagaactccgcagcccctcatgagcagacagacccgggtcacggagactcacaaaaataggtagtgcagggtgggggcagcccaccctgtgtaaacgtgcaacacactcgtgcgaaggttgggtactggacccggctcgatgggcctgtgccgggacactgctgtccactcaggctgaggacagagccccggccgcagggggcagctcactggtcagggtgtgccagcgctccagggctgcgtccggctgctgcaggcagtcactccagtgcttccgagcctcgcctcgggcacctggccccagggacacgccacctggggagcaggtgggcagggtcagggccacctccctgccacttgcccgccctcaacacccgcagccagctcctccctcaccaatgaagtcattggatttgccaatgtcatagtcccagacggtgacttccagggtcttggtggccagagtggagagctctatctcgtagaaaaactcctagggacaaggccggccacccgttcgtgagccagctccccagcccctccctggcctccctccatgtcccgtcccctcctgggtacctcgttaaattctgggttgagagtcttcttcttcacacacgtcttatgcttggatttcttgtccacatcgggcctcaggtacctgggggtggggtggagggagacgaactgaggggtgagggacaggccaggcccaactcaggccagggcaggctccctggggaggagagggtcagagcaagggctcacgtcttgacgtaggggtccgagtaaccgttgacgtccatggcagccagatgggcgcagcgcaagatgcctaccagcagtccccggcgccgcgagctgtagctgagactcagcaggatgcggccacgctcctccagcagcccctgcccctgctccgcctgctccaactgcggggcacagactcagggtcagcctgggcccctgcagcctccc

SEQ ID NO: 10033 - DNA, 1447 bp, Homo sapiens
tcagaagagctgggttctaatctcagatctggctccggggttgctgtgtggcttgaagcacagacctttcccatatctgggccctttcccacgagggtgttgggccctctgcttgattcacgatctttacattctaaaatactccggttcggttttgttttcaggcaaggtgaccccatggcaaggcgcaagccagaagggtccagcttcaacatgacccacctgtccatggctatggccttttcctttcccccagttgccagtgggcaactccaccctcagctgggcaacacccagcaccagacagagttaggaaaggtacaggggcaggcctagcaaagggaagttgggcgtaagagagagctggggaccagaagtgccccagggcctgctgggtgtggggcaggggaggtagggaacatttccctgacctccaggagaggggccctggtcatcgggagatgatgggaaaccctagctaactagtccttcccctctgtttcctgtatccaggaacttgctactaccagcaccatgccctaccaatatccagcactgaccccggagcagaagaaggagctgtctgacatcgctcaccgcatcgtggcacctggcaagggcatcctggctgcagatgagtccactggtgcgggcaggagacagaatgggtggagggtgcagggttgggagtggcaggctgatcccctaattcccatgtgacactcccagggagcattgccaagcggctgcagtccattggcaccgagaacaccgaggagaaccggcgcttctaccgccagctgctgctgacagctgacgaccgcgtgaacccctgcattgggggtgtcatcctcttccatgagacactctaccagaaggcggatgatgggcgtcccttcccccaagttatcaaatccaagggcggtgttgtgggcatcaaggtaaggggagggcctccggacgtgaggtttgagatggaagtggaggaaggaaatccaggttagtgaggcagggaatgaatgctggattggtggcctagagacttgcatggagcctgcttcaggcttagggcatttactcgacatttttaatcctcacaattctgagagaacagtatcattcccactttacacatgaaaatctcagaagctcagggaagtgaagtgttttgctcagagtaagtggcagagccccagtctgacacccaattcactcaacatttctgttgtcaaataacatcccagtgtatcctgtctcagaggattgttactaagtgaactaagtgaaaatattttaatttaattgtaactaagtatttgagtaactaaacattttaagtaaattttttttttttttttttttgagatggagtctcgctgtctcccaggctggagtgcagtggtgcgatctcttggctcactgcaagttccgcctcccaggttcacgc

SEQ ID NO: 10034 - DNA, 2089 bp, Homo sapiens
agctgacttcgccaagtggcgttgtgtgctgaagattggggaacacaccccctcagccctcgccatcatggaaaatgccaatgttctggcccgttatgccagtatctgccagcaggtgggcctgcaggtcctcaataggcaacctcctacctcatttggttccagtgttgttaatttgcctattacctgccatgatgcctacctccccaaaagcaagcattagctttggcccgtggaggacactcaagggctgttgaaggcagaggggccaaggagggatggtgggtggatctgaggcggctcttgtctcctgtaatctgagggctttgaagcctgagtccctggcatcatcaagatacggtcttgaccagtggctgtggagagatgtaggtgggactctgggttaggaggcctcacagtgaccctgtccctcgccctgcagaatggcattgtgcccatcgtggagcctgagatcctccctgatggggaccatgacttgaagcgctgccagtatgtgaccgagaaggtaaatggctacctgcctgaccagtgcaaggtggctggccggggaccctggggctaacccctatcctctcctccaccccactacccaccgtgcgcctgctctgctccaggtgctggctgctgtctacaaggctctgagtgaccaccacatctacctggaaggcaccttgctgaagcccaacatggtcaccccaggccatgcttgcactcagaagttttctcatgaggagattgccatggcgaccgtcacagcgctgcgccgcacagtgccccccgctgtcactggtgaggcccacactcatcttgatctctatgcagtagataagctccacccacaaccctatgcccatttggacggatttccatggcaacttccaccagctcctgccagcttcctgggtctctgaccacagcccctctcgcctcacccctgctctacagggatcaccttcctgtctggaggccagagtgaggaggaggcgtccatcaacctcaatgccattaacaagtgccccctgctgaagccctgggccctgaccttctcctacggccgagccctgcaggcctctgccctgaaggcctggggcgggaagaaggagaacctgaaggctgcgcaggaggagtatgtcaagcgagccctggtaaggataggcaggaggtgggcagggtgcctgggtggatgggactcggagaagagcccttctcactccacccctctccctgcttaggccaacagccttgcctgtcaaggaaagtacactccgagcggtcaggctggggctgctgccagcgagtccctcttcgtctctaaccacgcctattaagcggaggtgttcccaggctgcccccaacactccaggccctgccccctcccactcttgaagaggaggccgcctcctcggggctccaggctggcttgcccgcgctctttcttccctcgtgacagtggtgtgtggtgtcgtctgtgaatgctaagtccatcaccctttccggcacactgccaaataaacagctatttaagggggagtcggccgtccgtgtcttgtggtgtctaatgcaggggagggcctggggaggtagcagagcccagaagaagaaagagcccctgttctctgttttttctgggcagaaaaggagtgaaaggtggaaggaccttcctgctctgttttatacttggccagggcttcaagaaaggctgagagcttgtgacattttcttccagccactgcaggctctgccccttcacctaacagcataagatagggctaacagttggggagtatggttgtaactgctcatgtcttaggaggcttcagcctcagcacttttaggtccagaactcaaggggggcagaagacccctgtgacaaaaacccactaactagctcatgagtgacatgagccaggcaacataatgggtgttttatatgagtagatgctgttatttttaatttatacctaaggctcttttgcccaagattgaactgtttcttggtggaaaggattatcaatgcatatctcttttttttttttttttgagacaatctcactctgtcacccagact

SEQ ID NO: 10035 - DNA, 1372 bp, Homo sapiens
tgtatgatcactgtgattatgagggggccccaggcattgggcgttctttctcctctggagcttatctgcccctacatttgctgtcctggtccccgccatcccacagaccatattcaggccccatgctctggtcccacgggcctctggtggacttggggaggggccaggctgctcaccctcaaggggcagcgctggcagccagagaagcctgaggacatccctctccatccctccctttccgcatcagacaccacaggctggggcgtgagcccccgaggagccggctacctatttggcagtgacgtggtggcccagttcaacgcagccaatgacattgacatgatctgccgtgcccaccaactggtgatggaaggttacaagtggcacttcaatgagacggtgctcactgtgtggtcggcacccaactactgctaccggtgagccggctgggccgggctgggatgggcgggcatctgagccgagctgctcctgaccctgctgccccgccttccagctgtgggaatgtggcagccatcttggagctggacgagcatctccagaaagatttcatcatctttgaggctgctccccaagagacacggggcatcccctccaagaagcccgtggccgactacttcctgtgaccccgcccggcccctgccccctccaacccttctggccctcgcaccactgtgactctgccatcttcctcagacggaggctgggcgtggggggggctgtcctggctctgctgtcccccaagagggtgcttcgagggtgaggacttctctggagaggcctggagacctagctccatgttcctcctcctctctccccacttgaaccatgaagtttccaataatttttttttctttttttccttcttttttctgtttgtttttagataaaaattttgagaaaaaaaatgaaaaaattctaataaaagaagaaaaatggtttttgggtttgtgccagacttggttgggaatgcacagggttgctggcctgggacctggggtggacgtcagggccttgactgcctcagggccccgacctgccaagagggccaggctcaggccagtcagcttgcccagggcctccaggggccgctgcctgctggcttccccagccctagggagagggctctgttctcatgggcagccttatcttattaacagcatacacacacaggcacacacagaatcacaggattctgatttctccattttcctgaagaggagatgggcctagagggccagtggattttgtgctaggtcaggcagctggaaacacaggtctagatctgggcctgggtctcctagcaaagcctttgctcacccagccccgcccagggccaaacacaggagcccaa

SEQ ID NO: 10036 - DNA, 1125 bp, Homo sapiens
cctgtcccctcctcccccagggtctggggcttccagtgaccagtagaagaagccttgggcaggagaacattgcaagcaaagggaacagtggaggcaaagacaagggggcgtgactgcttaggctgcagaggccttgagcgccgagcttagcagctaggtctgattccagatttgtgatttcggcctggcccggattgccgatcctgagcatgaccacaccggcttcctgacggagtatgtggctacgcgctggtaccgggccccagagatcatgctgaactccaaggtaggaggggctgcccactcctgaaaggaacggaccagttcccaggaagccctggagctacctctgagccagacactgacccccatgacacaggaattctaccctctgggccttgggctctgcaaggaagctgagcattgagccctccaggcctctgccttctgcctggtgttggatctaacttggaggtggtggcctggcgcagacaacaggaccctgttgaggctggcccaggagctcaccacttcctcctctcccccagggctataccaagtccatcgacatctggtctgtgggctgcattctggctgagatgctctctaaccggcccatcttccctggcaagcactacctggatcagctcaaccacattctgggtgagggaggcccggctggctgagttggggatgattagcttttccgaggtgagatttctcgagagtccaagtcagggataccaccacgtgtggggtgcctccagcatctcatggtatctcaatgaggtatagatattatccccattggatagatgggaaaagcaaggctaagtcccacacctgaggaggcaccagacctaggatttgagcctcggtctgcctgaacccagcccccttgctctgcaccaccatgctaatgactaggaggtgactgagggattggcatgggttgctgggctggggggtcttgttcttgccttgttgcctattctgttcccagaaagaaagaggtgatcatttaccaagtcacctccttatccacaggcatcctgggctccccatcccaggaggacctgaattgtatcatcaacatgaaggcccgaaactacctacagtctctgc

SEQ ID NO: 10037 - DNA, 1258 bp, Homo sapiens
gaaaagagctcggggggcgggttcggcaccattcatattcttccgctcggtaggaggtggaggacacgaccctcaaccgttgctcctgtagcttccgagtcctggtggtgtcggccaagttcgaggggaaaccgctgcttcagagacacaggtaaggccctgggagcaccttgcctagctcctgtaccacaaccccagccactccccctacccctgcaacctgactcccgcactccccctggcgtggctcagggaccttgaggatcccgccttcgtgacccctgcttcgagtatttcgatgtagaccctctctccaagtacgtgttcccacggcctggggactacaaccttggggacaccagtctcttgggtcaccctagcctcggggtgtgcgatcaccgctggccttttcctaaccccatctctcgccccaggctggtgaacgcgtgcctagcagaagagctcccgcacatccatgcctttgaacagaaaaccctgaccccagaccagtgggcacgtgagcgacagaaatgagggactgggatctgcacagccattaaattataaatctggaccagcttctgtgtcgatgtgtgtgtgggaggggtgctgaggccgagtctaggacctggcctctccctgccctgcctccgtccattgttttaccttggacacgtctctgtccccatctaggcctctatccctgcttgtaaaatgaaagttctaccgtaaaagtcccttccagggtctaccgagaaagccttctctctgcaactccgtttagacatctaggagtctgtactgccaccacctacccacctcctagagagctcagggttcctcctctctgctagccttcaagatgcagagatgagaaagtgatcggggtttcagggccctgaccagttgaacaaacctctccctgacattaccgcagtatcagaggcaccatatagaattccacatattccttgcaggttccccccggccttctcaggcccaagagggagtggtgcccaggtaggggctcatcaactcctggaatgctgatgttttcagacccactggagaaggttccagtggccccatagccctgggcttaatgtgtctacagctgcccccggaggaccatggaggttttaagaatagtgggtgtgggacggggataggggtgagattagagtaggaatataaggctgacctgagtcagaaaattggggcaggtgatgcccctgtatcagtcttcataacaggttag

SEQ ID NO: 10038 - DNA, 1258 bp, Homo sapiens; identical to SEQ ID NO: 10037

SEQ ID NO: 10039 - DNA, 1435 bp, Homo sapiens
gagaagcaggagaaggagcggcagaagcaggagaagaaggctcaaggccggaagctttcgctgcgtcgaaaggcagatgggcccccaggcccccatgatggtggggacaggccctcagccgaggcccggcaggacgcttacttctgacctctgccctggggctggactgcatggcccccctctttccctcagccaagaacaggcctggcccaaggtgccaccccctagcaccttgtcaggctgtcccttgctggggaaagtggcttggttccccatctcctcgccagctgctgatccctacacgggcaggacagatgggcagctgcaaatgagtctggagcctctcatctcccatgaggctcagctggggtctctgtcgctcctgccccagttccctctgggtcccctcctaggtgctgtcctgaatggcccgttgtcatcccaggggtgactcctggtgatgggagtcagcagtttcagattcttacactccatagctccccttaccatgaggtggagctggcttccttttccctgtcttcagccctccctgtctcccccacttcctggccagggctctcattctggacctgtgttgtaattgtgtacagaggatggcgttggcctggggtgggggtgctcgctttgtcttctgtcctttggttctccttccataatgctcctgtacccagtttatttaaggggacatgcactggaataggaaatgtcccccatctcccttcctgcaccctgctgtgctccctccaaacccaccttgctctgtgttctcaggcccccctgcttttgtctcaccaggacccatacctttcaccttgttcccttccacccctccagttagtccctatctgggtaagggtcttcccttgagctccagggggtggaacccaatgtttacattctcttctgtctctgcccccaccccatgcagcgctttgaggaattggaaaagaacctgctgttgtacctgggcctgttttctgccttgttatttgatgagggggggatggggtaaggacgagggagggagggacagagccaggacctgggtctctgttgaagcagtctgctgtcttggcaagtaggtacctcttagctttgggtccatctctcagtcactcatcagacactggttgagctcctgctccatctttgcctgggatctgctgtctccattgtcactggctgcctggagctctctatgtaccacgtgcagcacccggatctccttcccaaagtgctcatgcaactcctggaagctggagggggtactcacagtggctagaaagccactgtcctctggggatgagatgggttcttggccagttgcctggcacagctcccagtattgggttttggtggggggggaggggggacagcagcccagccagccgcctccagctcgcgccagccagtg

SEQ ID NO: 10040 - DNA, 1158 bp, Homo sapiens
aaagcctcagcctcgggacagaggcccccggctcctgggtgaaccacgctggggccaggctagtagtgatcgggccgctgtgtgtggtgagtgtggcaaaagcttcaggcagatgtcagatctggtgaaacaccagcggacccacacaggggagaaaccctacaagtgtggggtctgtggcaagggctttggggatagctctgcccggatcaaacaccagcggactcatagtggggagaagccctatagagcccggccaccagcccagggtcccccaaagattcctcggtcccggatccctgctggtgagcgccccactatctgtggtgaatgtggcaagagcttccggcagagttctgacctggtgaaacaccagcggacacacactggtgagaagccctacaagtgtggcatatgtggcaagggctttggcgacagttccgcccgcatcaagcaccagcggacacaccggggggagcagcccccccgaccagtggtgccccgacggcagccatctcgggcagccacggcagctacccagggaccgaaggcccaggacaagccatatatctgcactgattgcggcaagaggtttgtgctcagctgcagcctcctgagtcaccagcgtagtcacttggggcccaagccctttggctgtgatgtgtgtggaaaggagtttgcccggggatccgacctggtgaagcacctgcgggtgcacacgggtgagaagccctacctctgcccagagtgcggcaaaggtttcgcggacagctccgcccgagtcaaacacctccgcacccacagtggcgagaggccccatgcctgcccggaatgcgaccgtaccttcagcctcagctccacccttcttcgccaccgcctcactcacatggagccccaggacttcagcttcccaggctatcccctacccgctctgatccccagcccacccccacctcctctgggcaccagccccccgctgacacctcgaagtccctcacactcgggtgagccttttggcctgcctggcttggagccagagcctgggggcccacaggctggggagccacccccaccactggcgggcgacaagccccacaagtgccctgagtgtggcaagggcttccgccgaagctctgacctggtgaaacaccatcgtgt

SEQ ID NO: 10041 - DNA, 1231 bp, Homo sapiens
cgaacctgcggcagcaccggcggcggcacacgggcgagaagccgtacgcatgcgcgcactgcggccgccgcttcgcgcagagctccaactacgcacagcacctgcgcgtgcacacgggcgagaagccgtacgcgtgcccggactgcggacgcgcctttggcggcagctcgtgcctggcgcgccaccgacgcacgcacacgggcgagcggccctacgcttgcgccgactgcggcacgcgcttcgctcagagctcggcgctggccaagcaccggcgcgtgcacacgggcgagaagccgcaccgctgcgctgtgtgtggccgtcgcttcggccaccgctccaacctggcggagcacgcgcgcacgcacacaggcgagcggccctacccctgcgccgagtgcggccgccgcttccgcctaagctcgcacttcattcgccaccgacgcgcgcacatgcggcgccgcctgtatatttgcgccggctgcggcagggacttcaagctgccccctggcgccacggccgccactgccaccgagcgttgcccggagtgtgagggcagctgagtcccgcagggctgcggaggggcgcgctggggcttcgacctggctgcactaacccaggctcctcctcgccccggcctccgggtctgggaaattgaggggacggcaggcccggctgccctggaactgggagacagggagaatcccctgccggggtccctggaaacagtgcccaccccacatcactacattccctcggcccgtgttagtgaataaagtattatatcctcaccccacccgtgcctgtgagtgaggtgggtgggagaggaagaaagttggggttctccaggctcaggtgccaagtgagttgtcaaggaaccaaatggggatgtaaacctaaaaggggttcccggcacctcggtttgtgttggttggaggtgatcgcacacttggcccttggttacgtcctcataaccttagacctgaaagggcccataaatatactatgttcacgatcagacacgcactgcattcggcagagctccagtgagcaaggcacgaccctcagatctcagtctagtgaaggagagaaaactgtaataacactacgttaaaggttttaactgctttgttatgtaagcttacccagcccggcgcacagtgactcacgcctgtaatcccagcactttgggagggcgaggctagcagatcacttgaggttaggagttcgatac

SEQ ID NO: 10042 - DNA, 2208 bp, Homo sapiens
gccccacctttccagccctgggcatcgggatggactcctgcgtcatccccctgaggcacgggggcctgtcactggtgcagaccacggacttcttttaccccttggtagaagatccctacatgatggggcgcatagcttgtgccaacgtgctgagtgacctctacgccatggggattactgagtgtgacaacatgttgatgttactcagcgtcagccagagtatgagtgaggaggaacgcgaaaaggtaacgccactcatggtcaaaggctttcgggatgcggctgaggaaggagggacggcagtgaccggtgggcaaacggtggtcaacccttggattataatcggtggagttgccactgtagtatgccaaccaaatgagttcataatgccggacagcgccgtcgttggggacgtgctggtgttaaccaaaccgttaggaacccaggttgctgtcaatgcccaccaatggctggataatcctgaaagatggaataaagtaaagatggtggtctccagagaagaggtggagctggcctatcaggaagccatgttcaatatggctaccctcaacagaactgctgcaggtttaatgcacacatttaatgcccatgcggccacagatatcacaggctttggcattctaggacactcccagaaccttgcaaaacaacaaagaaatgaagtgtcctttgttattcataatctgccaataattgccaagatggctgccgtcagcaaggccagtggacggtttgggcttcttcaaggaacctcagctgaaacctctgggggattactgatttgtctgccaagagaacaggcggctcgcttttgttctgaaatcaaatcctccaagtacggagagggtcaccaagcgtggatcgttggcattgtggaaaagggaaaccgaacggcccggatcattgacaagccgcgagttattgaagtcctgcctcgtggggccacagctgctgttcttgctcctgacagttcaaatgcctcctctgagcctagctcgtgagatgaaagaacagaagttgtttggaccttagagccattgtccacaatcacggatggttctcaagagttgattgtaagaaatttccaaagaaggctgcctgcatagtggttccggctgccctttctaggtgattggaatcagcccatctaaagcagtctttatatgcattccgaggccagagtaacattttgaactttggggggatatttgttcatcacttgggtagaagaggagcaaaaatacctctgttttctcttgccaaagtaagatgaagctattccaggttgagggatttttctttgcacggggttgattaatttctgcacagggagtgagattattaaagtaacacacacacaaagtaaattgcaaaatgaaaaaaattagaagcaaatgagttttggaccaatattgttgataaatctaaattgttaagagagatcttataatgcaacatcaaattctttattcaattttactgaagtactggctctttcctgctctggacaagaattgagcaacttgtctgatgactgggaaaggaggacctgcaaccatctgacttggtctctgttaatgacgtctctccctctaaaccccattaaggactgggagaggcagagcaagcctcagagcccaggcctcagtggtcattaagatgttaagtcttttgcggcagattcctggtgatttgatcaataaagagtaatttcttgctaaataaataaaagaaaccttgttgaaaaactattctggctaatgtttggtggtttgaaattcaatacagtcttataaaacgaaccagcttatacactgagtctggtatagcagagagagagtgttttccctgatgctggtgaattgggtaatttaacacccagatttagggttgcaccttccccctgaaatgacagaaaaggactcgaagcaggcatacgccccaagggttagagagtgggcaggaaatagcaaaagaaaggtgtcaacaattcttgaaagatggaaaggaggtggaagaggggtaactgacttaaaggaatccttcatagtaggggaagacaagaagcaagaagatgtgcttggaagatggggtaagacctggggataaaacatactgtttgagagtttatacacggtaattcgatctttagcgttctccacactcttatttcacacagccaggtga

SEQ ID NO: 10043 - DNA, 1179 bp, Homo sapiens
agtgacatgggctcaggcccccactagtctcttctacccgatctgaatgcctaccttggtctcaggttctgaaagcacctggtcctttgaggctcttggctccttccctttggttgaacccaacctgccaagaaggtcaaggctcagggacaaacaggattcactgcattatcccccgtctcctgcccactggatactcagggaaggaggctgggaccaggctgcagccaggcttcaagggggttttttgagagcactacctgggttctgctggttcggagaaggaagtggatgccgtggacgagcaagatgtggtgagagaaggggaggctcccactcctccgagagggaagacctctttccggagacagggccgagggggtggcggggctcgggccatttccccaccacccacagtgtgccgccgcggccgtggtcggcttggttggggtggagcaggtggccaggtgcaggtacctgggccagggggccccagatcagggcaggagtagcttcggcccagagagggcttagggagaagtgctggggtattgtggtcctgagttcgccactggcggattgggggccgggggctgacagacgcagtgccctcagcagccccagactgctcggcctctgagatggcgatcttcaactccagcttcattgggggggacgggggtgggggctgtggggttttgttgggcgtgaggaagatgtcagcaaagctctccagcttggagcggacggaacggaagagcggggccaagccccagggactgaggcgggggcgtaaaaggctggacggtggtggggtggatgggagctccagagcaggatctggggctgaggaaaggagagggtcacaggtggatattccttggctgcagtgtctcagcccctccccacatgctcaactttgtgcacaggggaattagcccacccttaaaacactaagttctgcatttaagaattgaacttcaagcctctgacatcaacatcccatctttatataccaagccctgccctgggaggtggcttaagccctatccccaactctgtacctgacacttccaagctcaactaggatgtcccagacacccaagtctcatccgatctctacccaagtccttacctgttggtgggctctccagagggtctgcaggcagagcagatggc

SEQ ID NO: 10044 - DNA, 1153 bp, Homo sapiens
gcatgctccctttgtgcttcctttagaccatagtgagcccctaaggttatttagttttactttcctaagaggccagcccaggatctggttaaagaaggtctccctaaacatcgggtaaaagtacataaataaaatggttatcttggtgagcagtccctttcacatctgtggcaggtggtgcaattcaagcaacagtcccggcttgaggaaaagcgcaaaaaagccctggacctgcatttggacttcattgtggggcaaactgaaaagtactcggaccttctgtctcagagcctcaaccagccattaacctccagcaaagcaggctcttccccttgcctcggctcttcctcagctgcctccagtcctccaccccctgcttctcgcctggatgatgaaggtgtgtgttctctttggtcctgttactcttcctcatgtaccctttccagagctgaaaaacccaccctgtggcttgcagggcccgtggactttgtgaccttgttctcctgctatagatggggactttcaaccccaagaggatgaggaagaggatgatgaggaaacgattgaagttgaagaacaacaggaaggcaatgatgcagaggcccagaggcgtgagattgagctgcttcgccgtgagggagaattgccactggaagagctgctccgttcccttccccctcagctgttggaagggccttccagcccctctcaaaccccctcatctcatgatagtgacacccgagatgggcctgaagaaggtgctgaagaagagccccctcaggtgttggaggtataggcagaaggagcagagggagggttcagagggggaacagagggagaggttcagggtctgagttccgggctgtgaggttggttatgagttttaggagttctgctagtaatggacatttgggctctttggggatgactggggaagaatctgtttggggcaagttgcattttgtgattggcaggttttggcgctatagtggaagagcgtattgcactttcctctttaaattgctgtgtggtcttgaaaaagtacttcctctgaccgttacttgccacttctctgaacatgccctaatgttcccttattggcttacaggttggaagctggcatggtacccttaagtcttttctgtttctccat

SEQ ID NO: 10045 - DNA, 1134 bp, Homo sapiens
taccctttagactctgtggaggaccggagtgaggatgaggaagatgaacattcagaggaggaagaaacaagtggaagttcagcatcagaggaatctgagtctgaagagtctgaggatgcccaatcacagagccaagcagatgaagaggaggaagatgatgattttggggtggagtacttgcttgccagggatgaagagcagagtgaggcagatgcaggcagtgggcctcctactccagggcccactactctaggtccaaagaaagaaattactgacattgctgcagcagctgaaagtctccagcccaagggttacacgctggccacgacccaggtatccccaggttctggcctctcctttctcatgtcttgactttctcatgtccccacaacaaatgcctcatttccattgtgttacctatatttcctctctgacaggtaaagacgcccattcccctgcttctgcggggccagctccgggagtaccagcacattgggctagactggctggttaccatgtatgagaagaagcttaatggcattcttgctgatgagatggggcttgggaagaccatccagaccatctctctgcttgcccacttggcttgtgagaaaggtaagtaggcaaggccccttcttttgttccccctagtctagctccctgggagcttgttcagtgatgactccagcttcattgacttttgctttattgactccggtcattaactgtatagagaggacagtgtaggtgctaggattcctaggaagggccaaagggtggccagggttataactgagaaatcagaaccacagaatttacatttccttaccatctctgatttttttgcctaacaggtaactggggtccccatttaatcattgttcccaccagcgtgatgttgaactgggagatggagttgaaacggtggtgccccagctttaaaatcctcacttactatggagcccagaaagagaggaagctcaagcggcaggttcgatgtttcatgtggtcactttcctcccattgatgcctcctttatttttaagccctttcctcaggtgaattcctttctctcctctttcttttttaaaaaaaattttttaattttttgtaaaaataaagatggggtctcac

SEQ ID NO: 10046 - DNA, 1105 bp, Homo sapiens
ttccttatatcacttcctgtgtcatggtatcattttgtgtctgtctccttcagcagacagcagatcccttgagggcttgcagttgactcatctttgtgtggttggtgtctgatatggtgtgccgtatgactccattagtgtttgctgaggggcttaggctggggctcggtgcctgagttctcctgtttagcctccagcttaatttgcttttaggttttgaggccttttttactgcgccgagttaaggtggatgttgagaagcagatgcccaaaaagtacgagcatgttatccgctgcaggctctccaagcgtcaacgctgtctctatgatgacttcatggcacagaccacgtaagggaggaaggagggtgggccctgggactcgagattggagtgtaggtggctgttaggacgtctcatttatttttcctctttccccagaactaaggagacactagccacaggccatttcatgagcgtcatcaacattttgatgcagctgagaaaagtttgcaatcatccaaatctgttcgaccctcgaccggttacctcccctttcatcaccccaggcatctgcttcagcaccgcctctctggtgctaagggccacggatgtccatcccctccaggtaagtatgattccattaatatgaaatgtaaaggttatcggcattactccaaccatgtacctcttttcgttagactggggtctgacttttgcatcctcatgactcccctatcattcccttagttttattgtactctagccatgtgacttaacgatggttcaacttaatatttttttgacttcactgtgaatttatcaggatgtaaccccatcgtaaattgaggagcatctggacttagaatgattcagcttacaattttttactttttgatgggcttatcaagggtattaaagggtattaaattctttacttgctgagggtttgttggaatgtaacctcattgtaagtccaggagcgtctgcatcacattttgtttatccacttatctgtcagtgggcacttggattctttccaccttttgtctcttgtgaataaggctatgaacataggtgtacaaatatctctgctttttattttg

SEQ ID NO: 10047 - DNA, 1144 bp, Homo sapiens
atggttcctagaataagtggctgaaagctgcccagaggggcctggggtgggaagaaaagagttggatgcaaggctggaatatttatatgggatgggtgcaaacgtggagggaatcagggagagaataactagaagagggtactgggatgggcttctgtgttagtcactttttctccctttctctctgttcggtgctttctgattgtcttaaattcctattccttgttctcctttgggtctctttccttttctttgcttttataatctgtctctctgtttcattttcttcttttctttgatattgctaccccttattctccttctgtccctacccactctcttaattttttctcacaggatgctgcagccagtacctaagcaagaaggccggacagtggtggtggtgaacaacccacgggcgcccctgggccctgtcccagttcgacctcctccaggtcctgagctctcagcccagcccacccctggcccagtcccccaagtgctgccagcatcactgatggtttcagcctcacctgccgggcccccgcttattcctgcatctcggcctcctggccctgtcctcttgcctccactgcagcccaacagtggttctctcccccagggtgagttgaaagggagccaaggatgatgcgtggtgcttcagaaaggttgttcagactgaggaggaagtagtgaaattaaagggtttgaggagctgggctggggacacgggtctagtatttgatgggttggaagggagtatggaggcttctggcaccaggctaaggctttagtcagggtatatctgacaggtgtttgctttgtgtctgcagtgttgccatcccccctgggggtcctgagtgggacctcacggcctcccacgccaaccttgtccctaaagccaacaccacctgccccagttcgcctgagcccagccccacctccaggctcctctagcctgttgaagcccctgacagtgccaccaggctacaccttccctcctgctgctgccaccaccacttctaccaccacggcaactgctaccaccacagcagtgccagctccgactcctgcaccacagcgcctcattctatctcccgatatgcaggctcgcctgccctgtaagttcccagggctctgtggt

SEQ ID NO: 10048 - DNA, 1163 bp, Homo sapiens
gatgaataaatagtggtaagcctagcagtagaaaagtattggggtaaaaggacagtgtagagcagatggtggtgattagctcagtctggtggcaggccatgttagaggatataaaagagattgctaagcaaatgggattggaaggagtagcacatgaaaagctcaaaggctgtaggtggaggctgagtttattgggacatggtaaattgtgggaagggcttagttgtttgaactggacactcgggggagaggtgtgcttcatggggtctgtgaagtggtgttgagcaggatgagccttgtgtacaataaggccttctctgtttttagcaggcgaagtggtcagcatcgggcagttagcctcactggcacaacgtccagtggctaatgcagggggaagcaaacctctcaccttccaaatccagggcaacaagctgactttgactggtgcccaggtgcgccagcttgctgtggggcagccccgcccgctgcaaagtaggtaaaacccaccccctgtcctgcctttttcctcctcttccctgtctctttgtttttgtgacttttttgaatgtcagcctttatgtttcttacccaagcttttggtgggtggggccaacgggcatggttggagggatcttggataaagatagggaagaggtcattctagagaatgtattccctctctgttcttttcttctcttcttgccttgcctctgccctcctcaggctgatagctgcttctctctctctttctctcttcccttaacccagggaatgtggtgcacctcgtgtcagcaggggggcagcaccatctcatcagccagcctgcccatgtggccctcatccaggccgtggccccgacccctggccctacccctgtctctgtgctgccttcttcgacccccagcaccacccctgcccctactggcctcagccttccgcttgctgctaaccagggtgaggctcctggccttcctacttagcccttgctggccttggtccttccaggcatgcgctgggctactgtctgtccagccttccctcagtgttgttttcccttgcgaatatctatgatacctgtctgccaccttctcctgcccctggacttcttccattctttgggtcttttgtttcttttctaccttcctctcagtgtagcttcctct

SEQ ID NO: 10049 - DNA, 1669 bp, Homo sapiens
gagtgatgagactcggatgtccggttagctgttcccattccaccccattccagtctggcccttggcaaaaacctggtctggatttgattggcgcctctgtatcctggtcagtgatttgaagaaggctatagtcctggagttgagtgttacgtaggaaaatacccacaaatcgtccattctataaacttgttggaattgtagatcttaattttgaatattcagtcattctgctttggtagcatacaaggaaagatcagttttctctaggagagaagttacttaacataacttctgagaaagaatagttatttaacataaaaaagaaagttatttaacataacttctgagaaagaatagttctcattgataacttggaaaactacaaaaagcatagtgtatttttggatcccatggtttctatatatttatttccatctgggaagaacagtcaggttttgatgtggactctgagggtgctgattacttcctctttttctctcacccccaggactccctggaggaaaagcggaagcggcagcggtctgaacgcctggaacggattttccaacttagtgaggctcatggggccctggcacctgtgtatgggactgaagtcctggatttctgtaccctgccccaacctgttgccagccccatcggccctcgttctcctggccccagccaccccaccttttggacttataccgaggctgcccaccgggctgtactgtttccccagcagcgactagaccagctgtcagaaatcattgagaggttggcagggctaagtgctaatggggagtgggtcttggggcctcagagtggatgtagtgcttagggctggtgaaggtgttaacttctggggcatttcagagtcccatcttttacactgcctgcttcttcctttcacaggttcatctttgtcatgcctcctgtggaggcacctcccccttccctgcatgcctgccacccacctccttggctggccccacgtcaggcagccttccaggagcaattggcctctgagctctggccccgggctcgtcctttgcaccgtattgtgtgtaacatgcgcacccagttccctgacttaagactcatccagtatgattgcggtgagtttgttggccagtgtaggacccttgacttctcttcttttcttagtattaagactgttgtatcagagggatgctgcacttaagttctcttgcgatttctgtaaagctttagatggttttttaggttatgcttatgggcaagatagagaaatgtaagccttgttagattcttgacattcataaatatgactttcttctttttttttattttgagacaaagtctcgctcagtcgcccaggctggagtgcagtgcagtggtgcagtctcagctcactgcagcctcccaggttcaagtggttgtcccacctcagcctccagaatagctgtgattacagacatacgccaccatgcctggctaatttttgtatttttagtagagatgggatttcgccatgttggccaggttggtctcgaactactgacctcaagcgatcctcccgcctcagcctccaaagtgctgggatcacaggcatgagccaccatgcccggccatgaatttgactttcatgaaagttgaaaatgtgctgctaactccttcattcagtgatcat

SEQ ID NO: 10050 - DNA, 1158 bp, Homo sapiens
taggctggagcagaccgaagaggtgaagcccttaaaggaagaacttgtatggagttaaacgtagatagatattttttgtgacagggtctcgctttgttgcccaggctgaagtgcattggtgggatctcagctcactgcaacctctgcctcctgggttcaagcccgagttctcatgcctcagcctcctgagtagctgggattacagtcacccgccatcacgcccagctaatttttgtgtttttagtagagacagggtctcatcatgttggccaggctggtcttgaactcccgacttaaagtgatccacctgcctcagcttctcagagtgcagggactacaggtgtgagccaccatgccctgccgtagttaaacatttttgatctgctaggctaattgaaactttggcttaaagcattgattatctttcaaccccagccttgcattgctaagcattctacccattgcggcttgtagctagctccctgtatcccttcatatctctttaggaaagttgcagacgttggcagtgctgttgcggcagctcaaggcagagggccaccgagtgctcatcttcacccagatgacccgaatgctggatgtattggagcagtttctcacctaccatggccatctctacctgcgcctggatggatctactagagttgaacagagacaggtaacccaggtttctgcagctcttagaggctcacctccgcttctctctccttttcccaggatttgggcttccagacggggtgccactaagcctttagacctgttttgggggataagtctcccagtatcatctttttttccctttccttctaggccttgatggaacggttcaatgcagacaaacgcatattctgcttcatcctttcaactcggagtgggggtgtgggcgtgaacctgacaggagcagacactgttgttttttatgacagcgactggaatcccaccatggatgctcaggcccaggaccgctgtcaccgaattggccagacccgggatgtccacatatataggtattgcctagtcttccctcaccttactttccgtttactgatggggtttcctggatatatttggctgcttacacacggccttcatcaccccctaggcttatcagtgaacggacagtggaggagaacatcctaa

SEQ ID NO: 10051 - DNA, 1105 bp, Homo sapiens
gtactaagtaagatcttttagcctatgcaggagaaaactgctgcgccttcaggagttcctcctgtttattaaagaagactgctttggactttgggaggctgaggcaggcggatcacttgaggccaggagttggagaccaggctggccaacatgatgaaaccctgtctctactaaaaatacaaaaattagccgggcatggtggtgggcgcctgtaatcccagctgcttggaaggctgaggcaggagaatcacttgaacctaagaggcggaggttgcagtgagttgagatggcgccattgcactttagcctgggtgacgagcaaaaccgtctcaaaaaagaaaaaacaaaaaggactgctttggccttcacagacgtgcgtcttcaaccagtggtacccctgacagttccaagaaccatcagccttacagcttagacctaagactagcattctgttgactctgacacttccctctgttctatccgatagcagaccatccgagagctgtttgatatgcccctggaggaaccttctagctcatccgtgccctctgcccctgaagaggaggaagagactgtggccagcaagcagactcatattctggagcaggtaaaaaaagagtgggcagttcgtaaagttgagctgattcttacagaatatcttgtcttttgttagtctgttgagcttgtccaggggaaagagatgtttcttctgcttcccagattacagtcagcctttgatagttgtaagcacattgcttattggttcacatgattaagtaggaaaaaaaaacaggattttggagtctttagttttaggtttgaattccagtaatgcttcttaattgtgttaagacaagttacaatcgtcactcttctgaacctcactttctattaaaagtaatgtgggcagggcatggtgggtagctcatgcctgtaatcccagcactttgggaggctgaggctcccagctggagagctctgaaaacacacaaatgctcagacccaacaccccaaaattatgatagattttgagacagggtcaaggaataaatcttttaagaacctttccaaatgtgattttattatgtgtaagtatttgaaacag

SEQ ID NO: 10052 - DNA, 2158 bp, Homo sapiens
acaatctcgggtcactgcagtctccgcctcccgggttcaagcagttctcctgcatcagcctcccgagaagctgggattacaggcgtgcaccaccacgcccggctaatttttgtatttttagtagagacgggggtttcaccatgttggccaggctggtcttgaactcctgacctcaggtgacctgctggccttaacttccccaagtgctggaattacaggcgtgagccaccgcgcctgacctggaagctgctaatttctactcactctctactctgcttgcctcctcctgaccacttttggaccctgttgttgtaggagcaagtggaagctgcccgcaaagacctggaccaagccaaggaggaggtgttccgcctaccccaagaggaggaggaggggccgggggctggggatgagagttcctgtgggactggtggaggcacccaccggcgcagtaaaaaggccaaagcccctgagaggccggggactcgtgtcagtgagcgtcttcgtggagcccgggctgagactcaaggggcaaaccacactcctgtcatatccgcccatcaaactcgcagcaccaccacaccaccccgctgcagtcctgccagggagcgagttcccaggccagcacctaggcctcgacccactccagcttcagctccggctgcaattcctgcccttgttcctgtcccagtttctgccccagtacccatttcagccccaaatccaataaccattctccctgtccatatcttgccttctcctccccctccttcacagattcctccttgttcttctcctgcctgcacccctcctcctgcctgtacccctccaccagctcatacaccgcctccagcccaaacctgtcttgtaactccttcctctcctctcttgcttggtccaccttctgtgcccatctctgcctcagtcactaatctccccttgggcttgaggcctgaggcagagctgtgtgcccaggcattggcatctccagagtccctggagctggcttctgtggccagttcagaaacctcctcactttctcttgtgccccctaaagatctgttgccagttgctgtggagatcctgcctgtgtcagagaagaacctttctctcaccccttctgcacccagcctgaccttggaggctggcagcatccccaatggtcaagagcaggaggcaccagattctgctgaggggaccacccttacagtgctgcctgaaggtgaggagttgcccctgtgtgtgagtgagagcaatggcctggagctcccaccctcagcagcatctgatgagccacttcaggagccactggaggctgacaggacctcggaagagctgacagaggccaagaccccaacctccagcccagagaagccacaggaactcgttacagctgaggttgcagctccatccacctcatcttcagccacttcctcgcctgagggtccttcacctgcccgacctcctcggcgtcgcaccagtgctgatgtggaaattaggggtcaagggactggtcggccaggacaaccaccaggccccaaagtgcttcgaaagctgccaggacggctggtaactgtggtagaggaaaaggaactggtgcggcggcggcggcagcagcggggagctgccagcaccctagtgcctggggtctctgagactagtgccagcccgggaagcccgtctgtccgcagcatgtcagggccagaatcctcccctcccattggtgggccctgtgaagctgctccttcatcctcactgcccactccaccccagcagcccttcattgctcgccgtcacattgagctgggggtgactggtggtggcagccccgagaatggagacggagcactgctcgccatcaccccacctgctgtgaaacgtcggagggggaggccccccaagaagaacaggtctccagcagatgctgggagaggtgtggatgaggcaccctcatccaccttgaagggaaaaaccaatggggctgacccagtccctgggcctgagaccctaattgttgcagatcctgtcctggaaccacagcttattcctgggccccagcctcttggaccccagccagttcacagacccaatcccctcctgtcacctgtggagaaaagaaggcgaggacgaccccctaaagcacgagatttgcccatcc

SEQ ID NO: 10053 - DNA, 1102 bp, Homo sapiens
gcagatcctgatgttacgcatgatcatggagggccagtaccagttcagttcccccgagtgggatgaccgttccagcactgtcaaagacctggtgagcgggggctgagaggacagtaggggaggcccaagagctgcccctcatgctctgggtctctcctagatctccaggctgctgcaggtggatcctgaggcacgcctgacagctgagcaggccctacagcaccccttctttgagcgttgtgaaggcagccaaccctggaacctcaccccccgccagcggttccgggtaagcctgagtgtatcagggtctgggcccgtttctctgtcccatgatctttcccctgcactagagctcaccctgccccccttcccaggtggcagtgtggacagtgctggctgctggacgagtggccctaagcacccatcgtgtacggccactgaccaagaatgcactgttgagggacccttatgcgctgcggtcagtgcggcacctcatcgacaactgtgccttccggctctacgggcactgggtaaagaaaggggagcagcagaaccgggcggctctctttcagcaccggccccctgggccttttcccatcatgggccctgaagaggagggagactctgctgctataactgaggatgaggccgtgcttgtgctgggctaggacctcaaccccagggattcccaggaagcagaactctccagaagaagggttttgatcattccagctcctctgggctctggcctctggcctcaggcccactaatgatcctgctaccctcttgaagaccagcccggtacctctctccccactggccaggactctgagatcagagctggggtggaagggagccattctgaacgccacgcctggcccggtcagtgctgcatgcactgcatatgaaataaaatctgctacacgccagggagaacaggtgtcctgtgtctgtctggcttgggcaggaaagcccagaaggtgctcagcagggtgcagggatggtgccattctggcccagacctttattggggaaaatgttgggggtcacttggtcttgctcttgcctttacccggaggtagctggaagggccgctctagtg

SEQ ID NO: 10054 - DNA, 1231 bp, Homo sapiens
acttgttgagtagatttttgaacacttagtgctaggcactaggcatattggcgagaacaaaatagaggtcaaaactttcatggaccagacaagaaataaataaaagaatatatctttaggttctacttgtggtaacagacaagaaatcagtaaaatagcatatcagtgtgttatgagtaccacaaagataaagcacagaagagagagctaagagtgagttggagtcagttggcatctggtggtcactgtgccctttttccctttattagcactttaggcctttctggaatgccttccgtgactccccatcagttaagagccttagttcccagcaccgaccatgcagtattgaattttctcccatttttctgggagcccttaggaaagtacttggtttggggtgtcagaatcgatcattgccctgcacggggtgcttggggtggagtgtatgctggggatgtaagggaggcctgctgccacgtctggccctgcctcccatggccctgcctcccactccttagtttgagatgctgaatgcagagttagaggaaaaccaggaactggccaacagccgtatggcagagctggagaaactgcaggccgaacttcagggggctgtgcggaccaatgagcgcctcaaggtgggctgctgtaggggctgagaggtcctgggcctgtaagggagggactgagccctgaatcctgttgctgatcccatttgggcatccctgccccaggtggccctgcggagccttcctgaggaggtagtgcgggagacgggggagtaccgcatgctgcaggcccaattctcactgctctacaacgagtctctgcaagtgaagacccagctagacgaggctcggggcctgctgctggccacaaagaactcccacctgcgacacatcgagcacatggaggtatggccctggaacaggcgttagggctgggctaagggccaaaccgttagtgttgacgtgtttgtgccttccgaggccctgtgtgccagccaggggtccctggggaatagattcttcctaagatactgagtcctgaggtgggaccgaggggctgtgtgggtccttaacacatcaacccacagagcgacgagctggggctgcagaagaagctacgcacagaggtcattcagctggaggacacgctggcccaggtacgcaaggagtatgagatgctgcgcatcgagtttgagcagaatctggcggccaacgagcag

SEQ ID NO: 10055 - DNA, 1191 bp, Homo sapiens
cctcagtttgctcattcatagagtgctcgtccttacctccagggttatgggaggatgaggtgcagtctccagtgtggtgggcttggcctggactcctcctgctgtcagcttggggtctgggcactgtcagagttgttcccaagctgatgcctttgcctggcccaggcgcggttgacctgcccctgctgtaacacccgcaagaaggatgcagtccttaccaagtgcttccacgttttctgcttcgagtgcgtgcggggccgctatgaggcccgccagaggaagtgccccaagtgcaacgcggcctttggtgcccacgacttccatcgtatctacatcagctgaacctgaaactcaggggactctggaacaccatggaccctgggggctgtgcccccatctcctccccaccccaggtctagtggccccaccctccattccggaccccatgggcccagcccctgcccatctagttggtttggggaccctggtgcatgctagtgggcatgggatcagccaagcttcgttccatcttttcctaaaggtcagagctgcagcctagggggcactgccctacagaaaaggtctgcctgagaggcctgaggagcccagagcacttgactgagcttcccggaaactggccctaacctgtctgtctccgtggatgcatcctaaccctaaggaaaattccccaggctgtgatctaccctagagaaggctcgctccctgcctactggctcacaaatgaggaccagtgagccatgtccttgttccttgtttgagactgggctgcaggccccaggaagactttccttcacccaccatccccctaacctcggcagggcttctgtcctgtggagttccctggacaccttggtctggctcttgtgccaagggctgaaggaggtaccctcttggcagatgggggcatcacttgcttcctttgggaagctctaaggttgctgcagtcaccttcctcatcttgcaggtgctgaaccaacatcatcagtttctattctaatcaggccccttcccaatctccatttctctgccaagcccatttacccccacctcatgcatcccaaggctctactgggtccctggacctaaccctgctttcatcctggtggccttaactacagtggaggtggaacttcccaggaggggaagggacagaccagccccagccgctgg

SEQ ID NO: 10056 - DNA, 1226 bp, Homo sapiens
tgggcacctcgcccgcctgtggtctcgaaatcccccccaccagtggcgcacggcctgacgggagttgcagtctcccggctcccgtctatcatctcaagtcgagacaatggaaggggatggggcggggccaccggcaaagatggcggctgcagggccggggcgactgcgacatgggatgtgtagtccaggcgtctggcctcttccctgcggaaatgagggagaggactacgaaaaagatggcgacctcgcccctcgacctctgcgccggtgcctgctgggaaatgtagttccttgccgagtccaacagagaaaggacgtcgctgttgaaatgtgaatcccggcggacacgccaaattgcgaggcgacggaaacggaaagactcttttctcctctctccgccaccggcttctgaacagcctggcgggaaatgtagtcccaagctttcactcgcgagtggaggggaaggatttatgtcaccagtggggatcagtgcgggtgggggagaaaaacgtcgggcgatccgggaataaagaatgtccgcctctccatggggcgaggacttcgcgtttcaggggagggcccttaaaggaaggcagcaggaatcagtcttgtcgaacaggggggcgtggttctcgtcgagagtgcattcacactcttgttccctagaaagcctgggcacctcccactcgattcctgctcctcagacctccgggaatcagtgtcttacaagacgtgcgggctccggggaaaaggacctggagtcacagcgaatccccgccccgccccgggaagccaccaaaccttgctttttctcatctgcaaaatggggacaatggggataatgatccccacctcgaagcacagttgtgagtgttaaacaagccaatgttcttgtcaccaaagtgcccaactctggcacggggcacgcggtggtagatccctttctaaggtcccttccagcccagccgttctgggagcccaggaatccatgatgccggacagagttcgctcctgtgagaagaaaactgacccgcaggctcctcccagattgaaccgacccccgcccctcctcatcggggtcctccagcgtctgttaccgagcactgctcccagggggcgctcaatctccattcgactgaggtactacaaacacgatttccgcaacctggagttggaggcattgcaggctgtccagcctcatcccctgcctgatatccagtcagcct

SEQ ID NO: 10057 - DNA, 1153 bp, Homo sapiens
agtggcttccctagtgttcccagggggtcttgccaaaaccggattcattgtgggattcagagcaacccttgggctgctcatggagcgaccttggtatcaccctaagctgtcttccccaccctctgagtgttactgtcctcctctccaaagccagctgtaatttcagggtcccactggccctgggtccagctataacagtcacaggtgataacagctacatatcagtgtctctcgcgtattattttgctctcccaagagtcctgcgagggaaagattcttagccccattctgcagatgcagaaacggagacttaaggaggttaaatcagttgcttgaggtcacactcccaaaaggagcaaactcaggatcagacccagcttgacccgtgggtgctgcacctcatccgtcacctggccagggtccctagaaggaagggtctttcccctgttgttagctttcggggcccctgatgtcccctctcccccaacagcccgtgctcccacacacagctgtgtgcctcttgtgtggggaggctgggaaggaggacacggtggagggagaggaagagaaatttggtttgagcctcatggagtgtacaatctgcaacgagatcgtccaccccggctgcctgaaggtgatggccctgggaccccggcgtctggggtggggcagattgtcagggagcagagagtgggggatcaccctggctctgggcttcctggccaaccccccactcactgccctcctgcctacagatggggaaggctgagggtgtcatcaatgcagagatccccaactgctgggagtgccctcgctgcacccaggaaggccgcaccagcaaggtaggggctgggctgggctgagctgtgggtaggtgggtgttggggagctgtgcaggtcctcacccccagcttctgtcccgcctaggattcaggtgaggggcctggccgccgtagggccgacaacggcgaggagggcgccagcttggggagcggatggaagctgacagaggagccaccgcttccaccgcccccgcccaggcgcaagggccccctgcctgccgggccccccccggaggacgtgcctgggccccccaaacgaaaggaaagggaggcagggaatgagcctcccaccccaaggaaaaaggtgagcc

SEQ ID NO: 10058 - DNA, 1402 bp, Homo sapiens
tccatcccctgggggagtgggtcagaggtactggagggtgctgagccgaagggacggtgggaggggggttatggtgcaagtgttgggggggagaatggggaaaggacacacacaggatatgggagccaggggctgggggaggtggaaggggcggggggcggggcagacagcagaccaccaagggttcagggaacaaagaccagttacttggagtggggggtgggggtggggccacaaaaggaaaaccggaggagcaattggggatccaggtgtcagaggtaggggaaccaggggcaagctggggctgagctggaggtggggatgagagcaggtgtggggacagcaatacccccttgggggtcacctctctgcttcccccctccccaggcttcagttccttccccctgaccctgactccttgaacgtcactgaaaacggcagctattgcaaggagtgggggccgcgggcagccgctcttcagctcgcggcccaggggagtggcgaggggcgccccaaccccctgcccgcctctccgcacaatacttgaacattcatctgtactgaagtgttacttgaaccgggggaatctcggacctgggggagccggggtgtgaggggactggaccagcttggactgagacctgagaccgggccggtgggcgcccatttgggactgcgccacccccaggcttgttcttgttttactgtattgagcggcggcacccgccggacccgcattatggctgggggcgccagcccaagaatggggaccatgggactcctccagcctggctcttcccactctttcatcgtcatggaaacttgtatcccatttgcccagggaactgccactcctggttgccatggaaatagcagccaacggacacctcccgatgccagtgctaaggctggaaatggccccctcttagttgccatgggaacctagtaacagactctgctggccctccttccctgccccttcctcgagcgcggggtggggcttcgggaccccggggatgagccgggccaggtcccgcccctccgcgcaggcctccggggggccggggcttaccatgtaggggaggggagatctatccacatacctcaggtaacagggaggtgcgcgggtggggggagggctgggcggaccaaaggccggaggggtggggcctggggatagcgagaggcttgagaatggggccgcttgggggagggaagaggcagcccggcgaggggcaagcgggggacccagccgggctgggcccctgggccccgggtctgtacaatacggtttgctataaaactcaaaatcttccagccggggctgcggagttcgtgtgtgtatctgcggggtccctacctacagatgagtgggctcacctctcctggactcattttggga

SEQ ID NO: 10059 - DNA, 1100 bp, Homo sapiens
tttttttgagacggagtctcgctgtgttgcccaggctggagtgcagtggtgtgatctcggcttagtgcaacctctgcctgccaggttcaagtgattctcctgcctcaccctcctgagtagctgggattacaggtgcccaccatcacatccagctaaatttttttttttgtatttttagtagagacagggttttatcatgttggacaggctggtcttgaactcctgacttctggtgatccgtccacctcatcctcccaaagtgttgggattataagtgtgagctgccacacccggcctagtttgcacatttctgttcttaattcttgctgttattctgtggtgagaagaattcagggaaaaggggtcaggtctgatggatcccttattttgggccccttcccttgcccctcactttcccggatctctctcttgacttcatggagcttgctaaagtttcccgaaggacaaaggaacagtggtcagtgttgagaccccataccaactcctgttctttccccagctggacgagttctatattggacagattccactgaaggaagtgacttttgcaaggctgaatgacaacgtgcgggagaccttcctgaaggatatgtgccgtaagtacggtgaggtggaagaggtagagatcctccttcacccccgtacgcgcaagcacctgggcctggcccgtgtgctcttcaccagcactcggggcgccaaggaaacggtcaaaaacctccaccttacctccgtcatgggcaacatcatccatgcccagcttgacatcaaaggtgaggactcctctgcctgccactcaggcttggcctccagcggaggttgtacatgcaaatgcctgtcagggtcaggcaggcgcccagggtcatgatctgaaactgctggggccagttgtgtttctgaaatcagatcagattttagagtggaattatggtacatggatttttgtgtgtgtggtgtctccagcaaggtcgggcaataggccataatcaagcacataactatctgtaaaaaaaaaaaaaaatcatatgaagggttgtactaggtaagatgaatagattgtagtaaatcagcccaggtcaggt

SEQ ID NO: 10060 - DNA, 1165 bp, Homo sapiens
taaataccatgtttctttcctcacaaggtgtttctgaggtgttcactccacagctcctgcaggctccgttagtcccccggttgctgttctgcatgctttagtttacaggataaagagcatggggtgatcgagcctctgggtttgaattccaatttttccaatgaccaattctgtgactttgtgtaggtcgcttttaagcctctagaacagaggtactgatgcttcccttctggtgatccaacatggtaaaataagtagaagtgtttttgataaatcgtgaagtgtcataaaatatgttgtttgtggtagtttagaggtagagataaggtagaaggtcccaaaggtagagttatggtaggagaactgaaatcctgaaacccagattccaagaaattgtaggaaacttgaggcctgagaaagcaggaataccagatcaggaaggagttagtatctccatctgacaattggttcccatttccctccctccaggacaacaacgaatgaaatactatgaactaattgtcaatggctcctacacccctcagactgtgcccactgggggcaaggccctgagtgagaagttccaaggctcgggtgcagccactgagacggtgagaagtttgtggctaccacagcccctagccatgtgggcatggtgtccgggtgcccggagcaggagcagtcttcgggaggttccgggctttcccgttaaacaaagaagagccaagcaaagctgctgagatgctttcaaaagacagggaactaggggccaggcacagtggctcacgcctgtaatcccagcactttgggaggccgaggcgggtggatcatgaggtcaggtgattgaaaccatcctgactaacacggtgaaaccccatctctactaaaactgcaaaaaattagccaggcatggtggtgggcgcctgtagtcctagctacttgggaggctgaggcaggagaatggcatgaacccgggaggcggagcttgcagtgagccgagatcacgccactggactccagcctgggcaatagagcgagactccgtctcaaaaaaaaaaaaagggaactaggattcctggtttgggaaagggcaggtctcaagtggtgtttgagcccattcctctctccttgccctgctctgtcgctctaggccgaatcccgccgc

SEQ ID NO: 10061 - DNA, 1118 bp, Homo sapiens
ttcacccaatccttcgtccagactgggtcctgagacccactttaggaaggtttgagtgccagagcagcctgcttcccagtctccaagcctccacttcctcttgcttccgacatccctgtgcagtccccatgtctgtgtggtggactccttgtccttgagttcagcttgtcccctgggatgctttccttttcgggcctcttcagacagagtctggggcttcctttgccatcctccccgcatgctgatgtttatctcacagtgaaaatggtttgcttatgcagctccttggtctgttggacttccccgtccctagcccagagcccagcatccacagcagggagtgagtgaggagcccacggctggccaagtgaggtctgcccacctctcctgactgccccttctggatttccaggcgaggacgaggaaagcgattcgtcttccaaatgttctctgtatgctgactcagatggcgaaaatgacagcacatcagactccgagagcagcagctcttccagctcctcatcctcctcctcctcctcgtcctcatcctcctcgtcctcttcatcctctgagtcctcctctgaagatgaagaggaagaggagcggccagcagcccttccctcagcctccccgccccccagagaagtcccagtgcccacgccagcacctgtggaggtgccagtgccggaaagggttgcaggctccccagtcacacccctgcccgaacaggaggcgtctccagcaaggcctgcaggtaggtgccacagggctgtcggttagatcgctgtgtgtgtgagagagagagagaaaacagtggtgcttgcatttattgtgtacaagtgtgtgactttattagaaaaacatacaaagaaaatgtcaccatctcctgtcactaccttctagagacattgattgtctgacacacttcaaactgtaccgtcatggtggtttacagaaccccaggctaagctgcatactaaagtaaaatgggttggtctcttctcaagtaaattaaggagaaagtgcccagttgaataagttcttcctcctaatttttcttaagcctgttcttcagtgagtagtgaacaagtgcaggttattaaatgggcaaataggta

SEQ ID NO: 10062 - DNA, 1874 bp, Homo sapiens
gtggtgccgcccttctcagcgtggttacagcttgttgtgatggtgtctcctgttggactgtggctccgggaggacatggaaggtgtgtgtgtggactccgagtgtcccacacacgtgtcacagcgggaacgaatgggtgggaaaccccctctcatcaagggagttcatcttgctgggatgtggggctgaggccagggcgtctgtgttccctccggggttcctgggcggaagtgggggagagcacacagcctgtggtcatgggcggccagggtggctgagcctgggtctccctgacctcctttccttcctatgtgcttccttcccaggccccacggaggagtcaccccccagtgcgcctctgcgtcccccagaaccacctgctgggcccccggcccctgccccacgccccgatgagcgtccctcttctcccatccccctcctgcccccacccaagaaacgccggaaaactgtctccttctctgccatcgaggtggtgccagccccggagccccctccagccacaccgccgcaggccaagtttcccggcccagcctcccgcaaggctccccggggcgtggagcggaccatccgcaacctgcccctggaccacgcatctctggtcaagagttggcccgaggaggtgtcccgaggaggccggagccgggctggaggccgaggccgcctcaccgaggaagaggaggctgagccagggacagaggtggacctggcggtcctggccgacctggccctgacccctgcccggcgcgggctgcctgccctgcctgctgttgaagactcagaggccacagagacatcggacgaggccgagcgccctaggcccctgctcagccacatcctcctggagcacaactatgccctggccgtcaagcccacgccccctgcgccagccctgcggcccccggagccagtgcccgcacccgccgccctcttcagttccccagctgatgaggtcctggaggcccccgaggtggtggtggctgaggcggaggagcccaagccgcagcaactgcagcagcagcgggaggagggcgaagaggagggggaggaagagggggaggaagaggaggaggagtcctctgacagcagcagcagcagcgatggggagggcgccctccggaggcgcagcctccgctcccacgcccggcgccgccgccctccgcccccacccccgccgccaccgccccgcgcctacgagccacgcagtgagtttgaacagatgaccatcctgtatgacatttggaactcgggcctggactcagaggacatgagttacctgcggcttacgtacgagcggctgctgcagcagacaagcggggctgactggctcaacgacactcactgggtccatcacacaaatatcctgagtgtgggcggccttccccgggcttgggtcctcccccgacccctccaggcacctgcatctgtgccccactctgtctgcctcccctctggctccaagccatcttttctctcctcctggtgcctcttttctgccttccaaagcatttctggcaggaacgatggggctggggcttcctcccctgtccctcacctgggtatgctcagcggcgtgggccccgccctctcctttggctgggacgcaggtggccagagaggagccgttctcttccttaacaccctgcactcaccaacctgaccaccccaaaacgcaagcggcggccccaggatgggccccgggagcaccagacaggctcagcccgcagcgaaggctactaccccatcagcaagaaggagaaggacaagtacctggacgtgtgcccagtctcggcccggcagctggagggcgtggacactcaggtgggcctaaccccgccgccgcgtcctcctgccac

SEQ ID NO: 10063 - DNA, 1220 bp, Homo sapiens
taccctgcatgggacccctcccaggacccctcctctgagcctagagctgggagcacctgtgtgtgcatagcagggagagggtgggagagctggagagccagccttggggacccaggtagggcctgctcatggactcagccttccttgtccccaggcgaaagacagtgatgatgaagaggaggtggtccacgtggatcgggaccacttcatggatgagttctttgaacaggtaatgggcctccaaggcccccagccccagccccagccccagcacccagccccagcccctagtcccaccgcccagcctcagccccggcacccagccccagccccagcacccagccccagcccctagtcccaccgcccagccgcagccccggcacccagcccctagccaccgacaacttccttttccctgtcccccacttccctgctcctgcaccctccctggccttttatcagccgttctggggctggtccattcccctgaaccctggctggttcccctggaacccgttgtttggcctgacagcttggctgggtatagccgattttctgctccaggtggaagagatccggggctgcattgagaaactgtcggaggatgtggagcaggtgaaaaaacagcatagcgccatcctggccgcacccaacccagatgagagtgagtgtggctgccggtgactgtggggtgggaggagaaggggcctggggttcccacccagacatctcacttgccctcgccctcccctcagagaccaaacaggagctggaggatctcactgcagacatcaagaagacggccaacaaggttcggtccaaattgaaaggtgaggagtacaatccctcaaccaggaaggaaaagaattgtgggtggagcatggtggctcaggcctttgggagggcgaggcggggccaattgctcaatcccaggagttcaacaccagcctgggcaacatggcaaaactctgtctctacaaaaaatacaaaaattagctgggccagtttgggaggccgaggcgggtgaatcacgaggtccggagttcaagaccagcctggccaagatggtgaaaccccatctctactaaaagcacaaaaattagctgggtgtggtggcgggcgcctgtaatcccagctactcaggaggctgaggcagagaattgcttgaacccgggaggtggaggttacagtgagctgagatcgcgccactgcactacagt

SEQ ID NO: 10064 - DNA, 1201 bp, Homo sapiens
ggtgaagccataccactgcgagaagtgcggcaaggacttccggcagccggcggacctggccatgcaccggcgtgtgcacacaggcgaccggccgttcaagtgcctgcaatgtgacaagacgttcgtggcgtcctgggacctcaagcggcacgcgctggtgcactctggccagcggcccttccgctgtgaggagtgcgggcgagccttcgccgagcgtgccagcctcacgaagcatagccgggtgcactcgggggagcgccccttccactgtaacgcatgtgggaaatcctttgtggtgtcgtcgagcctgaggaagcacgagcggacccatcgaagcagtgaggccgcgggtgtgccccctgcacaggagctggtggtggggttggcgctgcctgtgggcgtggcaggtgagagttcagccgccccggcagcaggggcggggctgggggaccctccagcagggctgctagggctgcccccggagtcaggtggtgtgatggccacacagtggcaggtggtgggcatgacggtggagcatgtggaatgccaagatgctggtgtccgggaggctcctggtcccttggaaggggcaggcgaggcggggggtgaggaggctgacgagaagcccccccagtttgtgtgccgagagtgcaaggagaccttctccacaatgacgctgctgcgtcggcacgagcgctcacacccggagctccggcccttcccctgcacccagtgcggcaagagcttctctgaccgggctgggctgcgcaaacacagccgcactcacagctcagtgcgcccctacacctgcccccattgtcccaaggccttcttgagtgccagcgacttgcgcaagcatgaacgcacccaccctgtgcccatggggacccccacacccctggagcccctggtggctttgctaggaatgcctgaagaggggccggcctgaagcccatgaccccccagcaccacactccgggagcccagcccccatcgggggcttcctgtacctccttttgcctggctctgctctttagactccagatccctacccctcagcaactagctcccctgtcggccagctaagagagctgggacagtggaggctggcagaagctgagacgtgactgtctaggagtaacactcattaaagctttcattttggcaccaggtcatcttctgtgttctggttgggagtgaa

SEQ ID NO: 10065 - DNA, 1099 bp, Homo sapiens
tccggctcccccgggagctgctggaacaccagcagtcccatgagggtgaaaggcaggagccacgctgggaggagaaagggatgcccaccaccaatgggcacacagatgagagcagccaggaccagctccccagtgcacagatgctgaatggctctgcggagctcagcacctctggggagctggaggacagtggcctggaggaataccggcctttccgctgtggggactgtggccgtacttaccgccatgctgggagcctcatcaaccatcgaaagagccaccagacaggtgtctacccctgctcactctgttctaagcagctgttcaatgcggctgccctcaaaaaccatgtgcgggctcatcacaggcccaggcaaggagttggggaaaatgggcagccatcagtcccaccagctcccctgctgctggctgagaccacccacaaagaggaagaggaccccaccaccaccctggaccatcggccctataagtgcagtgagtgtggtcgtgcttaccgccaccgggggagcctggtgaaccatcgccacagccatcggactggagagtaccagtgctcactctgtccccgcaagtaccccaatctcatggccctgcgcaaccacgtgcgggtacattgcaaggctgctcgccgaagtgcagacatcggggctgagggtgcccccagccacctcaaggtagaactcccgcctgacccagtggaggcagaggcagccccgcacacagatcaggaccatgtgtgcaaacatgaagaagaggccacggacatcaccccagcagcagacaagacagcagcacatatctgtagcatctgtgggctgctctttgaagacgctgagagccttgaacgtcatggcctgactcatggggcaggggaaaaggaaaatagcagaacagagaccacaatgtcacctcctagggcctttgcctgccgagactgtggaaagagctatcgccactcaggcagccttatcaaccacaggcagacccaccagacaggagacttcagttgtggggcctgtgccaagcacttccacaccatggctgccatgaagaaccacttgcgccggcacagtcggcg

SEQ ID NO: 10066 - DNA, 1544 bp, Homo sapiens
acagcagtggttctttcaaaatgtggatcatgtccaagttggtgaacaaaactagtgaaagacctgaccacatgaagtaaagcattgaactcctgtttaggttgtattgatgtttgtgtactagatttgaatgtaaaatgggtttcttatttaattcggggaccttcaactgaaagttgataaatactgatggacttttctgtgtggtcttgttgggcatttcactcctgagccctggtttccatactgtatactgggtgttaacatgtttcaaaggataattgtcaaactgaatctgaaatttatcagcatggctggcatatagggactcaaaagggatgtggatttctttttagttgtcttccataaaccaaatgataccagttgcttgatggatactaggtgctttaggttttttcctgtgttttttattttaccttttcacatttgcattttctctgttcaacaagcagaacaggataattcagacaacaacaccatctttgtgcaaggcctgggtgagaatgttacaattgagtctgtggctgattacttcaagcagattggtattattaaggtacttgtggagaggagtgggagctttctgtcagtgttgtaggcttgtggatttcacacattagtaaaagcaagtctttaatggttgccagcagtaaaaacaagtcttagtggttgttgccagcttaatttgttgaggaaagagccttagttactgttttctaaaagagaagttctatcttaacacaaaaagtataacttatcagagtaccctaaactcttgagatttgtactctatagtaacttttagttttatctttcaatattggagtgagagacagttttctttaatggaggtttacatgtgaggtaggaagaagtaactgggaagaggggagctgaagtttgggaattataaacctcatgttctagaggaagaagatggaaagggagtactgtagcctttaaaattgatgttacctcattttgctttcttcagacaaacaagaaaacgggacagcccatgattaatttgtacacagacagggaaactggcaagctgaagggagaggcaacggtctcttttgatgacccaccttcagctaaagcagctattgactggtttgatggtatgtatgagaaggctggcagaggtggggctggggatatagggcagcaagccttaggaaacaagccatagtttgagggttcttttgagtcttccaacacttactttagctgcggtttcaggtagtctcatttttgcttatgtgtcagcagattataaaccatttgagaaaggcacgcttctcttgtattttcggattaatgtgtcttgcatttaaagtctgttgatgattttttgtttctctaggtaaagaattctccggaaatcctatcaaggtctcatttgctactcgccgggcagactttaatcggggtggtggcaatggtcgtggaggccgagggcgaggaggtgaggagctacctgctagtggtgcagaggggtaatggggagagtgcagaag

SEQ ID NO: 10067 - DNA, 1159 bp, Homo sapiens
tgggaccaaagaatccttaatttttcagcggggaggctcggggaacataggggaatgggaatatgatagatcttgtttcttttgtcctagggggtaactacggggatgatcgtcgtggtggcagaggaggctatgatcgaggcggctaccggggccgcggcggggaccgtggaggcttccgagggggccggggtggtggggacagaggtggctttggccctggcaagatggattccaggtaagactttaaatcagaataaaaaagtagagcagttgaacagaggccataggataacagggttttgttgagaaagtggtttcattttgagggctaggtggaaagacctgaggttgtaaccagtagtggagagggaaggaaaattaactcagggggagtgaatctgtagacccacttgagataagatactcgctgggttaggtaggaggggcagataggatatctaggcttggagaggctggtaactcaaatataatggatacttaatttttttttttttttttgcaggggtgagcacagacaggatcgcagggagaggccgtattaattagcctggctccccaggttctggaacagctttttgtcctgtacccagtgttaccctcgttattttgtaaccttccaattcctgatcacccaagggtttttttgtgtcggactatgtaattgtaactatacctctggttcccattaaaagtgaccattttagttaaattttgttcctcttcccccttttcactttcctggaagatcgatgtcccgatcaggaaggtagagagttttcctgttcagattaccctgcccagcaggaactggaatacagtgttcggggagaaggccaaatgatatccttgagagcagagattaaacttttctgtcatggggaaagttggtgtataaatgagaaatgaagaacatgggatgtcatgagtgttggcctaaatttgcccagctatggggaatttttcctttaccacatttatttgcatactggtcttagtttatttgcagcagtttatccctttttaagaactctttgatcttttggcccttttaatggtgaggctcaaacaaactacatttaaatggggcagtattcagatttgaccatggtggagagcgcttagccactctgggtct

SEQ ID NO: 10068 - DNA, 1220 bp, Homo sapiens
ggcagcaccccatgatctctccccaggactgcaggatgccggctggaagaccgagaagcaccagctagaggtggatgagtggagggccacatggcttctgtctcccgaaaagaaggtcttgtgagcagcccagacggaggcccaagcccagggcaggaacctggagcaaggacactttggccacagcaggacaggggaaaggcagctttatttttccttagggcaactgcagcgggtgggccaggccctcatgggaagtgactgccaatcagatgcagtgggccccaggcagaggaaggccgggagaaggggagccaggaccttctcaccccactgccccttccccttttctggggagcaccgcaggctcctcacccccacttcctgtgaggctgtggcttatggtgtccaacgcagttggtcttaggcatagaagccccagaggaacacggccactgccatcatgagcagggcattgaggttgaccacacgggcccagctcgggtcctcgctgatgtcctccagccgcctggctgctgccgctgcctcctcctgggtaaggggcggaggactgcccaccccacctctgctcattccacaaaaccagagcaggcactggcggaagaggcttggtgccggggcctggggctctgagggaaattgaggccctgcagttagtttgcgggaactcagctcctccagccccacctcccagcatggtgccctaccattcatctccatggcactctctgggcacccattctgtacagggagtgaggagccttgctgctcatcagcatccaggtcctcccgttcctccttgctatgccggagactgaagaccaggcggtggagctggggagggtgggagcacgaacgaggtgggagttctgtccccccatgcctggccctaaagtctcttgcacaccagctcgtcactgcctgccctacccacctctgtccagtctacacacccagcccaggcttaactcatgccaactccaccctacatggctgccctgtgccctcgggataaaccccaagcccctgagcttgtgtttaaagccgttggccttgctcccccagctttgtcagctcaggtctgtctacacccagatggtagcgcttgtgacactggcctggcagtcctgctcacagtgttctgtgcctgtgtgctcccaccctttcctcctgctgctgcagaaacccggccatccttc

SEQ ID NO: 10069 - DNA, 1157 bp, Homo sapiens
ggagttcagtggtgcaatcttggctcactgcaacctccacttcctggttcaagtgattctcctgcctcaggttcctgagtagctgggattacaggcatgtgccaccacgcccagctaattttttgtatttttagtagagatggggtttcatcatgttggccaggctagtctcgaacttaggtgatccacccatctcggcatcccaaagtgctgagattacaggtatgagctaccgcgcccggcctcgatgccttagttttatactttatattccatataggcatagtatctacactggttttgtggattttgtatcattctctttccacagagttagagaatacatagaaaatattattgtgtttaaaagtatcttattgaatatttcaggtcactcatataaatcagtcagttttcttagctctcttatttcatcttggtttgtcaagtgatgaactctgcccatggccacatggtcaatgtgctatttatttttatttcagggactgttgacattcagggatgtggccatagaattctctcgggaggagtgggaacacctggactcagatcagaagcttttatatggggatgtgatgttagagaactacggaaacctggtctctctgggtgaggataacttgcctttggaatatctaatatctaataactaagggttttatttctttcctttgtagaatgtcacttgggagcttatgctttatatgaatgaattcagattcctgtttccaggaaaaaaaaattgtgggtttgttgtagaaaagacttcctaatgtttgatcttgacatttgccttctttcttgaggtgatgtagaagcttcactctagtttagtagtgattctagaaaattgagtgacataaactatcattgcccacactttaaaatctaattccttctccttatttttgatttagtcatacttggaagtgaagctcaggattcctgtgtttaaaatgcttcctgaatattctaaagaagctgacaggaaacagtatttggggaagtaattttctaggatcctctataatgttccctctttactgagtatcctactgagctggcaattaaagaactcccagcaagagtcatgtgactttttctaataaaacaggtctcgctgtctctaagccgga

SEQ ID NO: 10070 - DNA, 1453 bp, Homo sapiens
cagaagctcctcaaaacagttttattaaattgcctttcattttttgtggtacgtgcttgatcatgaatttgtacatattcttttgtaggtaacaattcaggttttaaaccagcttatccaaaagattcgagaagacctcccgaatcttgaatccagtgaagaaacagagcagattaacaaacattttcataacacactggagcatttgcgcttgcggcgggaatcaccagaatccgaggggccaatttatgaaggtctcatcctttaaaaaggaaatagctcaccatactcctttccatgtacatccagtgagggttttattacgctaggtttcccttccatagattgtgcctttcagaaatgctgaggtaggtttcccatttcttacctgtgatgtgttttacccagcacctccggacactcaccttcaggaccttaataaaattattcacttggtaagtgttcaagtctttctgatcaccccaagtagcatgactgatctgcaatttaaaattcctgtgatctgtaaaaaaaaaaaaaaaaaaaaacacaaaacccacaagcacttatcttggctactaatgaagctctccttttttttgtttgtttgtttgcttcattgttgattgtgtattttcttcattcctggggagtactaacccaaaagcgtctgtctcttgttttctagtccagtttgagattaatttagaagaaaggaatactgtatgtgaaattcatcttgggctttcccctaaattgcaagataaggccatgtgtaagattttccctaaaactagaatatattaatgcatgtttgagaattttaaagcaccatggtcaaaaccagaagctatattttgcatatttggactcagccatccattaagaacccatgttgtcctctggacatatttatcaatataattgggttttaaatagtataaaagaaaacttgtgatctatataatttatgtatcaccttcattgtaaatttagcaggaaatgcatcacaattatgatttttttttttgcaccagtgaaacaataaagatgctattaacaattttggagctttttttcccctttcatactatctttaattgataaaaagtactagtagtatggctatagagtttaatagtcattctcatatattcacagagctcacttaactctagttttaagcacttgttgaacaaggcagcatctactcttttagtcatttataccccttttctttcctcaactttaccctgcttttcccaaggcatgatgaattcacataaaccccccaaaggctcaccaccgatactagttacctactatataataaaccatcccaaaacttactgtcttaaaacagcaaacatttatctcacaggtctctggatcaggaatttgggagcagcttagctggtggttctggcaaagagtgtggtgtaaggttgcaaac

SEQ ID NO: 10071 - DNA, 1149 bp, Homo sapiens
actctttgagtactttgactacgagtccagaaagagcatgagttgttatgtgcttagtaatgttctggattataacacagaaattgtctctcaagaccaggtaagagaatacctacgtgctattttagggaaacagtgttacaattttagactttggacctagatacctgagatgggaggggagggtaattcaatactaaataaaatttacaagtaactttttcattatataaattaaaaattggagatgtataaagaattataaaacatttataattccaccagatagagaataaccactgttaattaacatttggtgcatatctttccagacttttgtctgtatatgtgtgtatgacatacatgtgtatcgactttctcaccaaaaaaaggaatatcttgttgatactgtattgtaattttataactggaaacacttttgataatggctttgtatgccaatggtttcacctcagtgggtttcttgtgcctcgcatgttacaggtggattccataatgaatttggtatccacgttgattcaagatcagccagatcaacctgtagaagaccctgatccagaagattttgctgatgagcagagccttgtgggccgcttcattcatctgctgcgctctgaggaccctgaccagcagtacttggtatgagtttacccttagtatatccctgtatcagctcctagtgaaatcacatgttcaagtgcttaaaatggtttaattcactttctggtcttagatggttttgaaggaattgcaactgaattaaagattcacttgaacctgggaggcggaggttgtagtgagccgagattgtgccactgcactccagcctgggcaacacagcgagactccatctcgaaaaaaaaaaagattcatggcatccatgggcttttactttatatataaacacataattgtttgtaaacttctggagcatgtgagtaacaattcagttgctctgatttcttttgaagactctctgagaattacaaaaaagtctgtcttcttttgcttgagtgccgataattattccatgttcattttttctgaactatgtattgcttataataaactttataagaaatacaattcttatatttaattttacttttccaaatttgcaagtataaa

SEQ ID NO: 10072 - DNA, 1247 bp, Homo sapiens
ttccctcacaaagcttacattccaattaaaaacaaaatattcaacagtaaaatgatgtagttagcagtacaccataagtgttacattttttagccttttgtttttgtttttggtttgtggggatggggtctcattatgttgcccaggccagttttaaactcctggcctaaagcgatcttcctgccttggcctcccaaagcactggattacggacatgagccaccatgcccatccttctagcctttttcaattaaggaagttgccataagagcaagtccagttggcccaggatgaggagttggggaaagtaatttgccctttaaatttatactgtcctctccatggtactttttaccctagagtctgttccctttgaaatttaacactaagccaatgaagttgaaagtgattttttataaagcattggtgtactatagagataagtaggaaatacacaaaggagaaggatagtagtaagttggtcctgtaaatactgtgtaaagacttttctgtttctttgcagtgaagaaacaactggtgacatcagtgattccatggattttgtactgctcaactttgcagaaatgaacaagctctgggtgcgaatgcagcatcagggacatagccgagatagagaaaaaagagaacgagaaagacaagaactgagaattttagtgggaacaaatttggtgcgcctcagtcagttggaaggtgtaaatgtggaacgttacaaacaggtttatatatttttgttacctcttcttatgttcagagataaactgaaatctgatttttaaaatcagaatatttttgttatacaatagtacattgaaaaacatcttaaaatggctgttattgaagaagacttaaacggaaagatatatatgcagtgtttgtggattggaagacttaatattgtcaaaatagcatttaaaaagaattgatttatagatccaatgtaatctcagtcaaaatcccagcagacttttgtagaaattaagaagctgattctaaagtttatatgaagaaacaaagaacctggaacagctacaacgaatttgaaaaggaagaacaagttgaaagacccaagcaacctgaattaatgatttactctaaagctgcagtgagatcctgtgtggtattggtgaaaaggatagacacacaaatcaatggaggggaataaaacagggaatggcaaactttacctgtgagggaccagataataaatggtttttggctttgtaaga

SEQ ID NO: 10073 - DNA, 1832 bp, Homo sapiens
caggcagacctccctcttccattcctagaggcagtttagctgctggattcgttcctctcccatcttgcagagcagccaggctgacactgttgtctctcctgccaggatgactatcctccctccagtggagaagctgaaaacggtgctgcagaaggtgaaagacttccacatcaacttcctggagaagtacgcgtgaggacgcctgagccccagcgggagacctgtccttggctcttcctcccaatgcccgtcaggctgaactcgcctcccccgtgactctgcctcgggcctcgcagaggccgctggtcacttcgtcatcattttgcccctggagacgtctttctttgtgccttgatgttgagagcgcctctcttttgagcaaacaagcattctatatgcaaccagagtagaggggacctgctcagcaggtgtgaccagggttctctgaatctgttattgtttttgcttctggaaagttcatttggggtttacaacaactaggatgtgttgggtgagatgtttcagatctggagaaatgagcaggtgtcgggaaatgtgtgacttaaccgtggtgagggctggaaatccaaactcaccaccatgatctgtgaaataaagcccttagcggtgtgaagcatccggtcctttgaacagaagggcctggaaggcccctggggctgagaaagggtccgcccggtggcctggaggcaggcgccgggagcgcagtagcacgtggactgggcaggatgttgcactagcttggggtagatgctgggggctgcggccacggtcagagggccccactgtgaggcgtgggtgtgagccaggctgcaggaggaactgggcctccgcttcccagcaacgcagccaggcctgagaattctgtgcgcccggcgggctttgggaatgaggggttcccttgaacatgcgtaggctggaaccccgtctgagaggtctccctgaatttcagtgacacatagtgcagcccggcagtgtcccacttccgtggagagagccgctggaatggtgtggacccatcccgcgggtgaccggtgcctgttctcccctgaccgagcctgtgagcacatcgccccctgctggcgacagcggggaaatgagggctgaaaatatcctccccacaagggcaatccccgggacctgccgagcagccaaggccctgtcctttcttgaatggtggcgagctgaatctggtcggtttcctagcttttaggtggtaaaagtgcctggcagcttggctgccgtggaggagtcagtcgtggttggaggttcattgccgtgctttcatgcagagtgttttgccttcatgttagcttccggctcccctcccaggctgcagactctgacctgtggcatcaggcttctcccagtacaggagggtgccatcccccagcatgcggcttctctgccattagcagccctgggcgggccgaccacactcgaggctgcggtgctacgggcttagccctcgcctccctcactgggagcttccccatcctccctgccttccccagtgggaagttagggaagctcaggagcctgggaccccgcatgtcccaaaatgggattggagaagctggagagaaagcagaagaggccgaggagtgaggcagcagcctctatgctgtgatttccacaccgggtccgtgcagaggaaacagaaactcccaactgtccttacccaccgacatcacagcccctatgaagaaagtagccacaatctcaaataacaaaagggaatgttctaaaactttttcttccttaaaaaatggagaaaattgcacttgtgcttgctgtgtggtatataaaccagg

SEQ ID NO: 10074 - DNA, 1702 bp, Homo sapiens
gtccagtccacattcctttttttaacttttttttttttgagatggagtcttgctctgtcacccaggctggagtgcagtggcacaatctcagcttactgcaacttccacctcccaggttcaagcgattctcctgcctcagccttctgactagctaggattacaggtacccaccaccatgcctggctaattttttgtatttttagtagagacaaggcttcaccatgttgtccaggctggtctcatctcctgacctcattatccgcccgcctcagccttccaaagtgctgggtgggattataagcatgaaccaccacacccagcccctttttaaactcttaaacagacactggattctatgtatcaaaaggaaagttgatgaaaatattacaaccaacctggtttttgtttgttttaataaaggaactagaagatcttctgccatctagaccggaagttcctaacataattggagaaacagaggaggtagagcttcaggaatttgatagcactcgaggctcaggaggtggtcagaggcgtgaagcctataatgatagctctgatgaagaaagcagcagccatcatggacctggagtgcagtgtgcccatcagtaaactctgcaaacaaattgcacaggtggattttctttccacatttgcctgatttgttctcagcaatccagctggagtgtcttatcaatccagatgaactgagggacatctgttggtctatgtataacttttaaaattggtatagtatctacagagtgtataatttaaactaaccacaaagctttacatcttcattttgactgttccatagcagaataaagcacttgaaaggaaacaagactccctttcacacatggattattataagtttcaatcctggtatctgtgcttgatttttatcagttttgtgtagatttttatgtttcatattttaaatttaaatcccacattgtaaagtttgtacaatttgtcctgaagctttgtgtttggctgcacctgcataagctgctacaaatagaataaagaatttcatagcctgtatctatcatttagatgcatggaaaaaaatgggctttgcacacaatgggtttggagctgactgggaacaatggaaaaaattacattagctgtggttgtaaagtttttttgtttttggttttgttttttttttcttttttctttttttttttttttaccatcttgtgaaaggtttctgaaactcgataataaaaagcggttggtgtaaattattcttttgtgtcacatttttagaaggaaaaacataaaagaatgtatccttagtactggttcttaaacagcccataaaaacccattggcctgaagcttatatctcaggcctatgcccatcttatagtcttggaagacaaaaggctggtagagacagtcttcagtggcttcagtgatgctctgtagaggccagggtgtcttgagtgctgtaactcccaagcactgggctagcctgacttctgtatctccctaccaccacccccttaaaaaaataaggtaacagcaaatctatagtaaaaccatgtctgcatagaacgtgttcaaatcctctgttttcattaaatgtaaaagatgctgtctccattaagttgaatatttggaattggagaagccattgattattattttgagtttctgtaatgttttatagaaaagtaagatgctt

SEQ ID NO: 10075 - DNA, 1067 bp, Homo sapiens
ggaattgagccacttgactttgctggctgggtgttaactggttgatgttgggttttatgttgatcttggaccctccccccttccctgttacgatcatgtctggggagcactccagggtgagcctgttctgtaggagccctctgggcattctgtacctttttcaccagaggcagagtctgaaagtgggcaatagttgcagaatatacctggcactgttttgagggcctcagttctgttgctcttatatatgccattgtttaccagttccagtacaccttcctcatggaagtttctcacatactacttgggaatagctagctttcctaatgcggtttagggcactagggacagtggcactttggatttgcagtgagtggtagaaataaggttttgaaattaagtcaaggaacataatgctgcagggtgtacctccataatttttaagaaaatgtatttcttttgtgctttatttataggtatttcagagagatgggaatgatttgcacatgacatataaaataggacttgttgaagctctatgtggatttcagttcacatttaagcaccttgatggacgtcagattgtggtgaaatacccccctggcaaagtaattgaaccaggtaaatcttgattttgtccgattctggttttcaagtatttttgaaaaaaattacaatttgtaatttttttatactgcataactctaaaaaaaattgaacacctcttttgggtaaaattattaatcatttcctcttaaataatagggtgtgttcgtgtagttcgaggtgaagggatgccgcagtatcgtaatccctttgaaaaaggtgatctttacataaagtttgatgtgcagtttcctgaaaacaactggatcaacccagacaagctttctgtaagtgttctttaaattaaacaacagttgacttccaagtttggagttcggtttttggttttttagacagggtctctgtcacccaggctggggtgtagtggtgtgatcgtggctcactgcagcctcgacctcctgggctgaagcgatcctctcacctcagcccccaaggagctg

SEQ ID NO: 10076 - DNA, 1097 bp, Homo sapiens
ctgtcacccagactggggtgcagtggcatgattataactaactgcagcctcgaactccagcagtcctccctcctcagcctccccagtagccaggattacaggtgtgcactaccacgccggctaactttttttatttgtagtagaggcaaggtctcactgtgttgctaggctggtctcagatcctgagctcaagtgatcctaccaccctgacctcgcaaaatgctgggattgcaggcttgagccactgtgcttggcctcagaatgctgctttgaataaaaatttaggtagtgattaaaagaagtccagaaagcatatttaaagaataagggtattaagagtacagtatagtactcttgctgaaagtttcaatgacttctctttccaggagaggtaattaatgaaaaagaccgctgtaaaaaatgtgaagggaagaaggtgattaaagaagtcaagattcttgaagtccacgtagacaaaggcatgaaacatggacagagaattacattcactggggaagcagaccaggccccaggagtggaacccggagacattgttcttttgctacaggagaaagaacatgaggtgattttcctttttttagttttttgtattttgttttattcagaagtacttcttgcttgtgagaaataggttagatctgtttggagtccctggagcaacactgaacactggtgaagttaagggcatcatggtgagttcctaagacgggcttgtgtaagaaagactaacaaggcaggtgcagttagaagcactgtaagagtcagttttagtcctggcttggtttcttccccctgcccctcagttggagtttcactcttgttgcccaggctggagtgcaatggtgcgatctcggctcactacaacctctgcctcccgggttcaagtgattctcctgcctcagcctcccgagtagttgggactacaggcatgcttcttcactcctggctaatttttatttttagtagagacaggctttctccatgttggtcaggctggtctcaagctcccaacctcaggtgatctgcctgcctcagcctcccaaagtgctgggattaaaagcgggagccaccgcgcc

SEQ ID NO: 10077 - DNA, 1131 bp, Homo sapiens
gttataactctagaacattacttctcagaaaagtggatattaagttattacaaaacttttaactggtgtttagttataaccttttttgtttttatccattttcaaaggcatacagaaagttagccaaggaatatcatcctgataagaatccaaatgcaggagacaaagtaagttatttgcaccttttttattccgggggttttagctttaacttaaattgccctccttgaaaaagaggaatgttgcaggaaaaaaatccaactatgcccacacagccacattttcataatgtcaagagtattttagttttagaataagagtactaccattctgaggagcggtgggtggtaaatagaaccagaatcaagtcaaaggtaacttgtccctttttttttttttttagaattaaatggattctggattcctgtagcttctccccactcttctacttgaaaatgcaattatttttatttttaccttttctttatagtttaaagaaataagttttgcatatgaagtactatcaaatcctgagaagcgtgagttatatgacagatacggagagcaaggtcttcgggaaggcagcggcggaggtggtggcatggatgatattttctctcacatttttggtgggggattgttcggcttcatgggcaatcagagtagaagtcgaaatggcagaagaagaggagaggacatgatgcatccactcaagtgaatatcttgttttgttgttttaaaaaattaagtactttttgtcaagtgggataatgactcagtagatgaaaaatctcatagagtgttctgtccttcattagaaaaacttccatttgccttgtcttcttttggtgactaaattgaatttgattatctgaatgtttctatttcgctgtagctcttaaaaggacagtcgatattttttaatgagaggaaggtggttttatatggttctgaggctgcttgttattataggacttaaaatttcaactgtgaagatcattttctctctctctctttttttttttttgagaccgagtttcgctcttgtccaggatggagtgcagtggcacaatctcagctcactgcaacctctgcctcctgggttcaagcgattctcctgcctcagcctcc

SEQ ID NO: 10078 - DNA, 1200 bp, Homo sapiens
agtattaactgtcacgcagggtaccccacacagtgtcccagtgttgaacacaaaatgcaaatctggaagggataaatatcttcaattcagaaacagcattaagtatacctgtataatactgtcaccattatcttccatctgcaattcaccgcatcatcccccaaatgcccacagatctattgcaggaaacctactaatcccaacatctaaagcatgtaggaataagatgtgatattccttttgtgtgtggggagagtgtcaatctaaacgtttaacaaaaggcaaagaatgttcacatttcacatcacaaaagagatttcaaagactcctttaacccgacagcgcttatgtcagtgtctttgtcatgtttcatagaattgttagactttaaaagaacctcctgaaagtctgcctctgaacatttgtatggttctgccaatgtctgatgagaagaatgcttccctgtttgaggagtgtgttcactgatgagaggggacgggagaagcctggttgtgatttcaggaataattctcaaaggagattatactcttattgcaaaatggggtctgctatatattgttcatgtcactttattgcaagtgacatgaattatatgacattaaaaataatatgccttgaatcacactgattagacccagaaggatcattgagtttttggtggttttaaagatccaagaaagacctatctagcccaagtgtatgaatgagaagactgaagcccacagaagtgaactcagcaccagtgtctcaagaaccccagtactctggtttttttcttttttgagacggagtctcgctctgtcgcccaggctggagtgcagtggcgcgatctcggctcactgcaagctccgcctcccgggttcacgctattctcctgcctcagtctcccaagtagctgggactacaggcgcccgacaccatgcccggctaatttcttgtatttttagtagagacggggtttcaccgtgttagccaggatagtctcaatctcctgacctcgtgatccacccgcctcggcctcccaaagtgctgggattacaggcgtgagccaccgcgcctggccttctgtttttgtttttctgtttttttgttttttgagacagagtctcgctctgtcacccaggctagagtgcagtggcgtgatctcggctcactgcaagctccgcctcccgggttcat

SEQ ID NO: 10079 - DNA, 1551 bp, Homo sapiens
tgcacagccctgccgctcattcgctacgcggctctggacgaagggcttcacctctctggcctcgactttccaatcccctaaaacctacttcatgagggggagtctgaggagttggtactaaagtgcctgtcaacctggcgggcgctagggaaacgccggcagcgccgcgggtcgggaactcaccggcgcgaagggcacggagagcctcgggctccctctgccgatgtccgcgcttccctgcccagggtcgagcaaggctgagctgggcaaagttttgaccttgaatggaggtctgggggactagggaccggcgcccctctctgtctgctagggctggcggagacccggcaggccggcgagggtgcggggccgaggtgggcggcgcttcccgggcgcctccgtcagacgggaggcatcgagggctcggccagctgccccgggcgccctgcgcggcggctgggcacgggccggtcactgccccggcgccggcctctcggacgaggccgccgcgcagccacggcgagaggcaccctcactacccccgcgcccagccggctcccagccctaacggcagccggcggggagcgacgccgtcccacggcgcgaggccgcggcgggcgcgcgaggcgcggcgcggggcggggcggggcgggcacatgcgcacaggcggcgcagccggcacgcggcgctcgcgctccctccttaaatgagcctgggcgccccgcgcccgccacttcagtggatcccgcgccggggccgcgggcggagctgcctgccggtcccgcgccgcgcgtccgcactcctcggccctcgggcggtcgatgggacggggcgccgcggagcaggaggcggcgcccgtcggggtgctcgggccgcgcgggagcccactgtggggctcgggcatggcgggccgcaggacctgagctctcctcaggggagcggggaggcagctgctggccggcgatggggacggagtggggccgtcgccgccgcgccgagccgtgagcgccgagccaccgccgccgctacctcagcccttcgcgaagcgccgggcagctcgggaacatggccctggagcggctctgctcggtcctcaaaggtaaggaccggggctggggccacggacggcgccccctgcgggccgaggctggcgcgccgccctgcccgcgcctctgcgtcccttacccgcgcccgggacccgacgcgcctctttgtctggcggggctcgcggctactcggagcggaccgcggggcgcgagccctgcccggctccgccggctctccgggcgcgccgcttccgacccctgcgagtccggccgacgttcgcggggcgcgtgtgggaagagggatcgggtcgggaaggcggccaggaggcccctgggcccagcagggccctccgggctgcgccctcgcgccgcttccgtagaattccgcgcatccctttgcaaagttgtgagattcctgtcgtggagcggaggccgctctttctccagatgtgatggcaaaaagtaattccacgagaacaataaaagccgcggccgtgacgtcgtg

SEQ ID NO: 10080 - DNA, 1247 bp, Homo sapiens
tcctattttcaagtagataataaatgataagaagctaagtatttaaggaccctaagtatttaatgtgccttaagtattcaagtatttattgttttttaatcaattagatcattaattataaaatagctactataaactacaaaaatactaggactgttgaattaggaaatcatatctattatctgctaattgctggagacttttaaaaatgaatcactgtgtatttcagaaatgagtcttttcataacatctttctaccatttataaacgagtctaaaattctttttcagaaagcagatgatagagaaaaacgacaagaagcccaccggtttcattttgatgctatgtgacttgcctttaatattacataatggaatggctgttcacttgattagttgaaacacaaattctggcttgaaaaaataggggagattaaatattatttataaatgatgtatcccatggtaattattggaaagtattcaaataaatatggtttgaatatgtcacaaggtctttttttttaaagcactttgtatataaaaatttgggttctctattctgtagtgctgtacatttttgttcctttgtggaatgtgttgcatgtactccagtgtttgtgtatttataatcttatttgcatcatgatgatggaaaaagttgtgtaaataaaaataattaaatgagcaggaatttttgtgtccacttgacttggtcttgcttcttattctaatgatgcaaattatacttttgtgaatatatcacggagtcattaggcattcagcttcatcacagcaggtcaggggtctcactgatggcatacaatatagtgatcgggtactctgacttggtagcacagtaagacagacttgccttaaactcctaattcaaccacttacaaagtcattgtttgaacttggctcttgtttaacctctgtaaacctcagttttcttgtttattcagtggggctaatacttgagttactgtaaacattaaatgggatgatgtatgtgaagtgcttagcttggtgcctagcacagagtaagtggtcaatatgtggtagttgtcattattaatattttagatgatcttattagacttatacatctaattatagaaatacatagacttgatagaattttattttcaggcatgaagaaatattctttggaaaagctaaatttttggtgattgacataaagatttacttgctcatattaactaaaaattatagtactctccaaga

SEQ ID NO: 10081 - DNA, 1162 bp, Homo sapiens
atttcagcatgaaacctagctgaatattcgtggagtggatggctttggagtatgtgaacattatcttctttccttgagggtttgggggtatgattatttgagaaaaatttgtgtaatgaaacattagcataaggaatgaagtttggatttatggtcccataattagacatatttcttaataactagaatctattgacaaatgactaccacatgagtattagtgacacttagttgtttggaccatgtacacatcagttagttggattgagtgctggaggtaagggtgggaatatcccatgacatttcaagttcttctgtatttattttcaaaggtactttattccccctcttgttcccccagcaagaaggtttacaagtagtaaagtatggtacttcacataaaataatggaagttagattaagcactgcttcttcatttgtttagagtttttctttgtttatctttgtgaaaatgactgaatttgatgggtttttattttttcttttaggctcagtttatgaacctcttaaaagcattaatcttccaagacctgataatgaaactctctgggataagttggaccattattacagaattggtgagtaaaacctgaggaaaacgtgtccttaggtatctgcgattagtattccccttgccctagttaaattatgtacattatgtggatgatattgttctgtcattgggatttggggtactttcagtgcttaagtagctgtgtattccaattgtatgtcgatatcaggactataaaaggaatctggcagatcatatctggcccttgaagaatttgaaaactgtcaccaatatcttctgtgtttttttaatcttcctaaacattaccagatttgagaccttgaggatgtttcttgattaatacacagatatttcatataagtattaatttgctcatttacctaaacatggttcccagatagtcctaaactttttatatccgtttctaattcattgagatacaagagataatcacaagttagtattattaatatcagggcgcttgtgttttgtttgttttattttgtttttccaggaccagccttgcaaattttgtttttcaatgtgagtaagcaactttcagatatgtgtataagggcctcctctttgtttgtcagaccatctatt

SEQ ID NO: 10082 - DNA, 1170 bp, Homo sapiens
tgttaaatgagacaatccatgtgacacataaagcatagtgcctgatgtggtgaatatttgttcagattagttgctttattgttatttgagattctcctgtcttcatattttaatccagtattcttttacattcatctagattgtatctaaatttgtttagtttgatcatatagtcaatatttatgaggaatgtacaactcggattttatgaatctgcattctcattctttgtcatgttagctaaactaattgtattttcattaaaataaatgtcactaatatattggctatcttgtaatcagtacattttgatttataagaaagtcaaggaaaactagggaaaacaaaaataacatttttatgattataaaattaatgtttattgcaggatatttgagaaatattgaaagtacaaacaaaatttaaatcttctggaactccacactcaagatgcagacaatgtcagtatttttgtgaagttttcacagtcaaaatgccaaagttctacaagtcttttttcttaatttaggaaatgtttttctttttctctgtccagggctgttcgtggtcagttatatttgtggatctcgatgctcacaatcgcaacaggcaaactttgtgctcgctgttacccagagaatcaagatcacatgtgagacatttaataatgataaatttaacatgaactattgtttatgatttctatgtagttatatcttaatttccagtaaagtactctaaaatgttagtgatcgtccagaagggataagaggacatgatagatattgccccttactcctctggcctggggaggtcttagcaagtggacaagagttgtggacacggctgctttggcctttgaatcttttgcaggagaatagaaaaacagacttttcttttgggggagtagcaacattaggccaaggtgaattatttttttgccatggtatattagaaaaatatttttcatagtgtatatatcttttggataaaataaccttccattccttatttctgttctctcattcaattcactttttccccttgcctgatcaacttctgtatgcttatcctacctgattgcagaattttctagggactatttgtggttctgttatttagaaaacacccaaagtggaataatttagttattcaaaacaactcttttat

SEQ ID NO: 10083 - DNA, 1919 bp, Homo sapiens
gcttatccagtgtacagatcctaataaagtgcacattcagtgtaattttatttttttaatatcttttttaatcctatttttcttcctcttttgctcagtaaattttgtatgaaactttaaaaggacttatggcatgtaaacattatttataaagtaagtcatggttataattatttttctcctgcctccttatgtatttatttcagaaatgagccgtcagactgctacagcattacctaccggtacctcgaagtgtccaccatcccagagggtgcctgccctgactggcacaactgcatccaacaatgacttggcgagtctttttgagtgtccagtctgctttgactatgtgttaccgcccattcttcaatgtcagagtggccatcttgtttgtagcaactgtcgcccaaagctcacatgttgtccaacttgccggggccctttgggatccattcgcaacttggctatggagaaagtggctaattcagtacttttcccctgtaaatatgcgtcttctggatgtgaaataactctgccacacacagaaaaagcagaccatgaagagctctgtgagtttaggccttattcctgtccgtgccctggtgcttcctgtaaatggcaaggctctctggatgctgtaatgccccatctgatgcatcagcataagtccattacaaccctacagggagaggatatagtttttcttgctacagacattaatcttcctggtgctgttgactgggtgatgatgcagtcctgttttggctttcacttcatgttagtcttagagaaacaggaaaaatacgatggtcaccagcagttcttcgcaatcgtacagctgataggaacacgcaagcaagctgaaaattttgcttaccgacttgagctaaatggtcataggcgacgattgacttgggaagcgactcctcgatctattcatgaaggaattgcaacagccattatgaatagcgactgtctagtctttgacaccagcattgcacagctttttgcagaaaatggcaatttaggcatcaatgtaactatttccatgtgttgaaatggcaatcaaacattttctggccagtgtttaaaacttcagtttcacagaaaataaggcacccatctgtctgccaacctaaaactctttcggtaggtggaagctagacacatgaaggtaaataaaaagaaaggctgttaaatacaggaaacagttgcatgtagtaacactaatatatttaaaaataagtcaacagtaaaccactgaaaaaatatatgtatatacacccaagatgggcatcttttgtattaagaaaggaagcattgtaaaataattctgagttttgtgtttgttgtagattgattgtattgttgaaaaagtttgtttttgcgtgggagtgtgtgcctgcgtgggtgtgtgcgtgtttgggtttttttcctttaactgacaagccatcttgagtggtcatgggccactgcttttccctttgtgagtcaatacatagtgctgctgtgtgctttttttgtgtgtatttgctaatttttattaattttagtttttcattaaataaatttgacttttctgtaattcaggtttttcctttttttgtaccattttaaagttagtatcttttgatatgcatatttgtttatggtaaaaaatttataacgtgttcaatattttcttttcccccattaatcagttcattagaaatattttaaaatcagctattttgtgaagccatgagttccagaaagtaaaggtgacatcggaaaaataatcaaaagctatttaaagcatctataaggtgctctctttctgtcttctacagatgagtcacacctttgagcttaatctttgaaaggttagagaataaattgatttttataaatactgcaaatcaggcttttgtttccttttt

SEQ ID NO: 10084 - DNA, 1835 bp, Homo sapiens
cggaagaatcctcttcattcattgctagtgcttcccctcacctcccactctccacttcccagtttgcaaatgtggctttcgcccaccaagtgaaagcggactgagagcagcccttggggacggcccggtgcctggctgcaaggccgcgctggggctctgtcttggtgcacatggcttgaccggactttccctgcttcccaccacttccctcactcccagacctccctcattctttttgtctcttctttttgcctaaagccagtccttaacaccctattcttcctctgcaggtggcttgcagacttttccccacctttggggctcgtggtggtggagagggcagctggtgttaagaatgtaggttaccgggcatgacccggcagatgcttgcccagtagttctggaggaaggcccgggaatctgcaaatgagcgcattccccaggcagttcccatgcaggtgatccacggaccacatgttgagaaactgcagtcacccttagggccacaccgtccctctcctcgctgtcccctctctgtagtgactggccctgaccttcaggagtgcactttccactctaccaggaagccctatgacatcctcaggctccccagacctgcagcttgcatggggcccctcccttcttccacacccaccctccgtatggtcccctgctctgccctcgtgctttgctggcccctgcccgctactcccactctcagacacccaggggtggtgggccctaactggctggcccctcccagcgctgccctctgccgtccagatgctgcagtgtggccagatttaccttccagtaacatacttctagtcacccctcctcctgcgaagtgatctgcagtggctgtttgaccagaccacaaagttcacatctcctgagcttagtgtccgtggctgtccacctcccagccatacttgactgtccccaaactctccctgcagccacatgtttcccatgacctgtgggctctgcagatggacctctctccgctagagatgcccttctcccaaatggcttccctcctggaaggcccagcctgagtcctcgtctcctttccagtgcttctgccagaagcatccccatgatgttgtgaccgcacagcactttgtgtctcgctttgagcacttgccactctggctggtgctgctgccactgattgtgtactgtcttgctgccctttctagactgtgagctcctcgtgggcagggaccgcctgtgttctctgtatttcccacggcgcctagcacagtgccttgcacttgataggtgcttaataaatgtctgctcaactgaactggaggacagtgccttcttgactgcggcatctggcagcaggaccagtaagaggccgggaatccactgccctgcagtgggacagtggggtggggctggggtcactccactcccttctccctcccctgccaggctccagcacatggcatcctgggcacacaggtccggggaggggtacctggcgcaggctgcatactagatgcactcaggcttcctggccagggccgacagccggcccaacctatgccagtccaagtcactcctggggagttcctctgtggtggtgggaatcgtgggatgccaggcccaggtctgtcagaagccattttccaccctgggggaagtcgacctgtggcaggaaagaagcggcgacgtgagagaggttcctggcagcatgagccttgggttcctgttgtcaggaaagcccttcctcggacgtcaccacaccccagtattctaacacactttttgcttaagctggtcattccagttggatttacgtcctttgaaatcgagtcttgagt

SEQ ID NO: 10085 - DNA, 1860 bp, Homo sapiens
cttggtgcctagccatggtgaatgaccagggcgaagttagtctcacagaataccagggctagaagacatcgtggagcccatggagtcccaccctccttcccccttccaccctgcgcaaaaggggacggcccagtgtgcacgccgtccggccatgcccacagccacagccacagctgaggagtggccgggcaggcagcaggctccccagccagggcttgacacgcccacagtcaggggcctccacatgcctggcctggctctggaagtcacgtcttagcttctgaacaccgtagcgggttatgaggaagtttaatgaagagcccggtcactgtggccatcttgtgtccccaactgcaggagacgccctgatgtggagtttgtacagctttgccaaaaaatggttttctattctcaaaagtgacccaagccaataaatagcattagtagcttctgtggggggatcccagagcccctgtatttattttccctgtgtttgtctctagtgtcctcctaaacagcctttcctgtgagtctttctcagaattgatatcttaatattgtctgttctaggtgttgcccaaattcagtgtcagtgaagttcttttcctgggcaatcttaacatctttactcttattgtctggaccttcaaagggctttgtattttacacctgcgcccccaggctgctcacagtcggcttgctgcctgtcctgcctgtccggatcttgtctcctagtcctgaggagcggaggctgagaactcagtgctggtttgtaaatggtgaggggacttgggggcatcccagagtgctccctccaggcctgcttcttggttttgtttgatcactgcgttcttcaagggatgaatccagagccctccatgaggccaagcttgtccttcaatcatgtttcctctcagatgcgtccgtgatgcctcctaatgtggaactggttgtccattgtttgggcctatggccaagtcacccagctgtggaagcagaggtagaagacgaggccagccaggagggcgacttcagtcacagctcccatgcctcagctttgtacctgttttcaaaagcacaactgaggtgtgcgggctggagctgtcttgcagtgattctggccttctggctcatggttcagtccagcagcctggctgacccactatttctcctctgcttcagaggaaacccaggaaatgcccttactgccaggctgagtctccacccatgctggttggtgctggctaggctgagggggccaccacttttcctggctagaagctacttgacctttgatgtttgagttctgtaagtcttcgtgttctgacttactgcttcagagggattggcctgtcccctttccctttctcggctatgggaaggaaggattgctcattggttgccttcatcagttacagcatgagacggaattcatcattccttccgaaacccctgatatttaatatttaatatttaaaaacccaaattatcaaaccattaagaactcattactggttctcagcctcctccagtactagcctcagtgtggctgctgcataagtatctgtagcctgtctacctcctgcagtggggccgctcgcctcttccctgtctactgctcaggctctcccacttcgtggcatccatgtaaagtaggtggcagggcagagatgtcactctcattcaacagggaggatgtctgttgctcagagaggttgtcctgaggggctgggtgattcctgggcctacattcttcccgaggctccaggccgctgtctctggaagtaaaagagccttgtctgaccttaatgcaagcagtctgtttgaacccctgtaggctgcattcaggagacagaaggt

SEQ ID NO: 10086 - DNA, 2459 bp, Homo sapiens
ccaagggtaatagtagcaaaagtcaagatttgttctgtagtcaatcacttgatttgattatcttatctcttgattatgtcatggaagtaataaattactggtagcaagcaaagatgtcttttcattagagatgtaaataaatccagccttgggattattcactgtgtagctcagcaaatccctaagatcacattgcataaaatgttacaaaatacccaccttttagatttggatgcagagttttcagttcctctaaagatggtttaagcaagttatatctgttattttcaatgttttatttaaaacatgacattttgttcaaaattacaaacatgcttgtgatttttataaaatcggcctgacatttgtagttacatggtaatttattatgtgctataaggaacttttgtaaattgacctaatttcttattttctctttacaggaatatattaaaggaatctgtgaacctgaactagaagaaagagaatgttaccccaaggacatgcactgcatttttgttggggcagagagcctgtttctgaaaagcttgattcaggatacttgtgctgacctctgcattctggacattggccttcttggcatcagaggaagtgctgaggctgtggtcatggctaggagtcacattcaacaatttgtaaagctctttgaaaataaagagaacctacccagtagtcagaaagaatcagaggtgaaaagggaattcaaacaatttgttgaagcccatgcagacaattacacaatggatttgttgattttgcccacttccttgaaaaaagaacttttgacactcacacaaggtgaggagaatctctttgaaacaggagatgatgaggttattgaaatgagagattctcaacaaacagagtttacacagaatgctgccacagggctgaatatttctagagatgaaactgttttgcaggaagaggcaagaaataaagctgggactcctgtttctgagcttacaaaacaaatggacacagtcctttctagctcaccagatgtgctttttgatccaataaatggtctaaccccagatgaagaggcactttccaatgagagaatttgtcagaaaaggagattttctgattctgaagaaaggcatacgaagaagcagttttctttggaaaatgttcaggagggggagattttacacgatgctaagacattggctggaaatgtaatagctgacctatctgattcttctgctgattctgaaaatttaagtccagatataaaagaaactactgaggaaatggaatacaacatcctcgtaaacttttttaaaaccatgggctactcccaagaaattgttgaaaaggtcattaaggtgtatggaccatctactgaaccattattgctcttagaggaaattgaaaaagaaaataaaagattccaagaagacagagaattttcagctggtacagtgtatccagagaccaacaaaaccaaaaataaaggtgtttatagcagcacaaatgagcttacaactgattccactccaaagaaaacacaggctcacacacagcaaaatatggtagaaaaattttctcagttaccattcaaagtggaagctaaaccatgtacctcaaattgtagaattaatactttcagaacagtgccaatagaacagaaacatgaagtctggggttcaaaccagaactacatttgtaacacagaccctgaaactgatggcctttcaccttctgttgcctctccaagtcccaaagaagtcaattttgtttcaaggggagcttcaagtcaccagcccagagttccactttttcctgaaaatggtttacaccagcagccagaacccttgcttccaaataatatgaaatctgcctgtgaaaaacgtttaggatgttgtagttctcctcattctaagccaaattgctcaaccctttctccaccaatgccactgccccagctgttaccttcggttactgatgcaaggtcggcaggaccttctgatcatattgattcctcagttactggggttcaaaggtttcgagatactctaaaaataccctacaagctggaattaaaaaatgaaccagggagaacggatttgaaacacattgttatagatgggagcaatgttgcaattacgtaagtccattctctgcagattattttattttaaatagggctctaaatggtgtctcagaatcacatgtatatgggaactatacatacatgttgtatatagttgatctgtagccttagggtcggatggtggaggggaatgggaaccaactggttggaaaggttttgtcagtccatcttctggattcatgaactttacttcaccctgctgaacttaatttctaagggcaagagaggatagaaaattatcttttcacgttgcattgctcagtgatatgtagtatagtgacttttaagtcattaaattcttaatattgtgagtaccatt

SEQ ID NO: 10087 - DNA, 1792 bp, Homo sapiens
gctgtgggacaactttgtccatttccttattaggagaaataaatttcgcttagctctgcgcactcccatttccaaaaataaactcgcctcccccattccagttgcagtaatcaagaaagagactgccttgtcattgtttcttatcccccaacttcatgttccctgcaatttatttaaagaaactttgtatttcactacataatctgaaatctttctccctagccccctctgaatccttctgcctactgaaatctgatatattacacacccccaaccttttttttttcagtttggaaaggggtaaagttttgttgttgttgttgttttgttttggatggggaaggtagttttaatttggcaagtgttgctcttcttaaaacactgctcaaattaattagctgaagatacttagtatcctcggctgcttgttagcagagaaaggactcaccttagtggtgactggtttaaaaaatataaatatatatcatttgtatacgaagaactcttcccagtggaaactggctgtgtttccgtatttctatgttctattcggagtgatcgtgaaatctaaggctgcttgatgttctgatgcttgtcaatgccgtcgtgctctgtgactccacgaaacgccaaggagcttcttccggacgcctcctcttcctctgtaacatacgtgtgaatagtcaaggtttaattttgctttaatctaataaagtcgaagtgggacttttatttttctgaaacagctttctaaaatccgcatcttccccagctgcgaggttgggggtctggggtgccaaagggcgaggttccgaaaggcaggagacttgggggaacgcaaccatagaaaggcctgggcgcgagggcttccttgcaaagccggccttgcgctccttcctgcgccaggccggggaccagcactgcattcgcctgtgttcacagctttggcggaaacgtaagaaatgtggccgaaatcttgctaggccaggcgcggccgccggcccaggagcgaagtttgatttttttctttgcattccaaatgcatcaggaatagtcccagtttgaggacccaaacgaccctgcctggagcggcagactcctcaggccttctgtccccggatgtctcccaccgcgtccccctcgcagttcccgaagcagcgtatgttttatacaccgcctctgaatccggagtccacccgccgcatactcgggcgcccaggacctatgattccgctcattcacaggactttattcaagaggttcgtccaggagttttgattgtatcggaacataatgtgaaagcaaaaatgaaataaacgacttcgttttaagtctgaaaggctgacccagttgcttcggcagcggggaggtcgggagccggagcgagtgggcagcctagggcgaagggccgggagctgggagctgcagccgggtggtcccctgcagttgtggttcctttcagagaaacgttttcctggcccaatattcaggaatgaattttatttcctctaggggcgtggggagaagggaaagttaataatagcacaataaacaacgtttctcggatttatcccagcggctggttcgagttagaaattcacggagcacggggcctctgttgaaacccgggcccgtttcttctccgcatgcaatccggtaagccgtggagcagctctagcgggcgcccttgcagccctgtgcctccgggacccacagagatagatagggacttcgcgagtgaggagtggacccgagtacttttctgtttctgcccaacagtttcccttctact

SEQ ID NO: 10088 - DNA, 1198 bp, Homo sapiens
gcactgagtggggcgggcaatgagggttgataaggagaggagttggccgtggtcctgactttaagaagcgcgtggctcaataaaagttttgcccattcgtcaggaattgagatgtctggggaaatgtatacggagggcaaaccagggggtggtgagaagccagcttggctcatccttggctggggatgtgtgtgtgtgatatgtgagtggagtgggtgataggtgtttgtgtaatgcatgtatattagtttgtgcgcacatgtatgagtgtgtttgcatgtgtgaatgtgtgtgtgagaatgtgcatgtgtctgtgtgcgagtgtgattgtgtgttcacatatgccagaatgtgcatgtgtgtgtgagtgtaaatgtgtgtgggcatgtgtatgagtgtgagtgtgcgcgtgcacgtgtgtgtgtctgtgtgtgtgtaaacgtgcatgtgtgcattgtgtgtgtgtgtgcgcctgtgtgcatgtatgagtatgcgcatttgtgctcttgcatgtgtgcttgtgtgtatgagtgtgtgcgttgggaggggggtggggtgctggctgtggaagggccacccttgccttgggctaccctagaggagacaccggctccgaggcacggaccttgcctgctatcttgagaccgaccagcagatggcggaattgcaacgggaaagtccgggacctctggtgctggggagtcggaggagggaaggaatgagagggaggagggagagcatctgaatctgttggagctgccgtgacaaaataccatagacttgggggcttaagcaacagaaatttatttatcacaattctggaggctaggagtcaagatcaaggtgccggtgaagcaaggcttccgtctgagtccccttctctggcgtgtgggcggctgctgcctcgctgtggtcgtccctccatggggagggaccccttttcctcttctcataaggaccccagtcccatcggttcagggccccatctttacaacctcatttaacctcagttacctcctaaagaccctgtctccaaacacagtcacattgggggttaggaatgcatttgcagggaattcaaacattcagtcaatagcatggagagaggagaaagagacagggagagagagggagaggggaaggagagggaagagaagatggggcagaccccgtggcactggtgcaggtccggacggct

SEQ ID NO: 10089 - DNA, 2350 bp, Homo sapiens
acgggcagggctggaccaaggtggtctatagctgcccctattgttccaagcgggactttaacagcctggccgtgctggagatccacctgaagaccatccacgcggacaagccccagcagagccacacatgtcagatctgcctggactccatgcccaccctctacaacctcaacgagcacgttcgcaagctgcacaagaaccatgcctaccctgtgatgcagtttggcaacatctctgccttccactgcaactactgccccgagatgttcgccgacatcaatagcctgcaggagcacatccgcgtctcccactgcggccccaacgccaacccctctgacggtaataatgctttcttctgcaaccagtgctccatgggtttccttactgagtcctccctcaccgagcacatccagcaggcccactgcagtgtgggcagtgccaaactagagtctccggtggtgcagcccacgcagtccttcatggaggtctattcctgcccctactgcaccaactcccccatctttggctccatcctgaaactcaccaagcacatcaaggagaaccacaagaacattccactggcccacagcaagaagtccaaggccgagcagagcccagtctcgtccgatgtggaggtgtcttccccgaagcggcagcggctctcagcaagcgccaactccatctccaatggggagtatccttgcaatcaatgcgacctcaagttctccaactttgagagcttccagacccacctgaagctgcacctggagctgctgctgcggaagcaagcgtgcccccagtgcaaagaggactttgactcccaggagtccctcctgcagcacctgacagtgcattacatgaccacgtcgacccactatgtgtgcgagagctgcgacaagcaattttcctcggtggatgacctgcagaagcacctgctggacatgcacacctttgtgttgtaccactgcaccctgtgtcaggaggtcttcgactccaaggtgtccatccaggtgcacctggcggtgaagcacagcaatgagaagaagatgtaccgctgcacggcctgcaactgggacttccgcaaggaggctgacctgcaggtgcacgtcaaacacagccacctgggcaacccggccaaggctcacaagtgcatcttctgtggggagaccttcagcaccgaggtggagctgcagtgccacatcaccacacacagcaagaagtataactgtaagttctgcagcaaggccttccacgccatcatcctgctggagaagcacctgcgggagaagcactgtgtgtttgatgctgcgaccgagaacggcacggccaatggggtacccccaatggccaccaagaaagctgagcctgctgacctgcagggcatgctgcttaagaaccctgaggcacctaacagccatgaggccagcgaggatgacgtggacgcgtcggagcccatgtacggctgtgacatctgtggggcggcctacaccatggaggtgctgctgcagaatcaccggctgcgggaccacaatatccggccgggcgaggatgatggctcacgcaagaaggctgagtttatcaagggcagtcacaagtgcaacgtttgttcacggactttcttctcggagaacgggctacgggagcacctgcagacgcaccggggccctgccaagcactacatgtgtcccatctgtggtgagcgcttcccttcgctgctgacgctcaccgaacacaaggtgacccacagcaagagcctggacacgggcacctgtcgcatctgcaagatgcccctgcagagcgaggaggagtttattgagcactgccagatgcaccctgacctgcgcaactcactcacgggcttccgctgtgtggtctgcatgcagacagtcacttccacgcttgagctcaagatccatggcaccttccacatgcagaagctggcgggcagctcagcggcgtcctcccccaatggccaggggctgcagaagctctacaagtgcgccctgtgcctcaaggagttccgcagcaagcaggacctggtgaagcttgacgtcaatgggctgccctacggcctctgcgccggctgcatggcccgcagcgccaacggacaggtgggtggcctggccccgcccgagcccgccgaccggccctgtgccggcctccgttgccccgagtgcagtgtcaagtttgagagtgccgaagacctggagagccacatgcaggtggaccaccgtgacctcacgccggagaccagtgggccccggaaaggcacccagacatcgccagtgccccgggtaagtgcagtccacctcatcctgctccctgctcctctccttggggctcctctggt

SEQ ID NO: 10090 - DNA, 1179 bp, Homo sapiens
aaattttgcctgtgttcataaggaccagtgggatttccttccctccaggattagggatttgaggggagttgactcccaggtgtggatcaagtgacaggacttgtcttccttttggcctatgggactggtggtctgtgagttcgtttccagtgactttgtccaggctgcccctcctttccctatcaggaaagtggccgagagcctcccctctgatggggggtatcatgtcctgccaggtccaggcaagtgttgtgaagggaaaaggcgctcccccttcattatctgccgcccctctggcgtgccctctgcagacaggaaggccctggtgtccacttgcttccggcccctgcccctccccacagccccctgcagccgttggccagctgcacagcctcagcccgcgtgctgtcgagaagctggctctgtccttgtttctcggcagccctgggaattgcctctaatatcctctctgccttctcttgcagatggtgatgacgacccacaactctcctgggtggcctcgtctccctccagcaaggatgttgcgtcacccacgcagatgatcggagatggttgtgacctcggcctcggcgaggaggaagggggcacgggcctgccatacccttgccagttctgcgacaagtccttcatccgcttgagctacttgaagaggcacgagcagatccacagcgacaagctgccgttcaagtgcacctactgcagccgcctcttcaagcacaagaggagccgtgaccggcacatcaagctgcatacgggcgacaagaagtatcactgccacgagtgcgaggcagccttctcccgcagcgaccacctcaagatccacctgaagacccacagctccagcaagcccttcaagtgcactgtgtgcaagcgcggcttctcctccaccagctcgctgcagagccacatgcaggcccacaaaaagaacaaggagcatctggccaagtcggagaaggaagccaagaaggacgacttcatgtgcgactactgcgaggacaccttcagccagacggaggagctggagaagcacgtgctcacccgccacccgcagctgtccgagaaggcggacctgcagtgcattcactgccctgaggtcttcgtcgacgagaacacactgctcgcccatatccaccaagcccacgccaaccagaaacacaa

SEQ ID NO: 10091 - DNA, 1121 bp, Homo sapiens
ttcaagccgtacagcccttccatcagcaaaagagaaacatccacccttctttcccgtcctcttcttggagtctctcttctggtttccctgtcccccaatcagaacaccctctgaacccccagttctgtggagcaggccaggctgtcccggattgggagaccagccagggtgaggcgaacaagaccaacttctctcagggaaaaggaggagtaggaacgggccgggcgctccgtttggactcagttggtctccttctaatatgacggggaggatctctgctgggccgggggcagtccctccggggacttcaggaggacagaactgacgagtgtctcaagatcctccttgccagattcagttccagccattccagccaggcgcaaggctggcaggaagggagcggggccccagcgccttcccgcgcaggcctccaggaaatgaacttttcagagcagaactgggctcaggccagaggtcatcaggggagatgggagaagacaagggcctgggggcttttggctccgtagacttagccgctctcatcgttccccccttcctcgatcatctcccatctcacagccgagcgcccgggcacccaaccgaggggctagaatcgggacaaagcagcaggcaaggcctggaaaggccagccgcggggagaggaggccaggggaggggctctgctgccggcgcgcggcctttccccggggcctctactctccaggggtcccctcgagctgggggccctcgctggaaatagaaagcaaagcgtggagacgaagggatgggtgtgtgtatctatatatctgcagctccccacaaacgcgcgcaccccggggagccagcacagaaagccggcctgggtgtcgagggtgccggtgcccggggtcagatccagggtgccggtgcccggggtcagatccggggcgccctccgcggaggggcgcgcaccgcggccgctgagctcccctgaggacctgcgtcccgccggcgccgtgcagacaatgaactcctggcggaggctccctgcccggtgggcctcggtggaggaggcaggaagtgcaggggcccgggccgggagaaggcctgggcaggggcgggagggggcgccaggcggccgg

SEQ ID NO: 10092 - DNA, 1172 bp, Homo sapiens
cctgggcatggaacccccggcatccacaagaccaccttcagttccatcgtaaagtgtgacgtggacatccacaaatacctgtaggccaagatgatgctgtcctgcggcaccaccgtgtacctggacatcacgggcaggatgcaggagatcaccactctggcgcccagcaccatgaagatcacaatcatcgagtcccctgagcacaagtacatggtgtggattggcggctccatcctggcctccctgtctaccttccagcagatgtggattagcaagcaggagtacgaggagtcagccccctccatcatccaccgcaaatgcttctaaatggactgcgagcagatgcctagcatttgtggcgtggattaattcagaagaataaatttgcccctggcaaatgcatacaccccatgctagcctcatgaaactggaataagccttcaaaaagaaattcgtccttgaagcttgtatctgatatcagcactggattgtagaacttgttgctgattttgacctcatatgcaagttaactgttcccttggtatttgttaagtattctgtacatatcttggatctcaacccttagtacatgtggcttggtcactttgtggctgaggtaagaacgtgcttgtggaagacaagtccatggcttggtgggtctgcgtggccagcagtctcccacgagtgcagggtgttaatgtgttagggctgagtgttctgggatttctctagaggctggcaagggctcctgaaccagttgtttctgttctgctggtctgtcagggttggaaagtccaagccataggacccagtttcctttcttagctgatgttttcctgccggaataccatggctgttacttgccttgagttggaagtggtttgcatttacacctgtaaatgtattcatccctttaatttacgtaaggtttgtgtgtgtgtgtgtgtgtgtgtgtgtgtgtgtgtatgcaattctcaattctttaagagatgacaacaaattttggtttcttacagttatgtgagaacattaggccccaacaacacgagtgcgtaaggaaaaataaaagtgctgatgaaaaagaaaaaaagaaaaattatccaaaacttggaaataagcaaaaaggatagctgcacattttttctgtttcttttctttatatatgtttttta

SEQ ID NO: 10093 - DNA, 1176 bp, Homo sapiens
ctcatgtttatatgtcagaccaaccttggaattttagtgcattccatttcactcttggaatataagaagctgctgaggagagcagcttaggttacaatgaaagaaagtgatgccactcactttgtcattttaaaagaaacttgatcagtgttctctgggtctgctgataatgcagtgtatcagagaaaggcattgtgtgccaaggaagggagatgattgtgcagggttataactaagggcactgcctcagtgcagaactcattgatatttaataaataatgaacaaaggcagtagggctgagattttttgaaattacactggccttaaaagctccagtcttgtgaaaacttaaacttagtaaaatatttcacaggcatttcttatccttatgcttgtttttttcccaggcacaatttggaatctaaaggacattattccatgcaagagtcaagcagaaatcataaatgccttactaaagatcttatctgaagttttgggaatggatgctggtgaaatggttattcaaatgaaagaggctgaaacgcaaaggttaaaaactgctgcagaggctgaggaaatattagagaacactaatggggatgatttgattgaagatgatgaaatggaaggaatttctcataaaagaagagtcagaaggaaaactttcgtttcagatttacttccggtaagtcaggttgctgttctcaaatatggattaatacagctgttttttttttccagcagttatccttggctttgcagaaaaatgttatagcaaaattagctataaagtgcgttttggtaaaaatgagtcatattttcctgttgattctctttatgtcattaaaaatctcctaaagggggaaaaaaatctcttgtctaaagtgaatcgttttatatgcaggagaaggtttcagagatgggatagacctatccttttggaacactttagaaatagatgatcaccttcgtaactcttgcttctccccacttctgttacatactgtctgccagactgtcttcaaactaaaggaatttgtactttgcctgaattgtcccttgcattcttgcctcttattttagtatgtagccttatcaaggtggcaaaccaaaccttcatttatccagtactgatccaaagaggttgggtgactgtgagatgaatgatggtttgt

SEQ ID NO: 10094 - DNA, 1194 bp, Homo sapiens
ttcacatagttcacatttggaaaaggcacaaaaatcaatacagggaaaagtctcagtcccacctctgccccctggttctccttggaacagccgcttttaccagtttctcacatatcctttcagagatatctgtgcatataaaaggacatgtgtgtatattaacacaaatggtagcatgctggatacctgttctgcatccagcttaaagcacttcataatatttctgagttgcaattaatctcatccggataggaaaatcattatgtctagtaccacaagcgtttattaaagaaaatacatgaagtgctttttgtttttttttctttgaggttttacttctttcaaaatcaccctatttcctgaggcctgaattctgtgaaatgactgagaggaggagtttgttaaaatcaacaactactatttcccttctccacaaaaccattatcaccaacacatttagtcttcgttggccagggtgggaaataggttttaattgtactaatgaagtctataagcatgagtgtcagttaaaacaagtttccaacttcttccgaccctcttgtatatgtattctgtgttcagtgacatcgacctagtggtgtttgggaagtgggagaacctacccctctggactctggaagaagctcttcggaaacacaaagtcgcagatgaggattcggtgaaagttttagacaaagcaactgtaagttctgcagcatttcatattaaaatccttagttatttacctatgaaacttgaattaaaattaaagtttggtgagcacagttgcattgcaagtgagtgattctttcattttgttaatgtcaccgtgcttgcacataaaaagttttctggttgtccacactggagtgtgaccatacaatctcggctcactacaacctgtgcctcctcggctcaagtgatccttctacctcagcctcttggggagctgtactacaaacacaacctgccatgcctggctaattttgttgtattttttgtagagacggggtttcaccgtgttacccagactgatctccaactcctgggctcaagtgatccacccacctctgcctcccaaaatgctgggattacaggcgtgagccactgcacctggtctgcatttcttttcacagcagcaaaatatgcaattttattatacacagtactcactgtagagatttttgtttgttt

SEQ ID NO: 10095 - DNA, 1119 bp, Homo sapiens
taaatagtataaatgccaacaataagaatgtcttctaagcagctaaatcttgtaagtttagttggaattgagaccagctatttgggtaagcgaattagagtcttagtattgtaagtgggtatgtttatgtggcacagggttgccaactgcctgagtctattcgtgagtcagaacgactttgctgatgtgttgggccaagccagccctggttggcagcctggtgcagccgtaaaattcagccttacaaacagtctcccgccattcccgcaccatgggactttagtgttgtgtgtaacaacagtataacctgctgttagcccattatcaactgactgctatgctaaaccaaaattataataatattgcttgtagaagttagaatataatttattccccctctccttgataatttagcaaaaatccaatataatttcttcttttctgcttttagttacatcccagggaagatgcttgcatccccaatacaaactatggtgttctcttaatagaattttttgaattatatggacgacacttcaattatttaaagactggcatccggataaaggatggtggttcatatgtggccaaagatgaagtacagaaaaatatgctagatggctacaggccatcaatgctttatatcgaagatcctttacaaccaggtattgaaattaggtaaatttgtgggcattcaaagagagggcactgtcagtcaccttattatactttaaattctctttagatgaaaaatgaaggaacaacttctaattgttattcttttttcatcgaaatatttcatgagcaaacatactaaaataaacagacacagacaatagaaaaacaccttggagacttccagataagtagggagtagaatctgtttaaccctaaaagcatagtagaaaaggcattcacttatttggatgggttcatgtttggtggctgtttctccttcttgggtccttattgccttgattacaaccaattgtcagcaattaatgaggctttaatgagatgattctgaagtcctgagaggcagcaagcatagtaatatatctttgaattcatgagcagaagggtgcaaggagacaatgtattttctttttgaatttctcc

SEQ ID NO: 10096 - DNA, 1165 bp, Homo sapiens
gtgcatattaagcacagtcaggcttactatgttacgtatatttcttttaaaggtaacgatgttggaaggagttcatatggggccatgcaagtgaagcaggcctttgattatgcctacgttgttttgagtcatgctgtatcaccaatagcaaagtactatcccaacaatgaaacagaaaggtaaaagttcatctataaccagcccattgtgtcaaaattagttgtggcttcttatcttcaaattaatgttattccctccctctccctttctttttaaacacatgcagcatactaggtagaataattagagtaacagatgaagttgccacatatagagattggatatcaaagcagtggggcttgaagaatagacctgagccttcatgcaatggtaagatattttccttggtcgattgactgagtattagaggcttttctgtgttgtgtgcgtttaatgggaagaaacgttttccaatcttttgccactctttcaggaaatggtgttaccttgatagtagatactcagcagttagataaatgtaataataatctatctgaagaaaatgaagcccttggaaaatgtagaagtaaaacctcggaatctcttagtaaacactcttcaaactcttcatcaggtccagtgtcgtcctcttctgccacacagtccagctctagtgatgtagtaagtatgaaagcctcggctcttctgaactcagatgcatgcacgttctcttgctggggttaacactgtctcgaaggctaaggctacttcctttgcttacatgttactgggatattttaataactttcatgcttgtacattttctcaacattttgttatgaaaaagttcaagcatatagtaaaagtgaacaaattttagtgagcattcatgtactcaccagtagattctgctattaaccttttacttgcttatgtcatacctgtctatccatcactctatccattaattcatcttattctttgatccatttcaaagtagattacagacatcagttcccctagagtactgtagcttgtgcatccttgtagccagactccagtatttgtttattgttttttccttttttttttttttgagacgggatctccctctgtcacccaggctggagtgcagtggtatgatctcggctcactgcaacctccg

SEQ ID NO: 10097 - DNA, 3120 bp, Homo sapiens
agcaggaagggagtagccacctgtgctgacccaaacctaccagtgtgcctgtcatgcccaagagcctcttcccgctctgtcacttatgatgtggtgtttgggttggtaagtttcttaagaaaacctttgcatcccacacactgttaagaaggcgggcgagtggtctatgcttttcattatttccattaaaataaagtaagggttttagagctaaaaagaacccctgtaacagctttttctgcccactagataagtcagtgatcagtaaggtaacaatctagccagcatattcctagttttgaaagcttccccaaatccaggtgtttgagaacactctgcttttctgcaatactgatgtctttgtggtcgttttctgtttctgcagcatggatcagcaaggctctttcgttcttccagcaaaggcttccaaggtacaactcaaacaagccatggttccttgatgacaaacaaacaacatcaaggcaaatccaataatcagtattaccatggcaaaaagaggaaacacaagagggacgcgcccctctcagacctctgtagatagtcagcgctgcgcggtggactgtcttctctgtgcaatgatctcatgctcaggacagttgcgcagggactcctgggagatattcaggagcctcacactgttcagacgttgacttagcaactgcgttttttcccagctcgccacagaatggatcatgaagactgacaactgcaaaaaaaacaaaacaaaacaaaaaaaaaagcaagcaaaaaagagggaaaaaaaaggctgcttatttgataagtcatatgctacaacagggtcattttaagatttaaagcttgaatgtaaaataaatatatttctcattggctttatgcagagttatagggaatagtattcagtgttggtagggtgatagaaacaaaaaacagtatcagaggatgaggtggggaaggaaaacaaaggtatctgataggaagtccagattccaaaggggaaagtgatctgtgcatgttttttttttaaatatttttgcatatatttaccattttattgtgtgtatatatagaagaccatataggagattgatatttgtaatagtggatttgttaataatactttttacataacattactgtttaaattgtaaacagattttttctcaggattagtttgaaaaataatctaaattgtcatcttaacatccatatatagggaagtgattagttctattactcaatttgtttttctcagcattgaaatgacttaatagaacccttgtgtcctgctgcaaaaatttttcctctctaaagaaaaggtttatggtggcaaatgatgtttattttattttgtaaaaaaaaaaaaatgtactatgtacttttgtgtaaacactgaaaaatctctggtcatctccgagaattaacttgcaactgttttctatagtgctgtcgtcttgggcaatgggcaattacatgactttgtgtttgcttcctttgcagtcttttttttttccccccatttcttcctaataggaaaaaaaaaaaaaaaaaggtcacccatgtctggtctcattcctgttgcagtgaaacttcgagttccacagactttgcatgctggcttctctaaccctgtgtgctgcgtgtgcctgtttctcatctcttattctttttaaaattcatgcttaactactgtgggagaataactgtaaacagctttaattaaatcatacttataaaaaactattttcttatattccactctatgcttttggtattgttgatctttacaaattaaatggtctttgataatggatctattttgtattgccttattaagaccaaatacttcttgtcatcccattctttatcctcttctttcatggaattgttatcgttaattaaaacttttttaaacattggcttgtttcaatcatactgtaaattttggttgtagtcagctttgagtgcaatgagatgtataattctgttatcattacctgttgagtttgaaactcagttgggaatatttaatataatagaatgtaagtgacatttctgaaaatgctttctttcagggtgaaagctcttatgtttagcatcaatgtgtatggctctgttaaatgcagccatttctgagacgagattcttttatatatatatacatataaagtactattggcttttaggagtttcttttatatacatttatgaaatactgaagaccaatcagaccattaatggacacttagtgtaactttttataaagaaaataatgctaaagtaagaccaaaactgatgtcatcactgaaattaacaattttcaatatgttcatattttaattcacaatggaaaaatgtgttccaaaactggaaactcatagtactcgtgtaaactgtggaagatttcaaatgtgatgttattttgacaatgttttaaattttagagtcacattttattctgatcagaatttttattgagatgttgagcttttgtttttgaaactagtttgtcataacattgtgcataatcacagtatttattttctaggacaattgtgaatgtgtagacttatgtttactgctaagggaacaattatttataaaataatattaaatccagtattagctgcctatttcagacacttaatacttgcagagatctatgttacatttaccacactgaagttttttttgttgttttttgtttgtttttaaagaatcaccctcattgttgaaagtaaatgtactcttagggtgcgaatattagtgttccaataagcatgtgattatattaaggtggtggtagcgggaagataattctgattccattgggaatcttaggttttcgtaaatttattgggaaaatagtttttcctgtactgctgaagtttctttttggtaaacagtatctttctaaaagaaaaaagcatgaaggagaaattgaggtgtgtatacatttcctcaaatgaccagcattgtattcgtgaatactgtgtatcttgcagtgaacagtgtggaagctgttcatttttcaatctgaagtaaaatactttcaagaacttttagtttgcctgctcatttgttttatacatttcatctatttgactcctatcttatttc

SEQ ID NO: 10098 - DNA, 1272 bp, Homo sapiens
ttttctctgggaaagcagaaagctatggtgactatagtcatccctcagtgtctgcccgagattggtatcaggacctcggatttggtatttaccccacaaagatagcaaaatctgtagatgctcaagtccctaacataaaaggtatttgcctataccctacacacaacctccagtatacttcaaatcatctctacttatatacttcatagaatgtagttaatagactgtattttttatatttttttcattgtttgttgtatttttttaattgggttttttccccaaatatttttaattggcagttggttgaatctgcagatgtggaacccatggataagaagggtcaactgtaaaaggaacatttatctgtttttaatgtataaactactcttagttttctttttatcttgtctaaagaattaataaagatttcctgtgtgcagaagagccacaatgatcacctgataatgcgcgtagtcttcagccttggatgtggtgaagaagggctctcagcagttatgcttctggatggcagcttgactttcatgtcccctttttaattaaaaggtaaaaacaatgttgaattaagtgatgtctttttctttcagacactgaagaacctaaaaagacggatgttgctgagtgtggacctggtggaagttgaggctgcctggtatttgattatatattatgtacatactttttcattcttaacttagaaatgcttttcagaagatattaaatatttgtaaattgtgtttttaattaaactttggaacagcgaatttggatgttccagaggttggacttgtattaggtaataaagctggacctgggactcgtgaggaaggaatgtgcttggggctgttgccatacctgtgcagcattctttcaaaatagtgccttccaatgcttcttccttatgtcccacagacaggatcatcactaagaagcgttcttaaaacggccccatccagtgagattttccgttatacgaacatacttgaaataattttagaatttactactgtggttctgcccctgcatacccagtgggaatgatgcccttgtatgggtaattaggcacctcccacccacccctgacaaaagcacactgggagttttatagcactgtcacatggctagtgttcttttttggttttttccgttttttaaagaaagaggagttacttagtactatagcaaagtaataagccaaataagataaactaagtcatccttgaatagatcagggaattaccagattaccaa

SEQ ID NO: 10099 - DNA, 1676 bp, Homo sapiens
agcgctctccaacgggctggcgatgaaggccaacgagatctccgtcattcagaacggtggcatccctccaattcctggaagcctcggcagtgggaacagctcacctgttagtgggctgacgggaaacctggagaggctccagaactcagagcccaatgctcccctggccggcctggagaaaatggcaagcagtgagaacggaaccaacttccgcttcacccgcttcgtggaggacagcaaggagatcgtcacgagttaaagcagctcgggctggagacatagcattcattcctgttcagaatgcgacctatggtggcctcctactccttgccccccaccccgccccgccccttccttctgttccccagatctatgaactacaacattatgaagacattcttttgtaccttgttcaactttagagttctaagaaagcttatttattagcgatataaccttgctttgcaaacagaatgcaagcgttaactttggtcttctgtattttggactaaatactaattgactagagtgctgtaaacttgctgtaacatttatggcaattgcaagttgccctgctaggcagttgtaatctggcattaacttattttctatatccagtttaatatgaatctggtgttgatgcaatgcctcagtgatgcattagatctctaataaagtctgtatatacatgtacactttgatcctgctggaaaattttatcagcaaacacattgtctaatctttcaaaacagatttaaggaaaggactgaaagtacagactgaacagtgtggttctttgaaaggtttggttttttaatttttattctaaaattcaacctttttttttgtcgatttaaccatttccattttgaactgctatttgtattgtgctttttacttgagtcgtcttcaatgttaataagtttctgtacagtaataagcacgcagaattctttagagaaaaagaaaacaagcgttgttttggtagttgaaactgagacgtaacattttgccttgtaggtatattcacgatagaaaatgtgtgctggaatttcacaatgctgctaagtatagcatcttgaacaaccttcagtggagaaaatgtagatgctcttgtatatacaataagaaatatcactttcattcaaatgtacatatgttccttacaagagcaaatgcttcttcttgatcaagagagcaggtatagtgtttgtttattttgtcttaggtatggaagaaaaaaattggactgttacatgcactttcttggaaagttgaaaggaaagggggggtccaatttctttaacatttaatacttactaacaacagagatactgtaattttactcaagtaatcaaatacattttttttgcaacagataaaacaaaatactgtgtctgtgtttttagagtgcatttccatttagccaggccccaaatgcgttttaacatttccccaggcagcagtcaattgtgtatgtgagtgtgtatccctctttaaatgaggaattgtaaaaggcataacaaacggctttgcatgggcctgcgttttcttttattttgaaatttggaggccctagatattttcccagtatctatgatttatttaggaatggattttatagactccactcgctacccaccccacccccaagaaaagcaaaacaacgaaatgac

SEQ ID NO: 10100 - DNA, 1638 bp, Homo sapiens
gcgggaacaggttctccaccaaggggaatctgaaagtccactttcagcgccacaaagagaaataccctcatatccagatgaacccctatcctgtgcctgagcatttggacaatatccccacgagtactggcatcccatatggcatgtccatccctccagagaagccagtcaccagctggctagacaccaaaccagtcctgcctactctgaccacttcagtcggcctgccgttgcccccaaccctcccaagcctcatacccttcatcaagacggaagagccagcccccatccccatcagccattctgccaccagccccccaggctcagtcaaaagtgactccgggggccctgagtcagccacaagaaacctaggtgggctcccagaggaagccgaagggtccactctgccaccctctggtggcaaaagcgaagagagtggcatggtcaccaactcagtcccgacggcgagcagtagcgtcctgagctccccagcggcagactgcggccccgcgggcagtgccaccaccttcaccaaccctttgttgccgctcatgtccgagcagttcaaggccaagtttccttttgggggactcctggactcagctcaggcatcagagacgtccaagcttcagcaactggtagaaaacattgacaagaaggccactgaccccaatgagtgcatcatctgccaccgggttctcagctgccagagcgccttgaaaatgcactacaggacacacactggggagaggccctttaagtgtaagatctgtggccgggctttcaccacgaaagggaatcttaaaacccactacagtgtccatcgtgctatgcccccgctcagagtccagcattcctgccccatctgccagaagaagttcacgaacgctgtggtcctgcagcagcacatccgaatgcatatgggaggccagatccccaacaccccagtccccgacagctactctgagtccatggagtctgacacaggttcctttgatgagaaaaattttgatgacctagacaacttctctgatgaaaacatggaagactgtcctgagggcagcatccctgatacacctaagtctgcagacgcctcccaagacagcttatcctcttcgcctttgcccctcgagatgtcgagcatcgctgctttggaaaatcagatgaagatgatcaatgctggcctggcagagcagctacaggccagcctgaagtcagtggagaatgggtccatcgagggggatgtcctgaccaatgattcatcctcagtgggtggtgacatggaaagccaaagtgctggcagcccagccatctcagagtctacctcttccatgcaggctctgtccccgtccaacagcacgcaggagttccacaagtcacccagcattgaggagaaaccacagagagcggtcccaagcgagtttgccaatggtttgtctcccaccccagtgaatggtggggctttggatttgacatctagtcacgcagagaaaatcatcaaagaagattctttggggatcctcttcccttttagagaccggggtaaatttaaaaacactgcttgtgacatttgtggcaaaacatttgcttgtcagagtgccttggacattcactatagaagtcataccaaagagagac

SEQ ID NO: 10101 - DNA, 1840 bp, Homo sapiens
catcgttaaagtctctcttcaccctgccgtcatgtctaagtcagagtctcctaaagagcccgaacagctgaggaagctcttcattggagggttgagctttgaaacaactgatgagagcctgaggagccattttgagcaatggggaacgctcacggactgtgtggtaatgagagatccaaacacgaagcgctccaggggctttgggtttgtcacatatgccactgtggaggaggtggatgcagctatgaatgcaaggccacacaaggtggatggaagagttgtggaaccaaagagagctgtctccagagaagattctcaaagaccagatgcccacttaactgtgaaaaagatatttgttggtggcattaaagaagacactgaagaacatcacctaagagattattttgaacagtatggaaaaattgaagtgattgaaatcatgactgacagaggcagtggcaagaaaaggggctttgcctttgtaacctttgacgaccatgactccgtggataagattgtcattcagaaataccatactgtgaatggccacaactgtgaagttagaaaagccctgtcaaagcaagagatggctagtgcttcatccagccaaagaggtcgaagtggttctggaaactttggtggtggtcgtggaggtggtttcggtgggaatgacaacttcggtcgtggaggaaacttcagtggtcgtggtggctttggtggcagccgtggtggtggtggatatggtggcagtggggatggctataatggatttggtaatgatggaagcaattttggaggtggtggaagctacaatgattttggcaattacaacaatcagtcttcaaattttggacccatgaagggaggaaattttgaaggcagaagctctggcccccatggcggtggaggccaatactttgcaaaaccacgaaaccaaggtggctatggcggttccagcagcagcagtagctatggcagtggcagaagattttaattaggaaacaaagcttagcaggagaggagagccagagaagtgacagggaagctacaggttacaacagatttgtgaactcagccaagcacagtggtggcagggcctagctgctacaaagaagacatgttttagacaaatactcatgtgtataggcaaaaaactcgaggactgtatttgtgactaattgtataacaggttattttagtttctgttctgtggaaagtgtaaagcattccaacaaagggttttaatgtagattttttttttttgcaccccatgctgttgattgctaaatgtaatagtctgatcgtgacgctggataaatgtcttttttttttaaaaaaaaaaaaaagatctttgcagaacacctattaattaattaattaattcactcattcagcaacatttttgagctgctgccctgttttcatgatgtgctacatgatagatttgtaaacacctgtctcaataaacttatagttgtgttggaataggtattattctcagttgcatcttcatgaaactcataataaattggtaataattacaatgtaagaaggattctgaggccacagaaagaatgataaaaatgttataatctcctaataacatttccagtgggcatagtaggtgaaagcagcaatatatttgctacacattaatgcatgtaaaaagaaggtaatgttcctcaatcttaggacttaatgttactttattggtttaatactagctgctcttaaaaaatccccaaaatataatggcataaacataatagaagtttactttgcactcactttaagtctgaaacagatctacctaactggccattagctcgtctccaggtgg

SEQ ID NO: 10102 - DNA, 1290 bp, Homo sapiens
acacagctcttggctacggaagacccttaatgtttcattcttcttggatttttccccatggcaaaaacttttgccggtgagaggaggctgcaacaccgagcggaggaggcaggaaccggagcgcgagcagtagctgggtgggcaccacggctgggatcaccaccattgaggcggtgaagcgcaagatccaggttctgcagcagcaggcagatgatgcagaggagcgagctgagcgcctccagcaagaagttgagggagaaaggcgggcccggaaacaggctgaggctgaggtggcctccttgaaccgtaggatccagctggttgaagaagagctggatcgtcctcaggagcgcctggccactgccctgcaaaagctggaagaagcagaaaaagctgctggtgagagtgagagaggtatgaaggttattgaaaaccgggctttaaaagatgaagaaaagatggaactccaagaactccaactcaaagaagctaagcacattgcagaagaggcagataggaagtatgaagaggtggctcgtaagttggtgaccattgaaggagacttggaacgcacagaggaacgagctgagctgacagagtcccgttgccgagagatggatgagcagattagactgatggaccagaacctgaagtgtctgagtgctgctgaagaaaagtactctcaaaaagaagacaaatatgaggaagaaatcaagatttttactgataaacccaaggaggcagagacctgtgctgagtttgctgagcgatcggtagccaagctggaaaagacaattgatgacttggaagataaactgaaatgcaccaaagaggagcacctctgtacacaaaggatgctggaccagactctgcttgacctgaatgagatgtagaatgccccagtcccaccctgctgctgctcctccctgtgacccagactccgcctgaggccagcctgccagaagctgacctttaactgagggctgatctttaactggaaggctgctttctcctttcaccgccccctccttccctgtgtctttttcgccaaactgtctctgccttttcccggagaatccagctgggctagaggctgagcacctttggaaacaacatttaagggaatgtgagcacaatgcataatgtctttaaaaagcgtgttgtgatgtacacattttgtaattaccttttttgttgttttgtagcaaacatttgtaaaacattccaaataattccacagccctgaagcagcaatcaaatccctttctcacttttggaaggtgacttttc

SEQ ID NO: 10103 - DNA, 1141 bp, Homo sapiens
agcagggggcgtactggaaaacctgggttccctctcgatccttcacgaattaactgagtgacctacatcaaatcctagcgtgtcctagggccttggttttgccttctgtaaaaggaagaggctgcacaagttgtccaaaagtcctccagctctaaaattctaagggtctcctcctttcaggtccttagctggctttctaccgaattaaaaatttaaaacccatatgaaaacgtgagctagacaaaagaattaaatgtttgaacttcggtcggcctactttatgtttgttcaaaactgttgaccatttccgatccagtgcaggtgatatttcacgttcacagttgacagaaatctcttgaatttcagcctccgctaaggagcgacactgcgcttgtttatgcctagccagaatggaatggctgcggtatacacagtggtatttgccaagtaatttcattctttatattccccatgaaggccctccagagtggatcagcataactctatttagctgagatactgacagggctgggaagaaaccctgctgaaagggcggttacagttccaactttgattccctgaaggatacttataacaaccacatattagaccaagaatgcacagaaagagtttatctctggggccccccacaccacttatttggatagtgctttagtttgcaaattcaacttgttgagtcaaatttaaggccagtaacatctcatctatctgacatcacagcagaatgacatcccacttaaatgaaaaacttgagcggcctccccatcatctgatagagaacgttcgtgttttcttgaatgcagccctctgaaaattacttaggcttggtcattaaagagcagtgctataattatcaacattattgtatgccattttaatcagtgaatgttctctaaaatatgcaaaatttgtccctataataaatggcctctaggatgctggtttttgtgtttttgttttgttttgaacttctgtttttgctatctccttcctcactactgggctgacacttctctattcttctacctaacaaccttctttcctacttttttgatgcgtctatgccattatgaacttggacatcgataaacttttattagcttagactctcaggttttgt

SEQ ID NO: 10104 - DNA, 2441 bp, Homo sapiens
ttgtttatccattaccataaccaattttagagcattttcgttacccccaaaagaaatcccataacctgtagctatcactcaccaatcaccagtcctttctacccacccaccatgccaccagctctaggtgacccactaatctattttctctctatatatacttgcctacttttgacattttatataaatcgagtcatataatatgtggtattttgtgactgacctctttcacttagcataatgttttcagagttcatttttgttgtagcatgtatcagtacttaatttctctttattgtttttgttcctttttttctaggattttgacacttcatgacatgtcattatttagagcaataatgaatattgacctgttttggattagttgatgaccttcggaaatgatccaataatatctactatagagaagctgaatatactccatttggagtgaacagcccggattgttacagaattttcaagatgacagatccaatgatggacttttttgatgatgccaatctttttggtgagaccttagaaggtttgtcagatgatgcatttgtacaaccaggacctgtttcactagttgatgaattgaatttgggtgcagaatttgaaccgttgcacatagattcactgaaccatgttcaaggtactccaacacatcagaagatgactgattttgaacagttaaatcaatttgattcaataaaatttcaccatgttaatcaatcttttggtagcccagctgaacatgtgttatctccacactctcagtttaattgttctccaatccatccccaaaaccaacccaatggtttgtttccagatgtatcagatggcagtccaatgtggggccatcagacagctactaccatttcaaatcaaaatggatctccttttcaccaacaaggacattcacactctatgcatcaaaataaaagctttgtggcacaccatgactttgccttatttcaggccaatgaacaacaaacacagtgtacttcactacgctcacaacaaaacagaaataatctcaacccagggcagaattctcttagccagtctaaaaattttatgaatgtttctggtccacatagagtcaatgttaaccacccaccacagatgactaatgcatctaattcacaacagtctatttcaatgcagcaattttctcaaacgtcaaatccttcagcacacttccacaagtgtagcagtcatcaagaaggaaattttaatggaccttccccaaatatgacttcttgttctgtcagtaattcacagcaattttcttcacattattccttttccagtaatcatatatcaccaaacagtctacttcagtcctctgcagttcttgcatctaatcatacaaatcagactttatctgattttactggaagtaattccttttcacctcatagaggaatcaagcaagaatctactcagcatatcctaaaccccaatacatcattgaattcaaataatttccaaatattgcattcatcacatcctcagggtaattatagcaattcaaaattatctcctgtgcacatgaacttcccagatcctgttgactcaggaactcaaatgggccatttcaatgatcatgtagaaactaatggcttttcatctttagaagagaatttacttcatcaagtggaatctcaaactgagccattcacaggacttgaccccgaggacctccttcaggagggtcttcttcctcactttgatgagtcaacattcggacaagataattcaagtcacattttagatcatgaccttgatcggcagtttacttcgcatctggtaacacggccttctgatatggctcagactcagttgcaaagtcaggctcggagttggcattcatcattttctaatcatcagcatttacatgacagaaatcacctatgtttacagcgacaggtatgtagctctttgcttttattttggagatttgggggtagggcggactgttagtcattgggttaattttatatgaaacatagtcaagatttctcaaacttggtaattccattaagtgaacatacatattttgatataggtttatattgttttacaagtcttgtattgaaagtgattcactgatatgctcaaagcaatagattagcttctatatttagaaaattataaggtgttaagacttcttttgtgatgtttatgaatacctttgagagaaagttattttatcaaaaacaacttaataatcataattaaaagggaaaaaccagactgggaaaattttattgcaaatacaattaacattgagttaatattcctataaaaagctttataaattagcaaacttttaagacctcagttgataactagataaaacatataagctgaaattcacaaaaaggaaattaaattagtaaacaaaaccagaataatatgcagctttaataata

SEQ ID NO: 10105 - DNA, 1149 bp, Homo sapiens
tcagtgatagcacattgcatgactatttatttatttgcatgtcagcttctgtaatagatacacacccctgaaaggcagagaacatgttttatttcttttgtatcccatcttctcatactgtcctgagatacagaaggtatttattaaatgattcctgaacaaataatatattgagttggccttgcccttcccttttcttttttaaaaaatcagacatctaatgggtggtatccttattttggagctatagaaatctttgtgcctttgcaggtttataataaaattgtaatcttaagcctaccctgcacttaagcaacttttacatttttataaatgcaactattttatttgatctttgattatttttgtatatttatctttaaagtatagaaaaaaaacccaatgtatgcatggataatgtatttgtttatttcagacgaaactgcatcttagcagatgaaatgggtcttggcaaaactattcaatcaattacattcctctatgaaatccttctgactggtataagaggacctttcctgattattgctccactttctactattgcaaactgggagagagaatttcgtacgtggactgatattaacgttgtggtttatcatgggagcctgattagcagacaaatgatacagcaatacgagatgtacttcagggattcacaggtgtgttattgattattttgtttgttgtttgaaaggtcagggctgaaaaagataagcattacctaccaattattttcaaatttaggatacattttaattgcctacctagatcttagtttaagttcttttattcatcatttttattttacagtaaatttgagcagctgaagagaacaatgagaaaagtcaatttaatgctgtagttcactataatgaagtatgcagatttaaacaatgcacgagtttcattgtaatccttaatttttcaactagaataataattttactaattgtttttaaatacacattagatttatttttagggtattaactgtctctgatcattgtccagcttttttcccgtcatttaaaaaatttaaatcctcactaataccacaggcttaaatgcctgttgaggtgagaccataggttctctttcatgttcaatggatttttattttagacattt

SEQ ID NO: 10106 - DNA, 1166 bp, Homo sapiens
cagggtctagcacatagatactcaatatctgctgaataaagtatttggatggctaattattcactatttatttgctattatatttgtgaactcattggtgtaagtaataagaactaatactgaaatctcattggccagattttatcatgattatttcttgcccaaaattattataattcttaaaaattatcatacaacattttaccaagaaatacttattaggatacaattatgaataatataattatgttggcataatgtttaacaagattattgaacacggcaatataatacagtttcaatgataaaagttttcattgtaagggagtgtctgcatatgtaaaaatttcattagaaatgttttataacagatgttatctgatgccacttgacaggaataaaaaatatgcaattaaaatattccagcaaataattatatttgatcatttctaggggcgtatcattcgaggagcttacagattccaagccatcatcaccacttttgaaatgattcttggaggctgtggagagcttaatgcaattgaatggcgatgtgtgattattgatgaagcacataggttaaaaaataaaaattgtaaactcttagagggcctgaaactcatgaatctggtaagtaacttaatattatcattatgacaattgagtttattagatgtatagtgaaaggttatagagttaatgctaaaaatttttctttttaattttagagtgtagtacatctgaatcttatctgtgataattgagattttttggggggccttaatttgtaagaaaaaaaattctgtttcctacgacttcaaattttttagctctttccttcaaaaagcattagtaattaatttttaaaatgagacctctatagagtatgtactatttaaaagaaaataagaccgtaagtttttgttttgtttgtttgtttgtttaagatggagtttctctcttgctgcccaggctggagtgcagtggtgcggtctccactcactgcaacctccacctcccaggttcaagcgattctcctgcctcagcctcccaagcagctgggattacaggcatgtgccaccatgcccagctaattttgtatttttagtagagatggggtttctccatgttggtcaggctggtctcgaactcccgacctcaggtta

SEQ ID NO: 10107 - DNA, 1211 bp, Homo sapiens
aagataatcactttgcagtaatgactataaagaattcaacagcattccagtgtattcttaatagattgcaatatagaagcaagtatgtcagtcgagagtaacatggattaaggacaaaagaaacattcatagccttcttgtataaagtttttgtgaaagtatttcttgcaaaaaagtaatatattatgatgagatcagcaaagcagtttttatagactgccttttgttattctaacttctgaaataaaatttattgtagtgttcttttacctatacatctgggaattcagaggttttgtatctttatattagtttttgttttctccttaacaccaacaccaaaaagtataaagtcacagaaactacttgagatgatattgcttcttaattttagagaaaacataatgctgcaggaaaactgactttacatttgatagaatatgtcttcagttttattatacttatttatgtaaatttattccatttcattccatagatacttatatgagcgaattgatggcagagtcagaggaaatcttcggcaagctgctatagatagatttagtaaacctgattcagatagatttgtttttctcctgtgtacccgagctggtgggttgggcatcaacttaactgcagctgatacatgtataatttttgattctgattggaatcctcagaatgatcttcaggtaaataatttccttggctaacaaaaaatgcattttttaaaaaagtaaaattgtgtaactttttggtaatccacatcttttatttttatctggacaaactaatgtatgtttctctatgaaatatctgtgccaaataaaataggtgaagttattttaattgttatgataaaaactataatgacaaaaatttttacttttttatatgtctcactaacttatatgtcttactagcttataaaaaattatacctaattgagtacagtactttttgtttgtttatttagatatgaggtctcactatgttgcccaggctggtcttgaaccccaggactcaagcattcctcccatcttggcctccaaaagtgctgggtttacaggcacgcatcatcacgcctggcctgatatttttatagtttaaagaatattatgtaaacttgagagagacctaagctttaagaataatttatttgtaataaaattaaaatttcagaattttaatccttaaaaataagtactcgc

SEQ ID NO: 10108 - DNA, 1111 bp, Homo sapiens
ttttgtgtgtgtttgggaaaagagtttttaaaatgacaatgatttattttcctttatttcccatatcctgtgttatatttcctttaggagatattactatctgaaaatgtgatgaaaataaactagaaatataccagaaaattaactctgtagtgcaggcaggtttggaaattcttgttctctaacctaatttcttaatggtcttgtaatgtttttagaaaccatacccccattctctgtagcctccccaccaaaaagattcagtccttaccaaaagtatcagagttaaccaacagtaataacttatttaattctgctcctaaacttcagcctgtgtttgcattaagcctttgccttaagcagatgcagtgctgtgtttcagaccactgaatttgaaacaccctttgatgtatgagtatgcagaattcaaattctatccatagtaaatgtgaggagataatgttttaagtgtactttgatagatttttcctctaaaactgccattatatatttcaggcgagttttgtggcatctggaaaccggacagatatttctttagatgatcccaacttctggcaaaaatgggctaaaaaggcagaaatagatatagaggccatcagtggcagagtaagtatttttatccctctaaaataaacttgcttttgggatactttggcaatagtattgtaatattttaaggtgttcaattatgcagttactaaaacaaatttctagatatataaattgaagtagggtagcagaatgaactgagtgaggttctcctccaatttaatacatctaatatctcccatgatgggttatccctacagggaaggtttaacttttggatataatttacattcttaaaattataatatgttttttaaattttttaatgtcttcaaatcatgggttacatttattttctctttaatgttttcttagtgtcagaacccattaatgataatctagtaaaatgtaaataagaggagaaaaaaagcagtcaagaaagtggcattttttaaactgcttctcttatgacttcccttgagctaagaaaaggtcaaaatgctaaaattcactttatggaactgataataatagcataact

SEQ ID NO: 10109 - DNA, 1199 bp, Homo sapiens
aaacatggactatgtgaacatgaagagtggcagtacgtttttgtagtttttaaatatttcacaacaaataactcaaagaactaaaatgagtttagctatcttgaagaggatggctaacctaatctatctaaatcaattttgaaaagcaagagtagaggtcaaaacatatcttttagtatctaggaaagcaaaagtaaagcagagggcataagtttgatcttttgggttttatatttgtaaaaaaataatctgttttggaacaaaaaggaaatcagaatgattaatatgagatgtagaattgttagctatttgggggaaatatgttttaatatgtataaaaccatcatcttgatttgtggttgggtcagtattgttactaatattttaaagatctctgaacagacctcagaaagtctccagaaatttcttgcattgaaacaatctttcagattgcaaatttttatacaaattattcctaatttatatgtccttattttaacaggcctatcagctcctgtacccaggggtcgaaaagggaagaaagtaaaaactcaaacaagctcatttgatatacaaaaagcagaatggcttcgaaaatataatcccgagcagctccttcaagatgaaggctacaaaaaacatataaaacaccactgtaataagtaggtatagggtattttaaacacaactctttaaatgtttactgttctgaatttattaatactctttaagcttgctgattttgagtacagagacagcatggtctagggccaatcctaatcctaattttacaaggtatcctacaagcaaatcatgatacctcttgtgtcattgttctcaccaacagataagtaaaactggcctccaaatgagctcattatatcttacttgtatatgaaataatgatgattatgaagattttggagaagttctttatatatatggtagtaataagattcatttaatcagaagtaatatttcattattttaaaatctgtacacaaattccttcctaattttaaccccatgtccgaatattttaaacgatgaatgtctttatgcctttgatttattttcccttgtttttagggttttgcttcgtgtgagaatgctgtattatctaaagcaagaagttattggaaatgagtgtcagaaagtatttgatggagttgatgcaaggtaagttaaacaatttttat

SEQ ID NO: 10110 - DNA, 1152 bp, Homo sapiens
attaaaagtaaattttttttttttttttttttttttgagacagagtctcgctctgtcgcccaggctagagtgcagtggcacaatctcggctcactgcaagctccacctcctgggttcacgccattctcctgcctcagcctcctgagcagctgggactacaggcgcccgccaccatgcccagctaattttatttttgtattttttaatagagacggggtttcaccatgttagccagtatggtctctatctcctgaccttgcgatccgcccgcctcggcctcccaaagtgctgggattacaggcatgagccaccgcgcccgacccattaaaagtaaatttttctaaaaaaaagtatggttggatagatgagttaactagcatttaaaaatgttttacaaggcagcaagcttgtatttaatcctatagtgttaggtacttgaaatgttttaagtttgtattatagtcattatatttagtattaatattaattttagtgactagtgtggtttttttctttaatctgactcaaaatagatggacaagaagagaagaagctgacttttatagggttgtatctacatttggagtggtttttgaccctgacagaggccaatttgattggacaaaatttagagctatggctaggctacataagaaaactgatgatagtttggaaaaatatttgtacgcattcatgtccatgtgtcggagggtttgtcgtcttccttccaaagaaggtatgtataaaatttctttttcctggtttcggtcaaagaagcaaaaatcactaaaattcggaaatttccaatttgtctcttttatgtgaaatttcaatactatctaattcaacttgtcagtaattttttagaattataaataaactagcttaaagatcgcgtatttgttaatcctgctattaaaacgagatctaaagagaataaaggtatacactgagtcttaagaaaacaggtagagtttagtgatagatttatgattaggaggtggtggaagataaaggattgcttttgttaaacagaactaacctatattttcagtccatcttataggaattgtgctagagggtttatttacctgaataattttgcaaggaatgaagcccccactcataagacattttaaagaattttctaga

SEQ ID NO: 10111 - DNA, 1704 bp, Homo sapiens
gacaaatgttattaaatgcatcgctcatagggaatttcttaaaattcccagttctattaatgtacttccaaaataatcttatgttttacattaacatccagtattttatgttacatgatttttagtacttacttttaaaactttctcctttttaaagcttttactgaaatttcaaaatttcaaaatcctcactgaatttctcctcactgaaaagaaattctggaaactatacagtgatattgcatggaggcacattttagaaatggtattgttataaatatataaagatgtatttataatgatttatttataaataaaggatttttgagattaatatttttgtccttgtttcaatatgtagaattggtggatccaaatatttttatccagcccatcacagaagaacgtgcttctaggactttgtatcgcattgaacttctaaggaaagtacgggaacaggcccttcgacatccacagttgtttgaacgcttgaagctttgccatccaaatccagatttaccagtctggtgggaatgtggccctcatgatagggatttgcttattggtgctgccaaacacggggtgagccgaacagactatcacattcttcgtgatcctgaactctcatttatggcagctcagaggaactacagtcaaagtaagatggctcattcaaggacttctaccccacttctacagcaatatcaagtagcactttctgcttctcctcttacctctctacctaggctcctagatgctaaaggtattattctagaggagatgaaagttaaaagtgaaaaccttaaagaggagcctcagtcttctgaagaagaatctatgtcttctgtggaaaccaggacactaataaaatctgagcctgtaagtccaaagaatggtgttttaccacaggctactggagaccagaaatctggtggaaaatgtgaaacagacagacgcatggttgcagccagaacagaacccctaactccaaacccagcttctaagaaaccaagagtccacaaaaggggatcagaatctagttctgattctgactcagattctgagagatcatcttgttcttccagatcatcttcttcctcatcatcctcttcttgctcccactctcgatcaggctctagttcttcttcatcttcatcttgttcttcagcatcttcttcatcctcttcctccacctcttcctcctcctcctcctcttcatcttcatcagaagaaagtgacagtgatgaagaagaagcccaaaaacgaggtactatgcataaaataattctacttttttaacataacttttcttttcttttcttttcttttcttttcttttttttttttttttttgagatggagttttgctcttgttgcccaggctggagtgcaatggcgcaatctcagctcacttcaacctccacctcctgggttcaagcgactctcctgcctcagcctcccaagtagctgggattacaggcatgtgccaccatgcctggctaattttgtatttttagtagagacggggtttctccatgttggtcaggctggtctcaaactcccgacctcaggtgatctacccgcctcagcctcccaaagtgctgagattacaggcatgagccaccaggcctggcctaatataacttttcaagtgaaaatgaaaagaactcgtttcaggtaacttaaggatgtttaaaattgttt

SEQ ID NO: 10112 - DNA, 1203 bp, Homo sapiens
attaggagtctgtattactttttaattataacagcaaaaataaaactatctttgtggtataattttttgtctgtttgtttgtttgtgagacacggtcttactctgtcacccaggctggagtatagtggcacaattttttaattttttgcagagacagggttttgctatgtttcccaggctggtctcaatctcctggcttcaagcactcctaccaccttggcctcccaaagtgctgggattacagacaggtgtgagccaccacgcctgcttatggtataatatttttgaacttcaccaaagggaatctgtactcaaataacttgttgcagaattgtaatatatatatacacgagaatatgtatgcatagcacatacacatatgttgaactagggttaaatccatagactcttgagctatttgatctccaaaggtctgatctaattattaaaattacactttgatgttgcacgcttttctaggatcgtgtgatgatcaataggttggacagtatttgtcaaacagttctgaaaggaaagtggccttcagctagaagaagttatgatgctaacacagtggcttctttctataccacaaaactgctggacagccctggagcagctacagaatacagcgatcccagtgtacccactcccccaggtgccggtgttaaagaagaacatgatcagtcaacacagatgtcaaaggtgaagaagcatgtacgagaaaaggagtttacagtgaaaatcaaagacgtatgtgtatttttattgccctagggcctgattgcgattgcggtgtgcagcatgcttttcctgcaaatggctgcctgctcttactcttccttccttcacatacctgtttcttggtatttggattattttctttctgatatccaggttattaaacttgaatattctactagagggatcgtcattaaatatgtttttctctttatgcttctgaaaatagttctaatcaaaatgctttcttaaacagtgtggcaatttctaattgttttggttcttttatatagtatttaaatagtatgtcagtgtactttctgttttaaacatttagcatgccctgttatcagtattgtttcatttttaaatgatttttgaagcttaacttattacttagtgtctaaaacatagttaatgtcctccaaaatgtcatatgaataatgtacatagagatgtatg

SEQ ID NO: 10113 - DNA, 1163 bp, Homo sapiens
tttaatttatctgtgttcctctaaaagtgtgatgtcaagaattgagaatgaaaatttaaaaaaaaaagttgagaatggtactcaagattaactgagtcttaatgcgtggaccacaacatactgatctcctaaagtactagttgtcaattcaagcaaataagtgtcttgaatttcccttccttgtgcataaagttaaagactgtacttcagtattctactaagtctagttgccaagcaatacatgctgtattataagtgttgtcttgaactgatcactatttccaaatgctgctattaccacttcttaaattataaattagtttagcttcatcagcatcagtttggtctcttgtggattcattaaccattcaatgtaattttccaattagtagaacttcagacatgtatgaattgcacttcaaatatgaatcacccatgcttctattactgtagaataaatcccccaaattatgctttacaattacagtcgcccaaattataccttacaattaacaattttgttatcaaaggagccctttttttttttcaccagaaaatggtaacaaatggggaagataagctgtgcgttcttttgcccaacctcagtggggcttaataataccactactcttactgtttaaaactccactgtaaagtgagattgatacttctattgcctgaacattttattgctgttgcagctgaagattgtatagcttttgcctgtaagtcattctttggtaaataatactgttttttaataatatcaatagtaggggtccggtgtggtggcacatgcctgtaatcccagaactctgggaggccgaggcaggcggatcacctgaggtcaggagttcgagaccagcctaactgacatggtgaaaccctgtctgtactaaatacaaaaaaaaaaaaaaattagcgtggtggcgcgtgcccagattcccagctactcaggaggctaaggcaggagaatcgcttgaatccgggaggcggaggttgcagtgagccgaggtcgggccattgtactccagcctgggcaacaagagcgaaaccctgtctcaaaaacaataataataataataataataataataataatatcaatagtaattgtgccaagcgtggtggctcacacccgtaatcccaggacttgaggaggc

SEQ ID NO: 10114 - DNA, 1097 bp, Homo sapiens
cctgggcgacagagcaagactccgtctccaaaaaaaaaaaacaaaaatcaaaaaagaataatgtagaaaaagatatttggcacaaaaagcagagataaatgattttttttaaaaaaacaagcttttgaaagtataggaactaatgggttcaaagaaaggggaaatgtttatcttagggaaaaggcatgcttccttctccaaggaaggaagagaaaatgtgtgaatatcgggaaaaaaaatagagaagacaggtcaaaaattgaaagaggcctaggttgtaattcttcaggtttttaaatgagaggtggggatgatatttttagtccaaaagtttctacattaaagatgtataaaataagaactaacactttcatatatttaggaaagggattactttcagtttgtttaagaactaaatttgtatcaccattttgcatttttaattcaattaggtacttccattcaaccaacccttggtgccaatggtgtgatattagacaaccagcctatagtcaaaaaaaggcgaggaaggaggaagaatgtagaaggtgttgacatcttcttttttaacagaaataaaccacctaatcatgtaagtaaagcagtacttaaaaactgatccttgaattcaaaattcaatcctaataaatatacatattattgttttgtgaatgttttatagactattagtaaggaaattagaagtatgccatataattttagatgatatcttagaatcttagcactgtccaagagtgataaaaattttaagtttaaaagatttagcagaatttttagcaacaacttattttttctcttcaaaaataattgctttattgaaccaatattagaatgataaagtatgaaaataaagataccatttggtgtttttttacaggtttctttaggcttaacctcctcacagatttccacagggataaatccagcactatcctatactcaacctcaaggaattcctgatacagaaagtccagttccagttattaatcttaaagatggaacgagacttgcaggagatgatgcaccaaagagaaaggatttggaaaaatggcttaaggagcacccgggttatgtgg

SEQ ID NO: 10115 - DNA, 1173 bp, Homo sapiens
agtttacatttaaagtacttagcacaatacttgccatataataacttatatttattatgtgacaggcattatgctaaggtacttgaattgtctcattttatctttataaaaccctatgagggaagtattattgttatccccattttacagatcagaaaattgaggctgaaagagatttactgatttgctcgagttcacatagctggtaagtctaactctagagggtgtacttttaactaggctatatggcctgtccagcatggtagttattcattttactgttctagttattctacttaaaacatttaaaatttacattatcacatatttatatattacatcagtagtccatagggtcacggtgggcctttttaatataatcataaagattacctaaggtggttcaaaaaatatgtattttaaggaaataaactctgtagagcatacaataaaagcaatcaagagttttctatgtaacagtgttgtagtatttaatctgtttctaatttacaggttggaggtgcatttgctccccctttgaaagatttatgtagattcctaaaagaaaattcagaatatggagtagctcctgaatggggagatgttgttaagcaatctgtgagtattttacgaatactaactcatacattattttcaaattaggtgccattcaattatatcttagattaattataattaataaaatattccatgaatttgtgacagcatttttcagtttgcaatttttattttgcagtacatgttgcaaatttctcagatgcttctcaggttagaacagaaaatcaatactgatttgtttttacattaacctctaagataccatttgaatgatgccacaaagagtaatcaaatatatgagcaaatatgtaaggatattcatcatgatatactagtaaaaaattgagaataaattaatagttcattaagattctggaaaactatgcaattttttttctttttctttttcttttttttttttttttagacaggatccctctctgtcacccaggctggagtgcagtggcgcaaccttggctcactgcaaccttcgcctcctgggttcaagtgattctcatgcctcagccttccaagtagctgggacaataggtgccaccaacacaccctgctaatttttgtatttttagtagagac

SEQ ID NO: 10116 - DNA, 1699 bp, Homo sapiens
ataaaaatattgacattctaaggagagatatatgttagcatttttctggtactcaaataagttagtagtaaagtctgcaagggcataaatttagggggaaaaagtgtcccagttctctcctacagaaaaaatactttcagtatgttttgataaaactgttgctttgtcatgagttagtcaattgtatcaggttttccaagacctttaccagtaaattatgtttctgtatgtaaaataaccccttattagagagacagtgttatatgtatttacaaaattatataagttccattgggattgtattgattttgtattttcccaaaatagtactttgaattgatagtcctttatgcaatgtcttagcaatagtctctataatgcccatccaggagaagtgggtagtaattcttcatcatgaaaatgatatattacatatttagtatcttccctttgcagtattgcacttttgtttaactagaatacacctatgagatagccaaagtttcaaacacagttatcttagtttaccggtggagtatttcaacaccaaccacatttcccttcctccctctaattctacccacatgatctttattccttcctttcgccaattaaaaaaaaaaaaaaggaaaaaaaatctgtagatcttgtcactaaaatctaatttatatcaaatttatgagagaaagtattttcctaattatggtcaaataaatttggttaacatcctagtgattctctttctatataataaggcaattacagttttcaaagcattaagtctaacataactttaaacattctcttaggtttcaagacacttctatttaatattcattggggaaaagttgtccagctatcagctaagaaaacacatgcaaatatggttgtgtaaagttaagggttataaggaaaaaaaaatcagtagaattacataatactaaagttgcagttgaaagaatatccaagtatgtgttggtagttactaaaagaattatagctgttattgccttgtatttatagcccttgtttcaggttttatgattcaagtcttagtccaatctttcttttggacatttgcaatatttaccagttgtgttttgtgtagtctgaatttgctttctgtagttgagcaaacgtcttaaaaagtcatttgtaatttattaaattactttctatgatgttctatagagcaaatggaagtttaattattttttattaaacatattctttgactacccatgatgtcagcctctgtacatgagaatactttttaaaattgaattttatatagaatttatcttattccagttatgagagacaccatagttgtaaatctttaaaaggaaaatataccgtggaagaatttttaaaacaaaaattggctataattttatccacagtatcttaaatgctgtcaatttttcattttgatttaattttattaatattgttcattgtggatattggtgactgcaaaaaaagcaaaagctgcttcttgggcattcaaattgttaaaccccaattttgcagcccaatctcaacttcatgctgaacattaagtattattttcttaagtttttggacttttaaaaaactcagaaatactcagagatattcctcacctctttaagaagtccattttggaaatcaataattatttttttcccttagtcttaagagtgtttcctaactcatt

SEQ ID NO: 10117 - DNA, 1132 bp, Homo sapiens
gggcaagaataaattgtaaactagtatgaaatacatctaatacattcaaattaaagtatataatatctgaacagtgtaatttttttaaagtggtgttttttgtttaaaagtagacttacttgcaaagttgtattttgtggtttttagatcttagtatcctaaaatttgatatcctaaaatttaagttttaagtttcccttaaccatctctacataaataattgaataactgaaatctttcgagtaatgatacactttacttctatttgccattttttgacaaattcttagcgttgaaataggcccatatatactgtttcctatacatttgtatgctaagtggtatactgattatactctatgttttacattttagtttattacaaattggcttattgtgtgctgatatctctgttttgtgattctatacaccataggcttatctgaagattttcatgctaaagattctaaaccttcctctgaccccccttgtatcattgagaaactgtgttccttacatgatggcctagttttggaagcaaaggggataaaggaacatttctggaaaccctatattaggaaactttatgaaaaaaaggtttgtaagtagcaaagaaataacgtgaaaatgttttctggagaaaaacttgatttaacatgacgacttaaggatctcttctttcatcatagctccttaagggaaaagaagaaaatctcactgggtttctagaacctgggaactttggagagagtttgtgagtacttctgtataaaatgttttaatattttaaattgtatacttaggaaacttcagaagttagtgtttttattgtttgtactctggaaactgagaatatgttttgtgagagaatacagggaagcaaaaattctgtcacctaaatataagcacactttttaaatgtgttcaaaattgtatggctgtttttgaagtttctttaagcttctggattataaattttgaaataaattcttttggaactatatgggtgaaaattgatgatgtgtaagtgtggaagtcttcaggggtgcctagagcagctagacagatagttaagcttctcaccggaagttgcacctaccagcagctgaaacactgtcagcaaaatacttgt

SEQ ID NO: 10118 - DNA, 1524 bp, Homo sapiens
agttatgtgagaaaattaattagataatgtctaaaacatacatgtcgacaacaataaaaaatactgtgctttattaagttaggggaattggcttaaaactgcaaaatgaatgttatagaaatttagtgagccaacaaatagtttttaaatacttttctcttccttaagcttttctccatggaatccttctgtacatgatgaagccagagaaaagatgctgactcagaaagtaagtggataacaacttatgaaatggctaactcattgtttcttttctaaaatgtcttcatttggagactgctcattacatacaagtaactttttttgggaaacaagtttgtacagtgctgaaatctcctcaccagtaattttttaaatatctgttttgattgtgcctagaagaagcctgaagaacagcacaataaaagtgttcatgttgctggcctgtcatgggtaaagcctggctcagtacagcctttcagtaaagaagagaaaacagtggcgacttaagagatggtgaatctggtgcaccatgcactttcctgctagactctggcctagttcaagctgaccaatggcagaggactgcctgaagagtaaaactgtgtgaacaatgactgactgccagtgttttccatgtatgcataggttctaacagcagggtttggaaacctgtctctaagtaatgcattacttctgtcagaagtgtcttagggtggttatctagttcagtactccaaattattggggaccttgaggcttaagtaagtatttttctgaatataatgctaaaggtaagttgcattcatttaaactaatagagcagacagaattcagcactacttaatagtttataaatcagtggtttcagttgtatatatgttaggaaatggagaggtatagagagagcaggttccatagctcagcacttttaagtggaagatcatttgaatctcagtcttcagcctgcactgatttgtagcctgcactgtcttactgatttacaaactgaaatcactgagaaatgtctttagttcagtgagaagaaaccagaacacttgttcctagtgttgtgttgttttttttaagcaaattacttactgtatttttatggcaggagggagaaaaagtgttacaacggtttctaatgaagtccggtatttaaatgataaatgactaatgtgtttagtagagacaaaataaaccaataaatgattgttctttgccatttatgcaggaaactacccttttctcaatataaccaaacaaaggctaatttataaatgctttattgaaaaatacacttatcttcatataaaattacagtagcagtatcttgagaagttttataaatatttttgcagaacactattctaattgaacaatgtaagttccatatttctctcagcaatatgaagttacctagtaactttgtttatactgattcaatttacaattgaattttctccctaataagattattaatttgacttgaaaactgctggaacaatagtgattaataaa

SEQ ID NO: 10119 - DNA, 1130 bp, Homo sapiens
tggcagtgagctggcatcatgatgaaaatctggtggacaggtcagcggtggcagtgtacagttatagctgtgaaggtacagtctgctcttggaaaaagcagccctgtatgtaataatatgacccgagttgtttaggctctggagatacacacgcatatacatgaacatgtttgcatgtgtgcttgcgtgtgtacatgcacatgcgtgtgtgtgtatcatgtgtcctttttagtcttgtcacacctgtatgtctgcagaatatgcctctttctcatctggccatgctagctggctcattgttatactgtactcagaatattttcgcacgtaagcactgctgtcatttgtctctcttgtgcccaggagagcagcctcttggtttcatacagccgactgtcttctctacagctcagaggagattgtacagttgctataattaacttgctgataaagagctgggaaaacaaaaatctgtcaaatctttccaggttcccacaggtgcacatttccagacctgccaaaatattttattatggttgacatcactatcttgatgggtgtgatttgtcaaatatggacttgttcttggcttcctatagtttgtaactactgtccttccttgccagaagcagttgaggtaggttttgtaagcagacagtcctctattttcaggaaactccctagctctttacccaattctgcagttttagaccttgttgggtggctgtggtagacttgttcttgcattttctgatgtataatccccttgaaacagatcgtaggctacctcttagtagcccacccacatttctcttcttctattattgtttctgtgtgtttatggccctcatttttccttagaatagaattacaaaaatggtagttgaacagatggaggagagcatgacctctgttgactttcttttgtgtctgattatttggcaaagggatacaagacatagtattagctctcctgtctgatttactgaaagatgtttggaaaaccagaattctggatatcccatcagggaatgactggaactttccagggtcattattttctgacaactctagttatttgattggatttttgtttgttgttgttatttgtttactaaaattactgtttt

SEQ ID NO: 10120 - DNA, 1200 bp, Homo sapiens
caggacgaccagcacacaccactgccaatttatttttaaaaataaaaataaattggccaatttattattaaaaataaaaataaattggccaatttattagtagcttggccaatttatttttaattgttttattagtagcttggccaatttatttttaattgttttgtagagacagcatcttgcaatgttgcccaggctgggcttaaactcctggcctcaagagatcctcacgtctcagcctgccaatctattaggattataggcatgaaccaacacgtctggccagacctcagttttaagactactcttttcttagctttgcagatatgctctggagatgccagcttacactgggaactggttaggctgacctttctcaccttttctcatcctatggccatcaagttactggaggagaattaagagacgaagtcattgtcctcgcttgtctatcacaagggtattaaaaccaccatcttctctttatggtccacaggtcgagtttgagtggctgaggcagttttggtttcaaggcaatcgatacagaaagtgcactgactggtggtgtcaacccatggctcaactggaagcactgtggaagaagatggagggtgtggtaagtccatcagacctgggaccgtgttttctgggctgctgtgttatacaaatcctccactgcctcatttgcttaggcaaatgtagatttaattattcctaattatcaagttagattcttcttggtaaggtgatgggtatagccaggattttgtcagtacaacctcagtttagttcaataagcatttattgagtattttctcctcatagggcatgtgctggacatatactatgaagtggtgataagaggataacaattcgaaaataatatttaacattcatttgcatttttatatgcatcaggtgctactctgttttctcagtattaactttaaaaaatttttacagcaatgctaagaggtatagaaacttttccaggccttaatttgtggatgtgaaaactgaggggcagggaaatgaagggcctcccccagggtcactgagtaagtggcacagcaaggtggaaactcaggcaggctggctccacagcttatgctctcaaccactgtgtcccaacagttgaacaaggagaggggcacgaatatcaccaggtatgacattagctaaattgaaatctggtaatag

SEQ ID NO: 10121 - DNA, 1138 bp, Homo sapiens
attcttatctcctgactggttctccttagagaattctcaaagccttttaaaattgtgtgtttttctggggcagccttgaaagtcccaggagtgaagttgccatctgtcctttatattaaaagaatcttctgtattgtatacctgatgtgcttgtcccagagatagatattgttaattaaaggacagcatttgtcctttatctgaaataactctcttgcctgaataacagtttcccaagccttaggaaacaggtaaggacattcggcccagagccctgatgtttactaaaggtccttggtccaggagctgtccctcagccttcactagatcagacatgtagactagaaaattacttgcttattttttggggggggcttgttttctattaattcatctaccaacattatggccttttgcatgcgtgtaagtaaatgaacataatatatactgtcattggtagtttgtgctttttttgtggcgactcacaaacagcgagttcccagacattctcaccacactgcatctttatgcaatagatgtgacaggacctatatcctccagtgtcacctctctactactgcacactctctgtttctataccttctgcccctgggaaaagaaaaatgcaaacatctgcctacagcaaacagagccagagttctgccaggtgatagctagaatatgtatagggagaaagaaagcctcgcccgtaacctgctctatctctgtctcaggaaacgcagaaaataatttgtctctgtaatatagaaaagcagttagggtaacgtggctgtgaactgctgcctaaaagtgtgctgtgtgctcgcctctgtagttgctaagcacggaggaggaggctagccagggccttgccacagactaacttcaagaaaagaggaaaagagtgcaccagcagactctggactgaggagcatgtccaacggaggaggcgaggtgtggccaatggttcttttgttgataagaaagaccctgaaattgcctgttgcatggtgaggagagtagtagattggaccgtaattttctggtgacctaacaaaccaaactaaagctcaagtttaataggcaatgattcccgtttaaaagggaattcaaattatttacagttctccatcatcat

SEQ ID NO: 10122 - DNA, 1177 bp, Homo sapiens
tcctggcctctggaaaccagctgaagcagtgggccagctggtctatcttcaatcttgcataccaacatctttctctgattcacagatttcctttatccccagcacttcctctggtatgtgcatccccgaaagtaagtgatatctattattggatttgggcgttttaaaatcattagccttctggaggggaggggagaggaaggaggctggatggttacattagaatatttccagagggaacctcactttaatctcatccacctctgacttctgcaccccagataacccccatatttgggagggatgacatcacagtaactgacaatggaattatcaccattgctctttttaatatttaaatgatacacagactcagagaaaacaaaatgagtttacatatagtcataatatccataactagagatataaaacaaaaagctatggagattcttatctagtgaagaaatctcttttagaaagtttctgatgactttcagttgcaaagcatagctctttcacaatatatcaacccactttcaatgatttgagatttggagagggcccagccatagatttacctggtgagtcacagagtagaacttgatatgagaaagcaggaccctatatctatcagcctaatggttctcagaataccaggtcatatccatcatttcttttcccaaatagctgtaacaggcatacctcgttttactgggcttcactttcttgtgttttggagatggtatgtctttacaaactgaaagtttgtagaaacctgcattgagtaagtctaccagtgccattttttcaacaacatgtgctcacttcgtgtctctgtcacattttagtaattcttgcaatctttcaaaagtatttattaagataaaaaacaaaagaaacgatataaaaataaagagaaaaaggaagaaaatttgttattattatacctgtcatagtgacctgtgatccgtgatctttcatattactattgtaattgttttggggcacaatgaccctcatccatataagatggtgaacataataaatgttgtgtgtgttctgagtgatccaccaacctgccattccttcatctctctccctctcctcaggcttccctattccttgagacacaacagtattgaaattaattaataaagttatagcgtcctccaagtgt

SEQ ID NO: 10123 - DNA, 1549 bp, Homo sapiens
tggtgcccatgaagttttaaatgttttaaaatgaccctgtgttatagtctgatttggtgttaaacaggaccttcttcccccaaaattgttcagattataaaatgtgagccattcagcccccaaggtccagggcaggcgacaggaacgagcccagcgtgtgacaaagcctaacctactttcctctttcccaagctttttcagagactctggagtggacccagccctctggggaaagacagaacttagagacatcccagttactcaccacacccatagtgctgtccaatatggtagccactagctagctgtggctacttcaatttaaattcagttttaattttaattaaaaatgcagctcttcagtcgccctggccacatttcaagtgcttaacagcctcatgtggctagtgactgctgtattggacggtacagatatggaacattttcatcatcgaagaaagtcctattggacaacacttctataaaaagtttgagagcaggaattctcatttccattcgtctgtagcttctatccccaaaggcaaagaaactaaaagagaaatgactcattgaagattggcctctttcctttctctaagacaaacctaagtaaaagcctgagctttgagtcctatgctcagcacacgggaaggagatgttaataattaaaataaagttgatatcctgtctttagggagttcccttgatctcttgaaagagacacagccccatttacattatttcgtggatttcaccagcatagtatagtttttttctgtaagtccctcattcttatgtaataacaggtggaactgaggtttgaagaacctcagtggcccatcctgatgacattggagactcaaagagacaagagagagtagggtttaaaacctgagctttaagactcccactagcttcgtgtcctttggcatgttaacgtgcctcagtttcctcatctgtataatggggatatatgaaaggcaccagtcctaaggtgaacattaagtgagatgattctagttacagacttagaacaatttccagcacatagttaaatatccaggaaattctggtactgttatgtgtgggtgagctgacctggatgtagatgttttcctctctcttgctgacccctccgccagttttgtcttgtgatgccattaacacatctctccctttctgacctggctcctgcccattggtgtcccaagaaatcgtgagaatagttagccccccgtctccccagcctgttgctttctcgtgtagttgttcacagtagttgagaagttgaagagcttttgcctattgaaggtgcactgagaataaactctttcctgccaccagaattgcagtggttcacggcctgcactcattcccatgaatgcagttaatagccacagaaatgtcacattaagcaaagcagccagggtctcatcgtgttgagactcgagtctctcagaccttggattcattccctggtgtctttgagcctcagtttcctcattggtaaaagagaagtgaagcagtgtctcacagggtcattacagag

SEQ ID NO: 10124 - DNA, 1211 bp, Homo sapiens
ggttttaagtagaaaattcgcagatactacttgttctgttcctttatagcacacctgtcctgatactgacttggaaagagacaagaagactttggctgaccccacttggaaacaataggcactaatcccaaaattgtgtattgatcccagaattctcaggaaaagaaaaaaaaaatcaatacatgccgcttccagggttctcagccttactgtggggctgtcctcaaaagtctgcatcactgggtcaggtcttgacttctctctcatctctcttcctgtctttcaaccctctctcctccctgcaaccctcagggtacagcctgttcctcgtggcagcccacgagtttggccacgccatggggctggagcactcccaagaccctggggccctgatggcacccatttacacctacaccaagaacttccgtctgtcccaggatgacatcaagggcattcaggagctctatggtaaacctccgggcgggggttgggggtggagggtgaggaggggggaggtcatgtagcctgggatggaggcccagggggtgggaccagcaagatctcatccagccaggagtgctggagacgagggcaggaaatgggagtgttgacctggtcttgggaaggcagagcagctctccaaggggatacttggataactcttccctatccgaacaatgctaatatccatgtcactcttagcgctccatttctgggtttctcccattttctaggtgagtaaggtcacctggtgcaaggttacacaggtttgagcaacccagtggagtttagaatccaggagaatagccaagtacaggacagaattttccatcatgtggaatgaccttaacaatacgggggtggaagtttctagttttcataataagctttgatttttagtatgtagtagaaacagaacaaccagtgccttaagccaattatttatttatttatttatttatttatttatttatttatttatttattgttggttcttacagtgaggctagagtttaaaaagtcagttcatttttaaaaaatatttaatggtccaggtgatatctgagccaggccaaaatagtgaaagtggtgcttgagtgatgaagtttggggactgctagactcaggaaaaagcccaaggtctgccgtgaggggtgctgggttcaaatgtggcctctgcccttcactagctgcaagatattgtgtaagtc

SEQ ID NO: 10125 - DNA, 2243 bp, Homo sapiens
cagagagcttcctcccctcggaaggtgcgtcctctgaccccgtgaccctgcgtcgaaggatgctggctgccgccgcggaacggaggcttcagaagcagcagacctcctagcgctcccttgccttcctcagctgcctcctgcgccctgtgcccgactgactggaggaggcctgtcccaattctgcccgctccatggaaaagcgggcttgactgcattgccgctgtataaagcatgtggtcttatagtgtttggacagctgataaatttaatccttctttgtaatactttctatgtgacatttctcttccccttagaaacactgcaaattttaactgtaggtatgatctcttctggtgttgactggactgcttggggtgggggacgatcaggaggaagtgagcagtcgcctgcctgcagcaggcagcttctactcctgcctcatgcgtacgtcccacaaatgcaggtgtcctgagcaccacacccagtgggaagagtgtgggggaggcgcacagtgtgagcccgcccccacgtcgtggggtaacatctgttatcaaactgctgtcgttgttgtggaagcatgtagactgtgccagaggccagacccacgggctcatgcacccctgagccagcagggcatcttggaaaaggaactcttggttcgatacctggagcagaggaggggaaagtccagggctatagggtgtgatgaagtcacccctttctgtcccactacatctgggactgactttccgagcctccagtccaaagccggcttgatttccgtgaactctggtgctcctgcatctcatgagtgtgccccatgggtcccctcccctctcagcatttccttgtcccgtctggacctggggagtggttaggcagcaagctttggtttatggttttcattcattggtgaagtaaattaggcagtgctaaagcctgtgggtttggtccttgaacaagatgtgggccttgcaagatgggagagtaaaccttgaagggctttattaaagaaataaaaaagaacttttgtatcttttatcctgggagcactgcgttttcctagctgtgttattcctggtttaattcagcagagaaggtaaggtgtgaacctacctgccttggagagggcccaggtcccaaatctcttcaaattcttcacatgtttaactttaaggatttgaaccatgaagtcataggttacagacctcagttttatgccccattggattactttttttttttttttttttttttttttttttactctttgaaagctttgttttgtggtagtccttttgggaagaatccagtattatccacaattattggcaaagtttaaatgtattttacataacggaaagtttttagaatgttgaaaagtaattgaaaaaggtgataggtaaatttttaggcaaagataatttatttcaataaatctttcaaaagccttaccttgaaatgctgttagtaaatttctgtgatttttttttttaatttgttttgctgagagcatagctatttgtttttattgtaaaacaataataataataaaaagcaaactctattggtgtgttgtgtgtggctggaagctaaggcatgtttttgtgtggctggaagctaaggcatctttttccagaggtgccaacgttaaaccccattttgatttggattttgtgtatactattttggttggagggttttttcccatgtttttgaattgggaacttttgtttttcctagtagtgtatttggggaaggcagaactacatttttcttccccttgtatttatatctttttttttttcaggtaagtgtgtagcgaaagattattttactgtcctcgaattacattatacttcacacgttgcacccattgtaggtgccactaattccacatgttcacaggtttctgatgtgtgaaaagagaaaattacttggatcaattttagagggtcttgacacattacaaaacagccatatcacagtgtttagagcaggagcttattaagtagcttaaaatgatgcaagaagtgaagttctcagtccgcccttccattttacacctggatacttgaggatttcaccacttcctgggggcgtccgggacaggtgctgagggcagtggcagttatgctgggggcttcccctcccaggaccacttttgctgccctgccagctgcagggtcaggcagatggtcctcacgcccagcccctggagaagcagcactcagggctgtggg

SEQ ID NO: 10126 - DNA, 1292 bp, Homo sapiens
ggttgtgttgtgttattttttaatttgaagaattttttttacaaagtctaatcttttctattgtgtaagaatctggaaggtagaagtagtaaaaatgatagcccttgccattctttttcattgtgcattaaaaatgtaagcatttttttcttttttttgagagaaggtcttgctctgtcacccaggctggagtgcagtggcatgatgatggctcactgtagccttgacctcctgggctcaagcaatcctcccaccttagcctcctgagtaggtgggactacaggtgtgcaccaccattcccagctaatttttgtatttttttttttggtagagatggggtttccccatgttaccgaggctcatctcaaactcttgagctcaagctgtctacccacctcagcctccaaaagtgctggggttacagatatgagccactgcgcctggcctatttcttaatatataagttactaaactaatatcgctatcctttgaatagctaacattccataattgatttagggttatagtccaaagtttacagattagtttctgggtgtcttacctccattcttcagatggctgctttttttttttttttttttttttctgttttcttgaggacaagtattagaaagccaagtgcagaatatatcttccatagaagccggcttttgttatggtaacttccctcaaatggggtaggtgtgatggtactcaccttcataaacatttttcttttttagcatctcaaagacaaattttggaattttattttctacaagttcattttcatctttggtgtgctgaatgtccagacagtggaagaggtggtcatgtggtgcctctggtttgccggacttgtctttctgcacctgatggttcagctctgcaaggatcgatttgaatatgtgagtttttagccaagctttttgcttgcttagtcaccacgtttgccaactttgaattgtgtaatgtgaatgagccacagcaggcatggtcagggtagctcttctgggaagacttctagatcaggcccccattgcctgtttcttgaagaactttctacagcagccaagagatgcagaatcgttgtctcctggggagctttcttcccaaccccatagtgtttacttactgctaacatggggtcacttcacctatgcagactgttttgttcacagtgcaaggaaaccttgatacataaacaataaaatctggtcttttctagatattttctgttctagtctccttctgtctctcccagcttactctggttcgtggagctcttcttt

SEQ ID NO: 10127 - DNA, 1490 bp, Homo sapiens
aataatgcatataaaatgcttacaacagtgccagtaatctggtacatacttaataaatgttagtgaaattggccttttgtgaaagcttattgagtatgaaattgctctttctacttcgtcactaatcaaaccttatcttttgccactccactttggcctcctgataggttacaagttgaaatgcatatggggggaaaagagtcatattatttattcaaacacctacttgtcaagtgcaggaactgtgctgagtagtcagagtataaggacatgtagaaacttttcctgccttaaagaacttattagtggataattaatcaaatttatagtcttaattttttttattataagtattcaacaagtgtttttagtgtgtaagatgtgaccagtgagggaaaattggtgtagaaaatgccaaacgtggtaaaaaggcattcgaaggggaaaaaaagaaaatgccagacatgctaagggagggcagaaacatccagataaatttatttatctaatatggaaagtagtatgtactgtctttaataaaggtattgttctttttaaaattcaggttcaattttatttacaactgaattcctgcgcagtggagaagtaaaagaagccgcttgtctctgtgagcacagctatatacagtgtagaataaatgtggtagaaaagtttttttggttttatctcttttgcgatccctaaattgccacctttctattgtttgaatagtaaaattaatatgaagaactagatagtggtgtaaacaaatgtgataatgtttatttactttcggttctgctcatacttttttgtacaacattaaagaaaatggactttttttattttaatttctcattaaacttctaaaattcttataggtgaggatcatttttccccccaccttaggatggtgaatgttgcaacacaatgacaggtttaagtcagtcaagtttattggacccttgctttgataccattcttgggcacatactccaagattgtattagatttttgtgatgaagagcttccattacttctgaaaactatatttatctgagtgagtccaaggtgcaactcctaaatgaattgtgttgcagagaactcccagtataattcactgaccagtacattttataaccatccaggccttggtttgcaagcaacagaccttaaacatacaggaaactattaaaattggctcgatcagtagtcataggaattggtataagaagagactcatttagagctcagagttttcttcacataatgggggtattaattatttgtgctgttgcgaaattatgtgtcttattcttaaagccatggtaaaaatagggatctgtgaaggaaatttctaaaattggatgtattaggttttgaactctgagattgcacaaatattcaattaacttgaagttgtgtacatagagaagaaaatttggttttagcaaatgacagagccttcaaaaatatttttggaataatgt

SEQ ID NO: 10128 - DNA, 6290 bp, Homo sapiens
atctaaaactatcctaaaataaaccgtttatttaagaccaagaagaatgcttttaaaaatagaagaaaacatgaggggaaaaacaaccaagagttgaaagttacagccagtgggaatgggtgaagcaggacagagaactgcagtttctcaccatgaacattgtagaactatttttggccacttaaaatatgtagagtatgactttggttaaaataagtttagtgttctgctatacaaattaataaaaatgaaagctgaattttgaacacaatttttatgttgatactagcttgccagttttgaactaatattgtatgtcttgggcagagtgacatctatattaacaaatcatagaaaatctgtatggaaggcatattatccctatgtttcaattaggagcactgctaagaattttctgttcactgaagaaggggatttgtgagtacatatatttagttgtttactggcttatttctttttgacagatactgggtcgtcaggatggagttttgcaagactgggtcattgacgattgcattggtaactggtggagaccaaattttgaacctcctcaggtcagtgttcagttacatttgctgggcattttggaagcagaaagctcgtttaattctagccactttaaaaaagattaaagtagaatttgacttgaaattttcttttcttccctccttaatttaaattacaaaattaagccaagcacttcttattttaaaggaaaatgtaaaacaaatacaaggccgggcgaggtggctcatgcctgtaatcccagcacttcaggaggccgaggcgggtggatcacctgttgaggtcaggagtttgagaccagcctggccaacatggtgaaagctcgtctctactaaaaaatgtaaaaatcagctgggtttgatggtacaagcctgtaatcccagctactccggaggctgaggcaggagaattgcttgaacctgggaggcagaagttgcagtgaaccgagattgtgccattgcactccagcctggacaacagtgagactccttctcaaaaaataaataaataaatagaacaaatacaaaagaagagagaatggtaaaagtgaatgaattgcgctacccgtcgtctgcctttaacagttagcacatcacaacccctcattccaccgcttcattctcctaccctcatcttggattattttgaagtgtatcctagctattcatttcaattgtaaatatttcagtgtgaatcataaaaataaggatctctttaaaaagataactatagtactgttattatcatactaaaaataaacaattccatattattgtcaaatatatagtcactgttcgcgtatcctgattatttctattttctttttataatttgtttggattaggatagtctctaaagtctcttttacacacttggcaccttttttttttccttgtgttttatttgttaatgaaaacaggctaatgtttccatttcgattgcattcccctgttgttgttgaatatgtagctgtttcccctgtgtgtcttgcaaattgatagttagatctagaaattgtattcaggctcagttaatttggggaggggtaacaaggcttgtcataggcggtatataatctatacctgcataacaaattacctcaaaatttagcagcctttaggcctctgggagttgcttagggtggttctggcttaggctctgtcatgaagttacagtcaagttgtcagctgggactgcatcataaggtggaactggggttaaagtatctgatcccgagcttacacgtgtgtgtgttagcaaacttcttagtttcatctgggctgttagactaaagctttgcttcaggtgttgctggctgttgtctcaaggtctccctcagttccttgccatgagaacatctctaaaaggacaactctcaggcagctggcttacccaaggctgtgtgatccaagagatagtgagagacagagtgctagaggagtgcccaagtaggaagcctcagtctgtgataacctaatcttggcagtggcataccatcacttctgctgtgtgctattggtcacacaagccaaccctggtacgctataggagggactacacaaagcagtgaataccaggagacaggaatcattgggggtcatcttaaggcagtctatcacaattggtatagtgtacttccatcaggaatttaaaaatatttggttgtttcttgttgtaatgttagcagctcattgatgatcatttcctggtctatgaattcataagggttgtgatcctcatataaaaagaaacttatgtattactgaagtgtgtggtttgtgtagaaaaaaaaaatatgctgctattcctttacttaacatttttcagaagaatgacttaattccttagcatcctctaaagacttgactttattcaaaagagagggtaagaccaagacttgggtacaggcagtttgagaggtgattccaggaagcagcagaatacaggggagagagagaccagaagcagcagaagtaagacagggcatgttattgatctttttacacctgtgggcaactggatttgttctgttaaggaccaggaaccatgtagggactcctataccccattggataagggttgcatgaactcccttgcatttccatgttgagtcttgagtgcttgttgagacagtggcagcaaacagggaaccctctgatacttttcaaacatagctgccccgaaatcagaggtagcgtaatgtggggcacacacacacaaaaagcatgtttcagtgacctttaaagtgtcagtatgaccttttggatttaaataatttgaaatattttaatccatgataatgagtgatgatgttactgatgctcaaatattcctatttttgctaatggtggaacttcttaaagttggatcctgaattctttaggcaaattaaaaagccctatgactttatagctcctttacatgacaagatgtttcaggtcaagcattgcacaaaatatcaaccaagcaaaagatcgttcttttctcttgcttctgactcccttgtatggcagagggacaagaagataggggctgtggaagctgatgctggtgttcactacctaagaattgccaggaacacatcttggctttaaggaagaacaatttcatatggaaacagtgaagttacttgttcaaagatacatagtacagttattctaaacttttttttggcttcctgaacatgccttgatctaattggaaaatgcttagtagtgaccccagtggttttccagataacttttctgaatatcttcactcatctcccctaccactgtcctaggacagttctcttcattcagtaaggcctagagttggccctggtggtatttgacataaggtaagtgtattgatttatttaggaagcctagagtattagttagatgtcagtggaaaaggagcatatcatcttcctatctcagtctttttgtataaagtacagtcaacttaaacattaagaccagagaagaaaggcttaaaaaaataggaacatgtagccttgagcagaagaaatttggggaaatgctactcattttgtttgatcatggtttgggaacttttattgtatgtgatccacagatctcttagcttgtgctattcaggccactttctctgtgactgttaatgtatctggttttcatgacagtttaaggaacctccaaagcctgggacaattgcctcaattcattgtaccctagggatggctctgatatataattattctaactggaatactggttaggtgccaatgagtaacacagtgggaaataacataggcttttataattagataagagttgaatagatacagttaaatcttggcttcacaacttggctgagtaatcttgggaaagatacttagcctctcttagcatgtgattctgtgtaaattgaggatgatgctaatacctccttttggcagcttctgcttttatctcactttccccttatatctgttttcagcaattttaaattccccagctctcagatacaactccaacagcaaaagtagatttctgaatgtattgtggagagatttatacaagaattgtataacccttagactttttttttgttctgtgtcagaatttttccttcccgggtagcaacttccctctctaattctcttcatccctttaaattctctaaaatatacatatatattatatatatatttttatatttgtttcctcgagtaatttggctttgcccatctggcaaaacttcacttagactgctcttctggtattcctgaagcatgcaccttggcatacggggaggtttgaggttggggctggaaggaggagcaagaagcatcttgtcaaatgcctcacagcttatatttgaatttttaatgtaaacaggtctacaacaggattctagactgtttaacttactgatcatatatatatatatatatatatatatatatatatatatataatttttttttttttttgggagacagagtctcactctgttgcccaggctggagtgcagtggcatagtctcggctcactgcaagctctgcctcccaggttcacgccattctcctgcctcagcctcccgagtagctgggactacaggcgcccgccaccacgcctggctaattttttgtatttttagtagagacgggatttcactgtgctagccaggatggtcttgatctcctgacctcatgatccgcctgccttggcctcccaaagtgctgcgattacaggcgtgagccactgtgcccagcctatatatatatttttaaaaaaccagcttttaggctgggcatggtggctgatgcctgtaatcccagcactttgggaggccagagcaggtggatcacctgaggtcgggagttcaagactagcctggagaaaccctgcctctactaaaaatacaaaattagccaggcatggtggcgcatgcctgtaatctcagctactcaggaggctgaggcaggagaatcacttgaacctgggaggcagaggttgtggtgagccgagattgcgccattgcactccagcctaggcaacaagagcaaaactctgtcttaaaaaacaaacaaacaaaaaaaagcttttattaaagatactaattaaaatcggacttcattatgttttaagtatctcaagctataaatcctgtgactacatattttatctcgaatggttgactggtttactgcttgttattttatatgcattaaagcatttatttactagtgtatctgttagataagtcctggtaaagaggacagaaagtagtatgcttctcccaacagtttatactatactggggagtaaacatgtaaagaaatgaagccatggaatacatattaaagttgtattcatttgtaatttcagtatccatatattcctgcacatattacaaagcctaaggaacataagaagttgtttctggttcagcttcaagaaaaaggtaagttattttgttttcaaaggtagccatctaaaaattctgtagaataatttcaaggatacctctatttgtgttttctcaaagttccttgaacttttgggtttgttgtaaaactaaagatgtataccatgcttttagtttcaaatctgtggctaggaaatctaccttgaaagacacaaccaaaatgtattaatgagaattatcttttttcttacactttttattaaatgtaaaattggtaatttaaaaatgaaatggaagcagtgattatataataacttataataatgaattctgttttattttagccttgtttgcagtccctaaaaattacaagctggtagctgcaccattgtttgaattgtatgacaatgcaccaggatatggacccatcatttctagtctccctcagctgttgagcaggtacagaaagttgaacattttttggttcatccatattaactgtcaaatttaaaatattctgagccacttgggaaggtatagttcatgaattttggtctttaaggaaactaagaaagtagatagactcttagatcatgtgcaagccatagattaattgtgactaataccatccccagactcttaagtttcggcatgacattctggtatttgtgcaactgctcttccctaattctgatattctcaagagttaaggttgatgtctttattcaaaaaagagatggttaaatagcagtcaacagtgtgtaaatatgagcggagttgtctgtattaaaatgtggcaaattggctggatgtagtggctcatgcctgtaatcccagcactttgggag

SEQ ID NO: 10129 - DNA, 1194 bp, Homo sapiens
cccgctgcccaaggctgggcgcgagtcccagggctttttcagagatccctagacctctgcgtggcggcccctccctgagagcacccggttaccgtgactgaacggcgtcctgcggctccaggcctcagccacctgctttttcaaggtttcttccgtaacagcgtccgaaaactccgccatcacctccttctttcccttttttcccacccgggctgggccgggctccgctggccgcttcccattcatctcttcccaaggcacagaaccacgccacgcagatcaagacgctaccttcctgagggtactgcaactcccggcatgtcccctttatcgtgtttcccggccctacccaatgggaagcaccaaagtaagagaaggcggaacctatacccggtttaccaatgggagctccagctattgcagccatcccaccagcaattggcccactggagctcggtctggcaggccaccgcccctctacttcctgccgccagaggctccgggttcacttccggcgtgcctacgcctcctcttgcgctgtcctgttaatggcgggcagtagccgctgaggggattgcagataaccgcttcccgcacggggaaagtctaccctgcctgccactttctgctcgccgtcagcgccggagctcgccagcatgtctgtggtaccgcccaatcgctcgcagaccggctggccccggggggtcactcagttcggcaacaagtacatccagcagacgaagcccctcaccctggagcgcaccatcaacctgtaagtgcggcgcggccttggcgggcatttctctcgtgaaagctcctatagactctccgacgcgcccccggcttttcggcgcgcttcacgcctctgcacctccccgcctccaactcccgctggcggatgcgcgccttcctccctctctcaggcccctttctcatcctccagcctccagggttagagtccttttctgaaaggaaggcttgttcccatcctatgtattcggtcataatggggaaaaacggagtttgcttttaactcatcctttccccacctctccagaggtaaccgacttcaaaatgtgtgtttttttaatccttccagtgaattgtttatgctttcgcatcacgtacatggtattgctttgtgagtgttgatgtgatacgaatggtataacctagtatcatttttgcagattt

SEQ ID NO: 10130 - DNA, 1719 bp, Homo sapiens
tacatggtagcttgcctgacagtgttcttaaaactggttgtcttttactaggactcataatgattgtcctcaaccgagaccttgagcttgcagctaagtacttatctcttgattaaaaaaaaaaagttggcttttttttttttaacatttagtcctttttccatattggcttcttcagtgaatttttaagttcaatttgtttttattgaggtaaaatatttataacataaaactgaccagcttacccatttttaaatatgcaattcagtggattaagtacattctcattgttgtccagccatcaccatcatccatctccagaagttttccatcttcccaaattctgtgcccattgaacaataactccccacctccccttcccctagcaacagccataccttttgtctctatcatcaacttcactactcatatttctcatgtaagtggaatcatacagtatttgtccttttgtgactggtttcacttagcataaagtctttaagatgcatccatgtttccagtgtttcggtttttttagaaaaactcatacgtgattgcagccgggcatggtggctcacgcctgtaatcccagcacttgggaggccaaggcaggcggatcacctgaggtcaggagttaaagaccagcctgacaaacatggagaaaccccatctctactaaaaatacaaaattagctgggcgtggtggcacatgcctgtaatcccagctactcaggaggctggggcaggagaattggttgaacccaggaggcggaggttgcagtgagccgagattgtgccactgcactccagcctgggcaacaagagtgaaactctgtctcaaaaaaaaaaaagaagaaaaaaacataagtgattgcagaattttgttcttctcataatttctggtttagaaaattatggagccttacatcctgatcatgctgggccttagaattctgacacagtgagtcatcacatttcctcccactgcctgtggccttgttccaccatgactctcacagtacagtgtaggcttagtgtagtattattcccttggaaagggtctggcctaccatcacatgccccaagaaacttctggttggtaaagaagataggctgcttattgccatgtgtagtcacttccaagtgcccactgcctttccatcctgcaattgtggcctgtgtataattaaatgattttagcctcacgtgttgcttctgttttcctaaatactgtagggtcaactatataactaattgctttttattttaagagacggaatgctaaaaccacatcagaatgccaagaggctgtgcatcttgttaatttttttcttgaactgttccagggagttacatcataattacctgtgtgtgggtatgcatgggtggatgaaagatgctgttctcattccatcccaatagagtcttctgtttcctttctcttttttacatttatttttagcttttgcagtagtgtttagtgtgggttttactaattaatagaaaaagcactgggcctttaaacttcttaactactcttctctttcatctcctaaaacttttgagtattcattcttttctgaagtttgcatttaaatgaaaatgactttcgctttggcttttaggtttagtttcaaaaaggtttaattctgcaccctagccagttaagaaatgttttagcaggtatgcccttgatatggatatttatatattttacac

SEQ ID NO: 10131 - DNA, 1696 bp, Homo sapiens
tgttcccagcctacaaatctgtacagcatggtactatactgaatactgtaggaaactgtaacataatgctaagtatttgtgtaattatacatatctaaacacaaaggtacagtaaaaatacagtattataatcttatggtgacctaaacttcattatctggtacatggctgtaaataaccacaaggccctaggacagcccttgtcaaatagtgttccaagtgagataataaagccccactgccctaagacctccctccactgtatgtactgaatgtgaaactagtcacccaaacctttttccttaggcttagtcctttagtgaactcaggtagaaaagtttgtcctaggggatgacagagccacatgattaaaggaacctgggtccctgcataactatggagaaatccttacataataaatgaaaaatgagtcattatgattttgaggtctatttgttacagcagctaacattagcccaacaaagtaatcactctaaattgactcttccttaatgtaaatttgttgtttgcacccatctttcagtgattaaaaagcacacaaatccaaatatccacatttttttttttttttgagacagagttttgctcttgtcacccaggctggagtgcagtggtgcaatcttgctcactgcaacctccacctcctgggttcaagcaattctcctgcctcagcctcctgcatagctgggattgtaggtgtccaccaccaaacctggctaattttttgtatttttagtagagaccaggtttcatcatgttggccaggctggtctcaaactcctgacctcaggggatccacccgccttggcctcccaaagtgctaggattataggtgtgagccactgagctcagcccaaatattttttttttttttttttttagacgggagtcttgctgtcgcccagactggagtgcagtggtgcaatctaggctcattgcaacctctgccacccgggttcaagcaattctcctgcctcagcctcccaagtagcttggactacagatgagtgccaccatgcccagctaattttttgtgtttttagtagagacggggtttcaccgtgttagccaggatggtctcgatctcctgaccttatgatccgcccgccctggcctcccaaagtgctagattacaggcataagccctgtgcccagcccacatttttgtttttctctactacaaaatacaaatgggcaattctgatttggtggtgattttataatcaatcaacacaaagtttaacatctttacattttaatgaaaaagtagataatctatttgaaaagtacaaactcaattgcaatttcaagaaaaaaatatgtatttatataccataaataagcaaaattggactctgaagccctaatacttcaaaagcattcatcctattccataaaaacctagtattattcagcaacagtactactactgatttaaaaatagaaagcaagtctatcttcacatgtagttctttgtctttaatttgtacaactcaccaaggttattttcattcttagcacccggggttcaccagggtgtgatccaaagcaaaccagcataggtttttaacagaaaatctttgccaggaacttcatgacctgtattttcctcacctaggaagaagctgtccccactcgcatgattttgaacagtgtgttgatgttattgcttcga

SEQ ID NO: 10132 - DNA, 1137 bp, Homo sapiens
gagttaatggcttgctcaagttcccaggaatcggttgtggactgaggaactcggccccgggctcttagtacgccgtcccttgttcaggtatccagggacggttctcacctctgtcttttctccttgcaggtgactcctgcacctgcgccggctcctgcaaatgcaaagagtgcaaatgcacctcctgcaagaaaagtaagtgggatcctctctttcctctaccccttccctgtcctccagcctgtcccctctccaccatcctcaggggaattaaagcagtctggggatgccccattgcgcggaaattgttgcctcctcagtgatccttatcagggagagcaggaatccttattcccggtgtcgctagtactcatctctgccgcctcctgtctgcccccaggctgctgctcctgctgccctgtgggctgtgccaagtgtgcccagggctgcatctgcaaaggggcgtcggacaagtgcagctgctgcgcctgatgctgggacagccccgctcccagatgtaaagaacgcgacttccacaaacctggattttttatgtacaaccctgaccgtgaccgtttgctatattcctttttctatgaaataatgtgaatgataataaaacagctttgacttgattctgtctctggtttcctttatatgccttaaaaataacggactggggtgagggattgaactgggagggcagagacctgggctgtggatggaaatgtgagccgttaagaaagagtgcattctggcaagccaggctactgcactgagcttcagcttctgtaaaactgaatggcgctgtgccagatcatatgggagcaggagggacacatacatgatcactttcagtttcacgtcaaatgtggcacagaaacttctccattcctcacttttactttcaatttccctgcccaacttcagttcttcgtgggattttagacttgaaagtgactacagagggtgaaatccaactccccagtggctggaatctgacatccggtttcccaaactccctgtggggaatgaccagttttgttttgttttgttttgttctccattagtcacagacctaaactctggtaaaataaggagttaataagaaaatgaaagtttaaaagacacaaaata

SEQ ID NO: 10133 - DNA, 4086 bp, Homo sapiens
acatcctctcaggcgaggagaatcgacgggagagagaggccgacccgtgttccccgtgttgctgtgtacggaggagcgggtccgagggaccgcggtgtggacagggacaggcaaggcgggagatgaggagaaacgaaagccacatcggtggcgggtgctctgcacacaactcgctggctaccgcacgctccccgcttcccactcagccgatccggggacaggagcaggagggctgcaccgggactccgggacaggcccagctgaaaacggcgaagcgagggatggggtggagacgcccgcgacgccaaggctggggtcccggaaagcgcggggaggagggtggaaggcaaaggcaacttcagggaaactgggaaaggcggccaggacctcggggacaccgcataccgccgggcgcacagcccctcacgcgcgaaggggcgccagaagggcggtcccgcggcgcgccgggagtggagctcaggggttggtgcccccggcccttctgctgcgcacaggccagcccaggaccgctgggggctcgaacccagcggggcgggtgcaagcgcggggcaaggcctctgcgcccggcccccttccttgagtaggaaagcagccgcaggttgtggcgctccaccacgccgtccacgtgcgccttgcggtctctccatttatcgcttgagatctccagccttaccgcggctcgaaatggaccccaactactcctgcaccactggtaagagaagcccaactctgcgccctgggattcccatttcccagccccagtactgagggtctctgggtttgaggaggttgcattttaagttctgagcggaaggggactcctttacttccttggggtgctttcttcctgatcgcgctcctgagagcactgccctccctcctgggcctctaagtcagagttaaggatactgaggctcaaggcagtcctgctccacatcacccagttggtcagggtcctgctggctgggccccagtgttctcctccaggctctgagcaatcagggtggatgctgagctagaggcattgagtcttcagggttcaggacagaaggttctggctggcaatctcagaatacctgggttgtatgtgcacgtgggaccttcctgataaggtgaaacaggagggtgcttgcccttcccagtgtgagtggagaggacatggggcttctgttcctctgtcctgagtgggaaaggagctctgagggctggccctgcacagaggagggggcactggagactcattgacccactgctgtaccttcttcatctcactcactgccaactgcgttttcctcttccttgcaggtggctcctgcacgtgcgccggctcctgcaagtgcaaagagtgcaaatgcacctcctgcaagaagagtgagtgcggggccatctccaggaatctggggctgtggttaaggttgggagggaactcaaggctggccctgagtgcacccttctggtgaactgggctttctttgccctcgttgcccatttcattccttctcccagctttctgccctgagttcagatggggcagaacagcatttttctcttgggatgcaaaccccaactgtaccatctatggtttcagaacagagctatgccagacgaaaaaagcttcctctgggtctggcgtctgagctggagccacgcttgctattagggcagggaggtgcctggtgaagtctgctgccacctctcactctccccttcttccccaggctgctgcttctgctgccccatgggctgagccaagtgtgcccacggctgcatctgcaaagggacgtcggagaagtgcagctgctgtgcctgatgtgggaacagctcttctcccagatgttaatagaacaacctgcacaacctggattttttttttatacaatactgagccatttgctgcatttctttttatattaaatatgtgagtgacaataaaacaattttgacttgaatcttactctgttcttctttgtgtgccttggaaaaaatggactggggtggaggttaaaccgcaagcttagagaccaggctctggatggaaatgtgagtcactaataatgtgaacaccttcaggccagtcaggttacctcactgagttcacacttctgtgaaatggtactgcactttgccacaccatatgggtggggaccatacatgatcgcttccagtctcatgccaaacgtggcacagaaacttcattccttatttttattttctgattttcctccacaacttgagatccacattggattttaggcttaaaagtggctatagtgctggaacccaacttcttagtttcttgaatcctacatgtgtgctatgatttagatattttgtcactgccaaatctcatgttgaaatgtgtcctccactattgcaggtggggcctagagggagcttttggggtcatgaggacacatccctaaagaatgacttggtgccatcccatggtaaagagtgtgttcatcctctggtaggtcactccagtggtggctgtgaatgaaagtgattagaaagggactggtatagactcaatgttatgccttagtcaggtgtactttagggaaataactggatgtcttgctttttaattttatttttttagagaagttgacttgctatgtggactaggcaggactggaagtcctgggcttaagtgatgctcccgcctcagcctcctaagtagcttggactacagcttcccgccacctcccccatcttgctttttagtttaaagcagggtcagcacatcacatgaagtcatctcctttttggggatatcccacatgtccagaactgccagacggtagtggggtggccggctaggctgtggggagcacggagatttatttgcaaaggaggacctggacaaatgtgcccccacatcctctcaggcgaggagaatggacgagagtgagaggccgacccgtgttcccgtgttactgtgtacggagtagtgggtccgagggacctaggtgtggacagggacaggcaaggcgacagcgaggagaaacgaaaatcacatcggtggcggttgctctgcacacaactcgctcgctaccgcacgctccacgctctgcactacgccgatccggggacaggagcaggaggctgtggctgcactcagacttcgggacaggccgagctgaaaaccgtgagaggggtggggtggaggcgaccgaaacgccaaggctgggttcccggaacgcgcggggactagggtggaaggcaacttcggggaaactgggaaaggcgaccgggacctcggggacgccccgtaccccgggcgtaaactcactcccgcgttagcggccccaaagcggggagggggtggtcccgtggtccgcacccaggggagctcagtggactgtgcgccttgcctttctgctgcgcaaagcccagtccaggtcatcacctcgggcggggcggactcggctgggcggactcagcggggcgggcgcaggcgcagggcgggtcctttgcgtccggccctctttcccctgaccataaaagcagccgctggctgctgggccctaccaagccttccacgtgcgccttatagcctctcaacttcttgcttgggatctccaacctcaccgcggctcgaaatggaccccaactgctcctgcgccactggtaagggatgctaggtttctggtccttaggatacctatttccccgccacaggatagatgtccctaggagtagaggtgttttttgagttctagctaagtggagtcatttatttcattgatctagtgcttttccactcagcgccttcatcatccctagaacattcctattctaatgcctcccatttcagaggcgagaggactcaggctcataattctcctgctccatgtcacccaggtagtcggggactgctaggctgagccccagtactctgcgcagttcctggggtggatgggagacaggagttattggtttttcgggattaaggacataaagcccatcctagcctctacagatagaagtaagattaggcttcatggtgccctgagttggacaggagctatctatcaggcctggcaatgcactcagctggca

SEQ ID NO: 10134 - DNA, 4086 bp, Homo sapiens; identical to SEQ ID NO: 10133

SEQ ID NO: 10135 - DNA, 4783 bp, Homo sapiens
ctgggaatcagggtgctgggcagagtcagaggagggaaccgagagctcagcaggcaggagcaggacagtgacaagcttcccacatcccctttctggtaagtgattctggatcacagctggaaaaacacaagatagttgattcccaactttcattcttaaaatggggaaactgagggcatgtgcgtgcaccaacctgccaagcacagacctgacacttcaggactttcctcacttaagtgtacggttttggggaactggctttcctttgtccctgtagccccagtcactgcctctccagtcttctgtcatctctcaggtataggttgtgctgggcagctttttcactggaagaccctcaccccaaagatccaccagttgagtcctaacagagcaatgccaccctgaactgagggtcctctggggctggaggcagggcttgagccaggcctctgtcagggcagagaggtctccggtcgagtctgctctgacctctcactctccccttcttcccagactgctgctcctgctaccctgtgggctgtgccaagtgtgcccaaggctgcatttgcaaaggggcatcagataagtgcagctgctgtgcctgatgctgggacagccctgctcacagatgtagaaagagtgacctatataaacttggaatttttttccatgcaaccatgacccatttactgtatttgtctctcttttatgaaatatgtgaatgataataaaagttgttgacttattctggctctggttttctttgtatgcatggaaatagtggaccccatactcaagagagctggtatgtgtgactgcattgagagtccagagacctgggtgctgggaccatgccctatcatcttacaccatgagtgccttaaggaaaaccaggttccctgtctcagatcactttttcagctaaaaaagattcctttaagattataaaatggtatttttactgtacctttctatgtttagctacacaaatacttaccattgtgttaaaattgcataatagtgtataggtttgaagcctaagaacaataggctaaagcagacagccaagctgtgtagcagccagtatcagctaggtgtgtgtgagtacattctacaatgtttgcacaatgacgaaattgcctaaagacatatttcttagaatgcatacctctcattaagtgacacatgactgtaatagggttggactcgtagaggccaatgatttaatggatgtaaagaactcagaatggtgccttgtacatgaccagtggtctataatattaactactattttgttattattattcacggctgctatggcctgaatgcttgtgtccctccaatattcatttgttgaaatctaactttcactctgttgcttttaagaggtggtgcatttgggaagtgactatggcatgcaggcaaagcgctcatgaatgggattagtgccttaataagagaggcctgagggagcttgtttaactctttccaccatgtgaggaccagcaagaaagagacatccatgaggaatggggccctcacaagactccaaatatgctggtgccttgaccttggacttccatgactccagaactgagagaaatatatttttgctgttttaagttacccagtttaaggtatctggtggtagcagcccaaatggactcagacgatagcatagttgacatttttactccagacaaaagagccaggcctggtgtccctccctgtgtgtcctctgtctttctcatcagccacataagcattgacctgtggtcctgacagggtcctgcactctgccacaaaataaggattcacaccagaaatataaagccatgagcaagacagtccctgtccccatcacagaaatggaaagacgcctgccagttctgctaccacctgcaccaatatgtgactcaacatttttcttttaaatgattcctatttccttagatatatttatatgaaaagcaaactcattagcgctactgaaaaaagaatcaatttaacttccagacatagaaggttgccatgaaattctccttattcatacccctctgcatccctgttttgcttccaggactgaccttgatgcttggttttgtttaaagatttcaaacagtaaagagacgaatatacctaggtcagacggaagcttcatcagtgccctctctcccttgggaagctgacaggactcagacccagcagtatcatttcctagccctctgaccacgggctagtggcttgaactccttgtactgtcattgtccagattaggaatatgggttcataaatagaatgtgtgtcccttttgggttgctgtgagggttcaaagattgaaagtgattaaacagggcctaacatggattaatgttatgtacaataataggaatatggaaggaaattgctttctaatttcatccaggatctgcatgtcaccttcaatgatccctcttctggggacatcccacattttccgaatggccatcctgtcgtagggcggccagctaggctgtggggagaccctggagagatttatgcaaaggaggacctggacaaatatccccattcagcttctcaagagtggagaatggaagggagggagacagagccctgtgtctctgtcctgttgctgtgcacaggagaaatgtgactgagggaccgaggtggggacatactcaggcaaggtgggaaatccaaaggtcacagcctccaccagtcctttgcacacaactctctccctgtgctcccgctgctgctgatcctgaaagttgaacacggggctggggttgcacacggtatccagggaaggtaacgatgataacagtcctgagtcaggccaggtcactgctcatggcccaggcatggaccacgggcagtgcagactcagcaggggtgagtgcaagggccagggcggggcctctgcaccccaccacctcccccgactataaagggagcagccagctcctgggctccatcacaccttcctcctgccctgacttctcatatcttgcctaggaactccaggcttgtcttggctccaaatggatcccaactgctcctgcaccacaggtaagggacgcctggctctgggccttgagatgcccattcccggccactgtacacagtgtccctgggttagagaaggttgcattatgagatgtgagttgaagggaactcgtttacttttgccagtgctttcctcttgcccaagctcctgtgagcatctccctcctctgtgcttgtaagtcagagttggggattctgaggatcgaggctgtcctgctccatgtcacccacctagtcagggggctgctggctgcgccccagtgctctgctctaactctgagcagccgggaagggtgagaggtgggggacatagcctcttcagagttcaacacagaaggttttggcctccagccccagtcttcctggactgtgtgtggagctgggaccttcctgatggggtatataaagaagggtgcttgcccttcccagcctgagtggagaggacatggggcttctgttcctccgctctgagtgggaaaggagctctgatggctggccctgcacagaggatggcgcactggacactcatggactcactgctgtaccttctgcatcttactcactgcccactgcctttttcgcttccttgcaggtggctcctgtgcctgcgccggctcctgcaagtgcaaagagtgcaaatgtacctcctgcaagaagtgtgagtgtgggatcatctccaggaatctggggctgtggctaagcttggaagggaacacaaggctggccctgagtgcatgcttttgggaactggtcttcctttgcccctgttggctgtgtcattccctctccaggctttctgctctgagctcagatgggtcagggcagactttttctattgggacacaaacctcaaatgtaccatcagaacacagctgtgccagcctaaaaatgcatcctctgggtgtgggggctgaacttcagccaggcttgctgttgggacagagaggttcctggtcaagtcagctgtgacctctcactctccccttcttccccaggctgctgctcttgctgccccgtgggctgtgccaagtgtgcccagggctgtgtctgcaaaggctcatcagagaagtgccgctgctgtgcctgatgttgggagagccctgctcccagacataaatagagcaaccagtactaacctggatttttttttttaactaccctgaccggtttgctacattcttttttctattcaatatgtgaaagacaataaaacacttttgacttgattctgactctccttttcctttctgtggcttggaaataacagttggagtgggggattgaactgggaatttaaagacctggttctggatggaaatgtgagcccctatagtctgaataccttcaggcaagcccggttacctccctgagctccatcttctgtaaaatggaactgcactgtgtgggatcacatgacggggttggggggacatgcatgatcgcctcgggtcatgtcaaatgtgcaaatgtggcagagaaacttctccatttctcatttttattttctgatttccctgctcagcttcagtccctcatcagattttaggcttgaaagtgatgacggggtggaatccaactcctcagttgcttgagctctacacggggcttctcgaactccacagtgaagaaacattttctaattccaatccatcccaggcctaaacctttgtaaataaaataatattaattacagatataatgaaatcaaacacaa

SEQ ID NO: 10136 - DNA, 1139 bp, Homo sapiens
tttacctgaagaacagagattctttccaggagaaatggatattccacatgtgccacacctgctattctaacacttgtggagggaggcagtgcccaacattccccactccatccatgaaccctataccagggccattcagtccttttgaaagaattgagtcctttgccttggttattaggaagcagcagccagagcccttccattctcctgtcttcccctgggtgcttcctcactaggacagaggcacagacctgcctgtggttcttctccccctggaccccgctgctcccgttcctcaggtgtttggaaggtggggtggcagttagctttggtgtgttacccacaaccccaacgcaactggggagctggccagtgtggatggctcagccactccgaggaaggaaaggttggccgaagcttctgccggccattgcctgcttcaggaggtttaaaaagaagagaaaatagatactttgccatttactttgctttttatcatttcagatttatatctataatgagaaaattgtaaatggacacctgcagcctaacctggtggacctttgtgcttccgtcgcagagctcgatgataaggtagcacctagagctaactcaagtagaaaccggggtccagtgttccgatgggcctagcaacttgccgatttggttgaaatgtgctgcggagacacgccattctgtggaatgaaatgttaactgttcttcagttttattttaaataactttgggtggttttcttgatgatgaatttttaaaaatgcatcttcaaaaggccctgccagtatcaattgatagtcacaagagttctcttcaagccgtatttgctttgaagtcccatcaggcttttactccccactcaccagtttccctccttacacaatctagtaggctccttaatgagagcagaattgttaaggtgatggctttttacacctgtgagccctcgaacttgactcggtggggcctttgtgagcattctttatataccactggttctgttcctctgacacacacatatactgcctttatttgttctcctgcctcaccctttattcctggccagttttctcccataaggggcaaaaaaaaaaaaaaaaaagggggatggatgactacttggt

SEQ ID NO: 10137 - DNA, 1270 bp, Homo sapiens
gttaatgtcttaaggttcccccagaaggagatttgagtgcaagttgtttatttaggaggtgatctcacatgaataagggagtgtggaggccagggaggggctaagacagttaagggaaggattcactcctgtccatcactgcttgagtgctgctgggttgtgcaatggagttctaattccctggcatttctcacctgcccatgaaggcctcagcaaatagaaaaccggcaggccaatagatacaggtgcaggtagttgcaagtcaggttaaagcgatggtaccgaggggaggggatggggcagagacagtgtctcttaccccggatgaaggaaggcttccctgcttttatgtgtttgggacctgggacgctttcagatgcccttgaggatttttattgagtatgtatctatctgtctgttcccttatgtctgtagattgtccccagctacggaaaacaagctccggctgcattaccgtagggccctcaggaacaatacagatccctacaagcgggccgtgtactgtatcattggcagatgtgacgtcaccgacaaccagagtgaagtggcggacaaaactgaggattacctgtggctgaaggtaggcactgtttcccctgcccacatagggctttaccccttttctgtgctcaagtccccgcaaagattttacctgcttaatgtatgatgccaatacagtgatcaggaccagtgggttcctcgtctcctgtccccattttttgttgtgtaattcccagctcataaccatagccttaaacacagcttctagctgacatcattgagcatggctgctgaacagctacaactctgtgcatgtggctcagggtgtcatttgtaccaatgcatgtgtttctcttggggatttagttgaaccaagtgtgttttgacgacgatggcaccagctccccacaagacaggctcactctctcacagttccagaagcagttgttggaagactatggtaagattctggacataaccacctttcccttctcttgtccacttaaggtgactacttcagttttcctctgggaaaatttttcatctctgaacttttgtctttcttccaaaactcctatagattgtcaaggcaaaacacaacaaaactaccattccaaattcaaataaagggcatgtggccttaagaaatacataaaacttatatggtcatacacaataatctgttttctctaattctttgaactgttctagtagacatatgctcagggagagaaaaagaagacttagc

SEQ ID NO: 10138 - DNA, 1186 bp, Homo sapiens
caacatcaacacagttgtgctgtggaagcctgagaaacagccctatccagcctagggcatcattccctggggtcctggctgcctgctgctgtgcctatggggcagggggcagggatttaccctgccctttcctaacattatttggtgttcatcatagccctaattgttttctcattgtttcattacctcattgtttcattacctgtaggaaggcactgatcctgaaactgaagaccccaaccacctccctccagacagggatgtactagatggcgagcagaccagcccctcctttatgagcacagcatggcttgtcttcaagactttctttgcctctcttcttccagaaggccccccagccatcgcaaactgatggtgtttgtgctgtagctgttggaggctttgacaggaatggactggatcacctgactccagctagattgcctctcctggacatggcaatgatgagtttttaaaaaacagtgtggatgatgatatgcttttgtgagcaagcaaaagcagaaacgtgaagccgtgatacaaattggtgaacaaaaaatgcccaaggcttctcatgtctttattctgaagagctttaatatatactctatgtagtttaataagcactgtacgtagaaggccttaggtgttgcatgtctatgcttgaggaacttttccaaatgtgtgtgtctgcatgtgtgtttgtacatagaagtcatagatgcagaagtggttctgctggtacgatttgattcctgttggaatgtttaaattacactaagtgtactactttatataatcaatgaaattgctagacatgttttagcaggacttttctaggaaagacttatgtataattgctttttaaaatgcagtgctttactttaaactaaggggaactttgcggaggtgaaaacctttgctgggttttctgttcaataaagttttactatgaatgaccctggcagagactcctgtcatcctagcagtttactctgcgtttgttgtatctagacagtcaacaactgagttgtcggtgtttaacctgaatgcttgtttttcagaagaggactgtttgtgccggtaagaatgatcaggtaaggccatgaaagtttttgttggcgtttttgtttttgagatggggtcttgctttgttccttgggccagagtacattggctactcaca

SEQ ID NO: 10139 - DNA, 1261 bp, Homo sapiens
cccaggcctgggtgcctactctgggagcagcgactccgagtccagctcagacagcgaaggcaccatcaatgccaccggaaagattgtctcctccatcttccgaaccaacaccttcctcgaggccccctagtttctccgtccctacacagggagctcctccccaagggtagatcggaccgttcatgctgcctataggcattatgtccctcaaaaaaaaactcctttgcctgcatcctgtgtacaacatgacatttttaaccaatccaatctaaaaatgtgccagaatccacctgtggcccgaatcgtgtttggttcctctttctactccactgcagatgaccaaacctgtcccgctgccactttcctcactgatattgggaggagggcaaggcccagccgaagttccactaaaaatgccccaggagaataggcaccggctggcttgccaaagggtttgggttttattgctttctgttttttcttttcccgacagcacaaagaagtaagggcagttattggacaggtgttatttaaacattctattgtaaatgaatgtgttgtttggttctactgcattgtggagcatgcgggggaagagaactgacccaggtagtgaaatggagcccttccctggaactaaccagtccttgatgttgtgtgactaagtaaagatgataaaccccatctgctgggggtgtcacttcacactcggcatgcattgtgaaagctttccatacccttggccattccctctctcctctctctccaaccccatttatgcaggaagggactgctaacaagaacgcttccatctcaaaccttttctctgcctgggaaattattttatgtttgtttttgaaataaaggatttagtttaagattctaaattttagagaaacaaacgtaggccttgtttactaatagccagacatcagaactgcaggtaggtatgttaatgagatgacttatttctggcagctcctggaatcctaatattgtaaatgagtgggacacacttgcatattgtgaccattctattgaggcccttctctgtttaatgcatattatacttgtgcttttaactgtggaatctatttctaacctaaaggtgctgccctagtacttttctttgctgcctctgctgctctttttcctttccaaacagcaactctgaggccatgagcagccaaaaactagaggtactgctccacctcgtctcataaagggaaacgggctcatcccttggattctggaggaggga

SEQ ID NO: 10140 - DNA, 1187 bp, Homo sapiens
taataagaattatcccaggtcctcttgccaactgtgtagataacatcgatgttaataaaaattctctgatatgtcaggaaaaatgtattcatgtgctttcatcaatggcctataaattaaactatttgagagttttttttttttttgagacagaatcttgccctgtcgctcaagctggggtgcagcggtgtgatcttggctcactgcaacctccgcctcccaggttcaagcgattctcctgcctcagcctcctgagtagctgggattacaggtgcgtgccaccgtgcctggctaatttttgtatttttagtagagacggggtttcaccatgtcagtcaggatggtcttgaactcctgacctcgtgatccatgcgcctcggcctcccaaagtgccaggattacaggcatgagccaccgcacccggccgagaattttttcaattcaaagttggaagataatttttagtttgttgctgggtgagatggagctaaatctccttgtttctctttagaattttaattgcagttctcacttgaaatgattttttttgtttttgtttttgttttgtagattggttgtttcattatggatggaggggatgatggtaaccttattatcaaaaagaggtttgtgtctgaggcagaactagatgaacggcgcaaaaggaggcaagaagaatgggagaaagttcgaaaacctgaagatccagaaggtatactgtgacagtcagtataatggtctttaatccacacagcaaccctgcagagtaggtattaattgtcctcacttggttttatttatttatttttttgagacggagtctcactctgttgcccaggctggagtgcagtggcgcgatcttggctcactgcaacctctgcctcccaggctcaggagattctcctgccttagccttccgagtagttgggattacaggcaccagccaccacgcctggctaatttttgtatttttggtagagatggagtttcatctgttggccaggctggttccaaactcctgagctcaagccatcctcctgcctcggcctcccaaagtgctgggattacaggtgtgagccaccatgcctggccaattgtccatactttagagttgaggaactgagactcaggggcgaagtcacctatgtaaggtcctgcacagctgggagcagagccagcatactcac

SEQ ID NO: 10141 - DNA, 1531 bp, Homo sapiens
tcctacctccagccaatgaatgggatcattctggatgtcaccagcccaataggctcagctcatgatgacagaacacatcttggaaagactgactctgttatgtaactcttcatttatgttaagtattaataggtcaaaaccaaaatgacctaaccctcctggacctatttatcctgaaacaccttcttgtattcattaaccatagtactcctccccacctcaagtagacacctctctcaggagcttctgagtcagacgcctctggagcgagccctatgtcaggcactccacctggggggcccttccccagcatacctgctggtgtgtaagtgtggactaacccgccgccaccaccctctgttccagcaggctctgcatgaatctttgtgcacttgcacctctttttcacatgggccacagtttcagtacttcagcctcagtggggttcctgatgtttatctagggtgttactcaagcccagtttgagattttggagtctcctgtgatcacatcttgtctcggctgtaggaatcaacagaaggagacgtcctctacataaaagctccatgtgaaaagctactcctagtcttaacatttgcagtccttgtgtcactgtcttctggtcctgatgtagtcccactgtttctagaagtctcttttaagcattatttttgaaaaaaaaaatatttttatagatgaatactcaggctaacctagtggatgtgatcttggaacttccatgattatccacttaaagatcaaagtattatatgctgtgtgctttttaggtgtttgttagtactgtgaaggcaaaaatgctttctacattgacattcattcctattttactgggcacctatgaatgtatgctgtgtgctagaaatagactaaaacatattcctatagcatgttagtgtgtttgcatgtttgctgaaaatcctttgtgtataaaccagtttgtaaggttctctgggttaggtagggactctgcagtttcttcctgtcaaaatctctcctaccaagatggtgttccactgtccagcccagcatgagtagcaggtagagcacagctttactggctgtttgtatgctttggtttagtgcaatgtgtggtagattacttatcagaaaacatatatgtcatctctagaacgaagaaaaagcatagtagttcaattcccagtgtgtccctttgattttttttttttaatagtaaaaataagaatctgtactgacttttcacttggccattctggttttaaaggacaagctacaagctctgtgtttctgtactgatgtgtcacttattaaatacttttgtaccatgagtaaaacttcaggtgtttcgcaagaaccaccattctcaatgagttgtattctttctttaatgtagccactgccataaggttattaattattgctttggtcttttttttttttttttaaatgccacctctcctgggcttgctttcccttgctttgtctataaatgggaggtccaccacagcccaggcatgctgggagcacttgc

SEQ ID NO: 10142 - DNA, 1555 bp, Homo sapiens
ccactgcactccagcctgggtgacagagggagactccatctcaaaaacaaaaaaaaaagaactatggcctcctagggaacttttcatgactatagtttttcacgaaaccagaaatcttgaaaactcttagtattttggtctcaattggacctgcaaacatagccatttccttcaggccactgtggccacattatgaaattaggcatttctttcttctggctggtatgcctgggataagctgacccttggcttccccattctctctctccagtgctacctgggcgatgccttccgctgtgccagctgcccctaccttgggatgccagccttcaaacctggggaaaaggtgcttctgagtgatagcaatcttcatgatgcctaggaggttcctgacatgggacccatctgctcctccagccaactcctgtccctcacatcccaccatggtggctcctcccacctcctctggatttgttcactctgagatctgtttgcagagtgggtgcttagcagacagagtgaagctggctggggggcacagtggtgtgtagtgctgctgtgtatcaaaagaccaaggtattatgggacctggtttcagaatgggatgggtttcttcacctcatgttaagagaagggagtgtgtcctgaagaagcccttcttctgatgttaaaatgctgaccagaacgctcttgagcccaggcatcgttgagcattaacactctgtgacagagctgcagacccctgccttgagtctcatctcagcaatgctgccaccctcttgtctttcagagttgttagtttactccattctttgtgacacgagtcaagtggctcacaacctcctcagggcaccagaggactcactcactggttgctgtgatgatatccagtgtccctctgcccccttccatccccaaccacatttgactgtagcattgcatctgtgtcctgttgtcatttatgttaaccttcaggtattaaacttgctgcatatcttgacatatcttgagattctgcatgtcttgtaaagagaggggatgtgcatttgtgtgtgatgttggatagtcatccacgctcagtttggaccattggaggaacttagtgtcacgcacaaatggggctattcctacgcttagaatagggcttgtctgcccactttagaagagtccaggttggtgagcatttagagggaagcagggcagaactctgaacgacaatacgtctctctgagcagagacccctttgttcttgttatccacccatatggacttggaatcaatcttgccaaatatttggagagattgtgtggatttaagagacctggatttttatattttaccagtaaataaaagttttcattgatatctgtccttgaaacttgatttgattctccaagtttgctttgcttatcctagtccctgctggtggattttagttgtttgtttggctaattgaagtttggctccaaagccccttttatacacaggtctaagatgacccctagtgactcatgcccttgtgtaataacccccttgagtttcagcaggacctgtg

SEQ ID NO: 10143 - DNA, 1529 bp, Homo sapiens
tctaataataaggctgacaatggttcagccctagtgtcttgattccaaaaacctcacttctttattttttcctgtcatcaggagatatcactgactcctgggaccctggtatatcaagtctctgtatcatagccacacctgccaccttgcaaacctggatcttggccaggtgcagtggctcatgcatatcatctcagcgatttgggaagatcgcttgagcccaggagtttgaggacagtctggccaacatagcaaaaccctgtctctatgcaaaaaagaaaaaaaaaaagagaaaaagaaaagctaggtcttttctattagagtctagaggcaaggtaagccctcactattctctttatttccattcccgtgtcagctcaagaacttgacaggtctaaaccagcgtcggtgagaggaaggggtataagctacaatgcctagaagagaatgagcggacagattgaaagagctttgaaaagtataaggtgccatccacataacctggtgttcacgagaacacactaaaggactcctgagtcactaccacagccacctggaaaccacaaggcatttgatgctaccgttctggtcagggattgggctgcttcttcagttcctaataccagaccaagcctcctgatgcctttctgcactgcaactgtgtgattgaaaaatgagatgttcatccaagcagtcaagccacagaaacccagcatgtccctgtcacaatctcatgggcaccttgatcatgtcttaaccttcccttaaccttggggctcccaagccagagtcaaggtctgacgccacctcaaggtgacagctcatctccagcacagcacaggcgtgtgcacacagaggtgttccttgcagccccctccctctcaggtgtcctgagatgctgttcctgggagccccctcagaaaactgcctcacctgagacaagtgcctgctggacagaggtgtgattccaggcctggtgtcacatgacaccagcatgcattgcaggattattagtgtattttgagtctgtaaaaataataaatatgtttgaagtagtttcccattgtgtagttagtttccttatcaatcatgataggtatccaggaccccagagggagacaggttaagttatggcagccaggagacctgtgttctggcgctgccactgcctaatacatagtggtaattatagtacctctgcgtctctgggctcaagtcttcccatcagtaaaatacgggtaacagaagccttcccacagaccatcagctcccttggctgctcttgtctgacgattttagtggtacattctttagccccagtaattttctcagcctctacactggctgggttccctttgcacgtctggttagctctgttttctgctttgctctcttctgcctgtcagctgaatattaatgggggaaagtcagcaactaattgaatttcagatctcttgtgggtcttccactggatcttttttgcacctctcaattccttgtatctcttgacatcctgtgaagttttcgca

SEQ ID NO: 10144 - DNA, 1167 bp, Homo sapiens
ttacgtacatctccctcgtgggctgcagcatctccatcgtggcctcgctgatcacagtcctgctgcacttccatttcaggtattccgctgccacagtgctgggcctgccctgcactgtggcacatcacgcttccttgtgtcccatttagtccactagaactgggtgtgcttctccagagggtggggaccaggaggcgggagaccagccttgtggtgcgactgctgtgggatccctgccccttcttcgcctcagtttccctgtcggcatgcacctatgcacccagtgggtagtgctgcctgggtgatgtccctgggccatggaggaccattctctcacctgcaggaagcagagtgactccttaacacgcatccacatgaacctgcatgcctccgtgctgctcctgaacatcgccttcctgctgagccccgcattcgcaatgtctcctgtgcccgggtcagcatgcacggctctggccgctgccctgcactacgcgctgctcagctgcctcacctggatggccatcgagggcttcaacctctacctcctcctcgggcgtgtctacaacatctacatccgcagatatgtgttcaagcttggtgtgctaggctggggtaagcacatcatctctcctcgcctcctcagacttccaggtgggcagggtattgatcccctttagtcctttctttcccctcctcctcatcgtcatagtggccattacatgaccaccagctgtgaactctgtctacacccacctctactttctatgttactaattttatcacctcttccacctccatcatcatcatcgtcacctcctccaccaccattatcacctcctccaccttcattatcaccatcacctcctccacctcctccaccaccattatcacctcctccaccttcattatcaccatcacctcctccacctccatcaccaccatcatcatctcatccacctctgttatcgccatcacctcctccaccttcatcaccaccatcgtcacctcctccacgtacatcaccaccttcttcaccaccatgatcacctcctccacctccatcaccacctcctccaccatcatcaccatcatcatcacctcctccacctccaccacctcttccacctccttcaccaccaccatcatctccttcacctccaccaccac

SEQ ID NO: 10145 - DNA, 1158 bp, Homo sapiens
aagagaatagtaatgaataggatgggcctaggaagtttgtgacagtgagaggccacacggggacgcagcacagtgcccggctcataggaggtgctcgctgggtctcatgggtgcccgacagcacgtgcttggcaaacactatggagaggtggggcagacccgagtcacaatggctggggagggaggaggagggatggggtggggctcccccacctgctgaccccgtgccctcactgcccgcaggcttcctcatcttcatctggtactggtccatgcggctgcaggcccggggtggcccctcccctctgaagagcaactcagacagcgccaggctccccatcagctcgggcagcacctcgtccagccgcatctaggcctccagcccacctgcccatgtgatgaagcagagattcggcctcgtcgcacactgcctgtggcccccgagcccggcccagccccaggccagtcagccgcagactttggaaagcccaacgaccatggagagatgggccgttgccatggtggacggactcccgggctgggcttttgaattggccttggggactactcggctctcactcagctcccacgggactcagaagtgcgccgccatgctgcctagggtactgtccccacatctgtcccaacccagctggaggcctggtctctccttacaacccctgggcccagccctcattgctgggggccaggccttggatcttgagggtctggcacatccttaatcctgtgcccctgcctgggacagaaatgtggctccagttgctctgtctctcgtggtcaccctgagggcactctgcatcctctgtcattttaacctcaggtggcacccagggcgaatggggcccagggcagaccttcagggccagagccctggcggaggagaggccctttgccaggagcacagcagcagctcgcctacctctgagcccaggccccctccctccctcagccccccagtcctccctccatcttccctggggttctcctcctctcccagggcctccttgctccttcgttcacagctgggggtccccgattccaatgctgttttttggggagtggtttccaggagctgcctggtgtctgctgtaaatgtttgtctactgcacaagcctcggcctgcccctgagccaggct

SEQ ID NO: 10146 - DNA, 1196 bp, Homo sapiens
gcctgtgcagtaagccccctccagagcagcccctgcagccccctccctgtgcctcagctgccccgggggtagaaagggccgggcttgcctacctcctaggtgaggagtgagccccgccacaggaccgggacccagggctccagcccctgtttagcccagatcatgggagggcctggcccatccttgagtccaaaggggtagcagcagcagggtcttgtggggtactggcccaaggcaagcccaccagtgagacgcctgtcactttgatttcagcctgacggctggggctgcagagtctctaggtgagtgtggggcctgtggcccagggctgcccgcctgcctgcccgcagtgggttgcagggctgcgctgggacgttctgctgttcagagctgggtctagcccctgctgtcgcttgtctatgtgcttttgctgggttccctcctgctctcggtggcaactgctgtgggctgccggtgggcaagtggacaagaggctgatgatctcatgcccctgcagggaagtcgcggccactgcctgtgtgacggatgtgaccccgctgggcctgaagctgggccctcactggcctgtccctgctgcagcgccaggacccccggaggtagaggcgagagtggaggctcttcttctgccccgtctcccctcaaagatgagaaacatgttcagaaggaaacggtgtctctcggctgtggctctgagtgcaaattgcatgggcggaaaggcgggggtggctgctcttcctggcaggcctgggccatcagcgaactgggccccgtgaggagggcgggagtgtggaggagggtgggcctctcacccaggctttctcggcccctctcctcagcttgcagagctggccagccccctccttagggggtgggcgaggagcctctgggcagacccaagaaccatggggactggggtgggttggtggcaccaatggcagccctccccgcccctctccttcaaggagggttcccgcagctggggggtgtgcggaggcgcatggcctcccgccacggggccgtgctgtgtttatggctggcagaggcagccagcgggtgggggattctgctgctcgctcacctgcctggctcgctggtctctcgaattttcttccctctgaaatcctatttaagaacttttggaagcttagccatttttacttattaaaataaaagaa

SEQ ID NO: 10147 - DNA, 1231 bp, Homo sapiens
cctgatctggtgggtgccttccctgcagggaagctgaacctggtggacttggctggctcggagcgcgtgggcaagtcgggggccgagggcagccgcctgcgggaggcgcagcacatcaacaagtcgctgtcggctctgggggacgtcattgctgccctgcgctcccgccagggccacgtgcccttccgcaactccaagctcacctacctgctgcaggattcgcttagtggtgacagcaagaccctcatggtggtacaggtgaggaccttgggttagggcgggccagtccctagcatgtaggggctacgctagcagtgagacccagtcaccccaggctgtgcaaatggacctccccgcccctagacctggccacacacaccctgtgtaactcccagtccctcctctccacctttgaccacagcacctctgccatgttgcctgccctcccaccccatccctcaggcctctccaggaagccttctgacggccccagctgtgagctccctctcgtgaccctgttgcccctccagctggcccgggtgggcagtgagctctcgtgtcccctaggtgtcccccgtggagaagaacactagcgagacgctctattccctcaagtttgctgagagggtgcgctctgtggagctggggcctgggctacgcagggcagagcttgggtcctggtcaagccaggagcatctagaggtacggggactgtcacaggcctggctcaggtggccctgggtcagagactttgggtcatggcaggagcagggagctgggcggggacgtcctgaagcagtgggggcagggaagctgccggagttgggtggagctacggctggaacccacagccagcagcctcttcagtacaggtatttcttcttggcctcggaggttcctgtggggtgacgagctggccgtgggggtggcacatagtagatgctcagtggtaactagttgacttctttacatgaattatctcatttaattcttgccataactgaggctggggcacaaacatcatgcccattttgcagatgaggaaactgggtgttaggaggcagggcaggggagtagagagaagcacagcagggtggggagccagggcagccgtggcccccgcccatccgcccttccctgctcacagtgggagccggcttgtcagacgccacagccctcggcacgggcccactcagcccccagctctgggaccagtagccgccctggatcc

SEQ ID NO: 10148 - DNA, 1187 bp, Homo sapiens
cggacggactcctgcgcagcctccttggcagtcctgggggtcccatctggagatgcggggctgtgtgcctggggtggcagcagctggcatgggagcagttgccctgaggttgatacgtgtgtggtgggactggacggttgcctgtggggtgtgcgcaccggaagcaagccagcctctgtgctggtgactctcagaccctgcagggatggcatgagcttcacctgagaacttgaagtacctaagaaccttctttgctggtgcagaagaccagctgctgagggaggccaggagaaggcactgccactgtcttgctgtgggacctggcacatcctcttccagatcctggacctcaacgtccccacccacccacaaagggagggactggacccgctgggccctgggatccttgccagctccgggagcacaccatcctctggctcgagggtccttccctggcacagtctccttcacgtgaggattctggttgtgtcttggcagcaggccctgcaggacaaggggtgcaagagccagagtcaggggacgaaagaagagaagctttggaagagacaggcgccggcccccaggcgggcccgggaggcccgggaagctggtggcaccatgaatgtagagaatacaggtaaagcaggcctgcccgccaaaccggcactccccagtgaagccagcgcaggagggaggctcttgtgcagttggtgatatccccatgccctgtcctccccggctggaggtggcctagacagactccagctgcctgatccgcagctgcaatcccccagcctgcctctcccggattcagggacagtggtgtgtatagaaccttcatctcacccatgcctcccacagcatccaggccccacccagtgataagagtccttggccagcgtgggctggggttgaatttccctgctttttgttttttcccagtgcctgtctaaagcagggcgagggtggcagcctcacagacgccaccacctgcagagagagactcggccttctccctcctatccgtgggcccccagggtctggaggctcctaggacaggactttgattctcctggccagaggctgagacaaaggagccagtggctcagctcttccctggcagggcctgccatggtgcccagggctggctggttctggaagattctacaggccccccttgtagtctt

SEQ ID NO: 10149 - DNA, 1142 bp, Homo sapiens
ctcttcctctcctctctctcttcctcttctctctcttcccctcctgtctctcctcccctcctctcttcctctcctctctcttcctctcctctctctacccctcctgtctctcctcccctcctctctcttcctctcctctctctcttcctctcctctctcttcccttcctgtctctcttcccctcctctctctcttcctgtcctctatctcttcccctcctctatctcttcctctcctctctctcttcctctcctctctctctcttgctttcttctctctctcctgtctcggctgttgtgggttgcaggttgggtgctgctgttgtggtccttcccagaaactgccagtagagggcagcctgggcatcctaatgcttactctggttgttacacaaagaaaatattggggtcactggcgagcccacccacactcaccagaatctccactgtagtccccctaacaaacagcccttcacttcctctcccacttcagcaatttgtattttgatgccattggcctcagatcagagtgttttaaatcatcacgccctggcttatccctggtcgagccaggacacggggtgcttcagtgggtctgtcaccctctctccttgaagcatgttgcttttatttatttacttttactctcaccctgctcctgtaccagcaggggccacttcaaagccaaggtacagggtgataacttgtggtccagcatcagttttctccacttctttctcccactcacccccagcaaggtgcctggggagacttgagcagatgtttcattttggcctggccagtggctgaaagccaggcctccaatgcactgtgacctctggcttccccagcagctttcccagagaggcagaggggccttccacagcccgggttctcctgctgcctcctgcctgctgcagctgcaggcattctgaggggcaacgtggaggaagggccagggatgcatgggattttaattgtttcatcacaccttccccgtggcaaagaaacagtcagtcctcttcaggtgtcttctggatttctggtgatggacagagaaatctttttacagtttcaaattatgttcaacaaataaaaattgcattttttattttggatcttttttggactacttgtatttaa

SEQ ID NO: 10150 - DNA, 1101 bp, Homo sapiens
agtataagcccagtgcagtccttgttatgtaaatttgatattagtaataaaatttaatcaggtttttaaagaaacagcacctagaaaacctagtaatttcaaagtgtcagagttagcgtggtatccatttggggagtgattatttaatagtgggtggctgttctgttttagtatttctgatttttcaaaaggaagaacatttatatactctatggtctgagagcctgctgactgtgttatatgtcataagcagctggtgttgtcttggcaacaaacaagataaacttgctacttccgggccatctgcatgcagtgtatgacctgtgtctggtctgtttattttcctctaagtctcagccttgggaaagcaagctgtgggaattcaggtccttgtctggacaaggttgtgtgcttcttccaagacagagctagtgtgatgcttcttctctgtatttcacaggtactagatgacaagaatgtgcgtcgtcgctttcgggcaagtaactaccagagcaccacccgggtcaaacccttcatctgcaccatgcccatgcggctggatgacggctggaaccagattcagttcaacttgctagacttcacacggcgagcatacggcaccaattacatcgagaccctcagagtgcaggtactgctcctttcccagatagagccctgggttggggatagggcacactgcgtctaatattggcttgtggcccacatagcagaacagtgtgggtttctggcttcagttgccacactgtccagggagctttggcctcacaaaggtccaggaaatattcagaagtcgggtcaggtatagaggtgaatacagcaagtaagacctccctcttgccagaatccatccctaagacaagccaaggagatgccggagatgacgcgtttccagtcctggaagagggcctctagaagattcaggaaaagggggagaacagtcacatttcgcctctcaaaagaagcattgccttgacagatccatgcaaattgtcgcatccgacgggtttacttctcagacagactctactcagaagatgagctgccggcagagttcaaactgtatctcccagttcagaacaa

SEQ ID NO: 10151 - DNA, 2176 bp, Homo sapiens
aaccatttttgtttccaaacctagctcccccgaaattttaagactatttacctagattcggagatggtcttggagagttccaaaaggggtgtgtgtgtgtctgtgtgtgtgtctgtgtgtgtgtctgtgtgtgtgtctgtgtgtgtgtctgtgtgtctaatatttagactaaaccatggtaaatgtacgcacccagtatccttttcagttagcatattctttcttaaactcatctcagtacttttcatttgtttgcttcattatcttaaacaggttaaaagtgcctatgataaggacttaattatttcctaaagaaaagcaaaaaatgtggggaacagggtagtgttatactatcatctcaggtactgcctatgttcaagaacatagacctggtatggtgagaacaaaaggttcctatgccaaatccagatggctatatcatttgttggctacaagtgagcctgactgcaaggtttgcttctgctgagaaatcccatggtgagagtagaactcatgaagtgctgagtcacatttgcacctctggtgtggtggcagttcactctcccctggatgctgtcagctggccttgctttcatcctatccctgtaggcagggtaggtggctgggtaggagaagctattgagtgtatgacgcagaccaagctttcctgggccttctcaccaactagagaagcgctgatgtcgttcattgaggcacttaaacaccagtcactcagccaggcctcctcccagacattctgtaacatgtcagcactcacaaggtttaaagcaaatgtgttcccttgcagagaggaaggtgctctcagactgatagattagaggagacagacaaactcgtaatccttggggacttgaagagagtggctaggggaagggctgttaaaagaaaagggaccaataagaaaatccatctaaaggtagctcttgaggaggaaattaacttcttgaggggataaattagagggtaccaagtttatgttctggaatgtaccctggggagggcgctgcccactggattggtcccagtggactgaaaggtggtgctctcgagtcaggcgcttagtcccagagagagctgggtgccgcggggctcgtggtctgtgcctactcagggaaatgacttaggttctcccaggtgctctgttgataaggatggaagcagaactactttgagacacaagcaacaattggaagagtttttttatatgaactgaaatagatctaagagagcctggttaacagtttcctttaataccagttcagattaaatggttactttaggaacctgtgttactgtgtgagcacccacagaaacaagcaaacttatttcctacaaaaaatgaggggataataaccgatcagagtcacagtcgtttcaatataaacccttccgaaagcaaaagcagggaccacatgagcacacaagaagccaaagtttgtcagtgatcttaataaattaagactgagtaacatcctgcctttagaaaaaaataaccccgaggtggagaccagggcaggggaggtggcggagaagcatcgggccagatcaaccgttaataacatgcttctgagctatgtggatgtataaatgaaaacacccccaactaggtattgtagaggctggaaaaagatgtgatgggattatacaggtgatgcatatttttgttttgagactcaacaatgtgctacaaatgtgatacttaaccctgaactgcatgtattggggattgttttttaaaaagaaaaaaaacaactttgaatcaataaattaacagtttttcacttgctggctcttcttgctgtaaatggtgactaagaggttgggacagaaatcttgacaactagtggaaaacttggataatcttcaaggaccatggagccttctgtttccttctgtttgcagaaaagcaacactgcctgggttgtgatcctttacaagtgactacttcagacacaattggccacctctttgtatcactggatgactgatgtatgatttatgtgctgctgcccttagagggaagaaaaatgccatgttaaatcctgttttcttaaataaaaatgttgacaataaccagccttcccaagtgggagacaaaccattgctatgaggaccttaacttgtatttcctgtctctttgggggagaggggaggg

SEQ ID NO: 10152 - DNA, 1303 bp, Homo sapiens
ttttatatggctggaattccgtgatttccgtctctcctgttgcccccctgaccctggcttgcccatcagtctgtctctctttccgttgaaagggtgggtttgccatgggcttctctcagcactcaccaccctgattgcctgactttcctcctgctttcttgcagaccctgtggtgaaggagcagtcccagccttgtgcagacaatgctgtgctttccagtggtctcacggcagcacgatgaagactggaaagcgacgggtaatgcggcattgatgcttgccaataaaaccaaccaaccaaacacaaaccttgaaggaaaactacagtgtgataaaaagaaattcttatcattccttctaaatgcacagaagagtaaagacctaaaagtctgtcaaaaagcaagaaagaaactccccagtgctagtctccagggagctgtcactgtggcagcatggggatgcacctagttcaggatctgaaggagctctgcctttggaatgcatgggagatagagactcggagttgttgtacatttacctttgtttaacagggcaccactgttgaattaacccattcagtcaacaagctctgaatgtctgacttcctatctattccattgtggtctgggtttcctttggtgaaattcaggctcaagtcttagcgaaatgtcagcagtctatactgacacaccagcctcatttacaaaaaggagatattaaaacagtgacagtattttttttttaagctctttacaaatccacgttttatgtattttttaatgacatgagctctccaggaaatgtacctcatccccgcagttttcctccaagtggattcatttgggagcaaactgcagtcactttcacaagagtcctctttgatgtcaggagggatcacgaaaccttgcaatgccatgaactggtccatggttatcatcaaaagttccatgctaagtgcataacttggagctcactataacctttgttgatttccctaaccataaaatcttgttgctatttttttgttgctttttcttttttttttttttttttttttttggcagccttgtaaggagaacttcaccatttcccagcacatccctatgtgtgcgcctattttaatgcacctctctgaaacagagacctttttgttcacaaccataactaaagctggaaagtcagtcttcaggcaaggcgagggaggaaaacatcccattagaattttttcaggaaagacttatggaaaaaaatatctctctcccacctccttttatccccatgagacacagtttcccactgtaatc

SEQ ID NO: 10153 - DNA, 1234 bp, Homo sapiens
ttgcctgtgaaatgttctttttttccagtctggaattggtttccggggagcagagggtatagatttttttgtaagctcttgccatctgcaaatgctatagcacctcctttttccttatttttcttttttgagaacagcctgtgtcgccactgttttaccacagtagcccatgaagttcttcagagctctgccatccactcagaactcacttctctagagtatactgtggtgttacagtggggttagttttcttgatgttcggtaagaatgtgaagacagacaacttagacttcacaatggtgtaattgtggttaataattgtaattggcaaaatcacagagcattaaataggaaagatctgagttggcttaaatgtttttctcccttggaattccttccatttttttttttcttctcttctgatgattaaaatataaaaccttcatctttagtcttcccatttatttcagatcaggtagtaaaaaagtcatgggattccttagtcacttaagtatcaaataagcttagagaatggcctgcacttaggatgacaagatgcagtgagactaaattaactttctgttttctggaatctgtttcagcaactctaccagatcctgacagactttgatatccggttttatatgtatgaactacttaaagtaagtggtgttcataaaccattaatttttttcaggcctgttcattaaaagataagtttttgagagaacaaagagaacttaagcagaatgtttcttgatacccagaggatttagtgaagtttttaaacttatattgaggcctccatcgaggaatcttcacatagaaactttccagtggaactgggaaaaaagtggccaagtcaaggggtaccagggacattataccttagaacctcccatagctcttgttggtccatatgttttctctttgctgctttattaatacctactgtgaatgtaacaaatcatcccaaacttaatgacttttaaaaaatgattattgtttcttataattgagttagccaggtgattctttaggtctcagttgatttgactggggcaggatggtccaggatgacctcattcacaatctaggaccacagctggggcagcagggatagctgaggtctcatcctccagcctgtgaagttcatgctgcttcccatggtggtcctcctggggttcctagcagcagagagagggaaacctcaatgtataggcacttttcaacc

SEQ ID NO: 10154 - DNA, 1332 bp, Homo sapiens
atccacctgtctttactaaaggtgaaaacttttgcatgtggttcaatagtcagggagaagttagaaaaaaagtaatggaagaataatcatgaatttgtatgcttctatacattaactagctctttctccctttttccagagttctcttggaacggttgattgtaaataggccacatccttggggtcttcttattaccttcattgagctgattaaaaacccagcgtttaagttctggaaccatgaatttgtacactgtgccccagaaatcgaaaagtgagttcaaagtaatttttaattgtctaggaatgagactggagactgaaaaccatctgtctctaggttgggtcagctgaatgagatgcaaggtattgttaggcctactctttaatcagagatttgtaactgtcttcatccttcaggttattccagtcggtcgcacagtgctgcatgggacagaagcaggcccagcaagtaatggaagggacaggtgccagttagacgaaactgcatctctgttgtacgtgtcagtctagaggtctcactgcaccgagttcataaactgactgaagaatcctttcagctcttcctgactttcccagccctttggtttgtgggtatctgccccaactactgttgggatcagcctcctgtcttatgtgggcacgttccaaagtttaaatgcatttttttgactcttggccaaaatttagaagatgctgtgaatatcattttgaacttgtgtaaatacatgaaagagaaaacctttgtctggaacttcttggctttgtgcaagctgtgtccaaggcaagtacataaactggtaccttgtaatgaagaggcagctgatgccatgcacttgtctgagggcatagctccatgtcttctgacattcctggtgtcccaaagaatagcaaaaagccagtttgaatattatgtaacttatttttttaatgtggacaggggaccttgaaaatcactaagttattaaaaatgtggatgtgctagaattggatatgtccaggaacatgggaagggctcactattggaatcccatgagtttccattttgtctctacccaaacgtattccaaagctgactgcatttgtaccatcttatttcttttggggattatacacctcagccgcctgagatgggggtcagctctttatataaagggaaaccagaccaggcctaaagcccacccctaccctcacccccccaatcctctcctgaaacttaaaaacagtgggaatataggaaagggaaccaaatctcattaattaattgttctcccccattaccccactgaatgaatggccatacaggctaag

SEQ ID NO: 10155 - DNA, 2844 bp, Homo sapiens
acatttctctataggatattttggaaagttatatatttacagtctgtatatgccatgcaactacaactttctctccaaatctttaattggcacagtgcatattttgattttataaactttactttagagctgtgccttgagcttcggcttcctgagggaaatcacatttctcttattgatacaaccacctttggagcatctgtgtgtttgttaaataacctcacaaattcaagcaagtgaatcacaataaatgtttggcctttccatgaaggtgtaagaagggtttagaaatactggtgctagaattggtcctctgcaggagtaagcataaggagttctgttttgctcattttaaggtatccaatgaacctgggaatcgctacaacctccagctcatcaatgcactggtgctctatgtcgggactcaggccattgcgcacatccacaacaagggcagcacaccttcaatgagcaccatcactcactcagcacacatggatatcttccagaatttggctgtggacttggacactgagggtgagtgaagcctgccagttttcagagtagagttctctgtgctttttgctacaatctgatcacaaaaatgtaaaaatgcttcaagccacaatagtgaaggaatgttctgtcagtatatttattcacaggtctagctgattattttatctttaattggacattatctgctcagtgcaggaaatacaaaaaagcataaaggaaagaattatccagaatcgtgcagtatcagttttggtgtatgtgactgaagttttttagtgtgaaaataaacttaaagtccctttaaacatagcctcttgttacattgttttgttaggctgccttatataagcatttttattggtgcgtgtttggcaggcatcttgttaaatgttcatgtataaagattaatgaataggactctcctgttctgcaaaaagctcacagtataactcctgttgcaggttgcagcttttctgcttgagctacatttcatttggtcctctatatttatcttataaaatagagaccccagttaggtgctaactagttgtacagtcctgtccagttttgcatacatatattttagggggacactactctttaactttgctattgattcttgagagatgaattgatgttgcatatatgctgcatgcctatatgtgggatggatttaagacagcttaaattcaagatataacaaaattgaataccatcacgtccaagagctcggcaataaaaggacggcagcctttagagaaacgtgtcactgtgacagactcacaaacacgaataatgtcaagcagaggcaaacaaccaaacccaattaagataatacttattccagtgtagtttagactaatcaaaatgtgggctgggtacccttagggtgtcaagacctttttaggagggctgtgaggtcaaaacttttttttttttttttttttgcgatagagtcttgctctcacacccaggctagaaggcagtggcgcaatatcggctcaccataacttccgcctcaggggttcaagcgattctcctgcctcagcctcccgaggagctgggattacaggcacacgccaccatgcccagctaatttttatgtatttttagtagagatggggtttcaccatgttggccacgctggtcttgaacccctgacctcaagtgatccacttgcctcagcctcccaaagtgctgggattacaggcgtgagccaccgtgcccggcccaaaactgttttcatcataaaacaacatttacatttttgggtctattctgtcatgagtgtacagttgaatttctcagaggttacatgaaatatactgtaacaagttgaacacagaagcagaaatgagaatccagctgtcttttattaagcaagacttagagatctgcaaaatgtagaaagacttagtgatgagtgtcaccagaaaatagttcatgtttcttacattagcacatagtgggtctgtttttaaaaatgaatatttttaaaatctaatttctaatgtggaaaattctgaaataaaacgcacagaaatgagaactctttggggtcccaagaaccactgctttaaaccaaagattaatttgaaagcctctgtcagaaacccaaaccctagccagttagaactgtcttcccatgttggcctttcagactaagtcctaagtcaaggtttcttaatttctaggtcgctatctctttttgaatgcaattgcaaatcagctccggtacccaaatagccacactcactacttcagttgcaccatgctgtacctttttgcagaggccaatacggaagccatccaagaacagatcacaaggtaagcgagcagcttattttttaaatgcttcaaaaggatctcctccctttcatcttttttttttcctctttatgctttcagtgttcagtgaaaatccgtttggttggttttttttttgtttttttgagacggagtgttgctctgtcactcagtctgcagtacagtggcgccatcttggctcactgcaacctccgcctcccaggttcaagcgattctcgtgccttagcctctcaagtagctgggattacaggcgcctgccaccacgcccagctaatttttgtattttagtagagacggggtttcaccatgttggccaggctgatcttgaactcctgacctcaagtgatccacccgcctcagcctcccaaagtgctgggattacaggcgtgagccactgcacccggccttcagtgaaaatcttttacatgtccaataatgtgttaaatgtgggatacaattgtgagcaaaatggatggttcctgccctcttaatactcat

SEQ ID NO: 10156 - DNA, 2720 bp, Homo sapiens
ctttttttttttttgatggagttttgctcttgttgtccaggctggagtgcagtgccacgacctcggctcactgcaacctctgcctcccaggttgaagcaattctcgtgcctcagcctccagagtagctgggattataggtgcccgccacctcgcctggctaattttttgtattcttagttgagacaggatttcaatatgttggccaggctggtctcgaactcctgacttcaagtgatccactggccttggcctcccagagtgctgggattacaggcgtcagccaccgtgcctggcctttaatgccgatcttttgtaaaagtacttaacattagtattctctacttatattagcatgaagaagataagtcagtgtagctgcttgggcgacttgtagtggctgaaaaacagctgagtataattatgactcatgtacatttctttctttcaggggtggcctatgtatgcacagctactgattgatttattcaaatatttagcgcctttccttagaaatgtggaactcaccaaacctatgcaaatcctctacaaggtaattaacttggatttattataaattaaaataactgagatcttaagaaaatacactttaggaatctgaggccttattttgtttttattaagcctttgaggcatgatatacattcagaaaagtgtaaaaatcaagtgtacttgcataactagcacccaaattgtacagtgtttgtatatgttcaactgtagaagatactacagttttacaaagcgtttgtaccagtttatacttgtaaacagcttggaggagttactggttttcccccatcttcatcttgccatacctggtattatctgtttttcattttaaccattttggcagttgtactgtgagatctcattgtggatggaattttgtttgttggtgatttatctttttttttttttttttttttttttttttgagacagagtctcactctgaaacccaggctggagtgcagtggcgcgatctcagcttactgcaacctccacctcccaggttcaagtgattcttgtgcctcagtctccctagtagcagagactacaggcatgtgccaccatgcctggctaattttttgtatttttagtatacatgggggatctcattacattggctacgctcgtctcaaactcctgaccttaagtgatcagtctgcctcagcctcctgaagtgctgagattacaggcgtgagccactgcacccaccctccttgatgacttcttaatgaggttttcatgtgtagatcagccatggatatcacctttttgtgatgctcctcttccagtcttttggctcttgtttgtatttttatttattaaataattctttatatgttttaaatacaagccctttgttgttactatatattcaaacatctcccactctcacagcttgcccttttactcccttaaaggaagggggaggtgtcttttgaggatcagaagctttaaaatttattgtagtcaaaattgcagatttttaaacttatattaaaagttgctttttgtgacttgtgtaggaaatctttgcgtgtctcagtgtgctaaggtgttctatttccactgatctgaattgtcagatttatgagcataaagtcgtttaatgttctgaaactattttttatgactgtaggatctgtaatgtcattcctgacattaataatttttgtgttttctctgtcagccttggttagggtttatcaatttattttttctaataactaacttgggccctgattttctcccttttcagtactttaaaaaatttattatatgcttttactctactttctttggttttcattagttcttttttttttttagcttctgaagatagacgcttacatcattgtatttttattttttgtccagtctcctcttctagcatattcatttcagcctgtaaactcttgatgcctagtttttcatgatacctaaatggaaatatttgataaatcatctgtgataatgttaattaaagcctaaaactttttaagaaatgttactaaagtatacttcattcttttgaggggggtggggggcttaagttacaataggaaaatgttactccattttccttagtgtggaaatatttttcttgttttttaaaaatagggcactttaagagtgctgctggttcttttgcatgatttcccagagttcctttgtgattaccattatgggttctgtgatgtgatcccacctaattgtatccagttaagaaatttgatcctgagtgcctttccaagaaacatgaggctccccgacccattcactcctaatctaaaggtaaggttccaactagttaaaggaaaacttatgtcttaatatttcagtcctttctctgataagtagactgttcagcactttcctacccaacataacacgcacactattagttaagggtactctttaaaggaaataatgttattaagcctgatagaaggtatgatattgttgctattgctgttgctggtgaatattggttcacagcatttttctagttgctagttttcatattaattttgatattaaatttagctctatttacagaaccacagcttaggtgttggggcagtcatttgctgggtgtgccccacatggcaaagaattgcagaacaaacagacctttgtaatctttttctttttttgaggcagagtcttactctgtgacccaggctggagtg

SEQ ID NO: 10157 - DNA, 1153 bp, Homo sapiens
gtaaaaatggactgtgattttggatttgggaaattagagatgtgttcttcaagcccctcactgttcagtgggcaagtcaagtggaatgggatctctgcagcctaacagctttcctggcccctgcctactaaatgccaagataggagtaaatcattcccacatgtcaacttcatgtcagaccagacaaattagattgttatattgtgttaacatggtgaaatgtgaggggccttgctgatttctagagctgaagaagaaccattgggcatttgtggagaatattcaggtgtggtccaaggatgttgaaatgcaaagaaacacacaaaacactgaaggcggagtcagaccaatttatgaccctatcggctgccagcatgtaattttgtattcaaattgtatatatgctttcctttaatgttgggtttaagaatgcaaagtttaaaaagcatgacatcgaagtggtgagtggattatctgaatgatttacaagctctgatttgtgttttacgtaggtccttggtatagtagtgggagttctccttcaggatcatgatgttcgtcagagtgaatttcagcaacttccctaccatcgaatttttatcatgcttctcttggaactcaatgcacctgagcatgtgttggaaaccattaatttccagacacttacagctttctggtgagtattgtgtttgcgattttgtgttaaggtttgctggattaatgtagtaaaattttgggagtagaactcttgagcattttgagcctacattcatgtgctgttcactgtatttaagttggactgtgcttctgactaaggtttttcttctttcagcaatacattccacatcttgaggcctaccaaagctcctggctttgtatatgcctggcttgaactgatttcccatcggatatttattgcaagaatgctggcacatacgccacagcagaaggtgtggctgcagtttatctcctgtagatgaagactataactacctgggcttatttattagcattgcctatagatttctattagtcatttagtagtaattgtacttcttccaaacttagttgggaatgctatttagtgttcactcaagtcaattacttgactgcctctgcctgaaagccattcctcagtgattaggtgttgctg

SEQ ID NO: 10158 - DNA, 1323 bp, Homo sapiens
acaaggtcagtagccatcttcgaaaagtagtgagtattggactgcgactgccttttgacatagatagtactgtttatgtccaggggtttcccttttttctagtaggtaggtcggacacttagacttcctacttctgagaggtgagaattgttaagtagttgttttccatctggtctctaccttctccccatgttggatatagaaaaccagtaccttgttttggggaataaattgtaggtcattgttttaaaaggttacagtgatttctcagaagtggtattcgtgtataagtattttaatgtcttaaatggaatactctgtatcctaggatttgaaaggaaagcttgggctatctgttctatttcattactggctgtttttaaatttggacactgatttggagttgaatctcaaggcattcttagtttggagcaaatttccattgagtaaaatgggcccttttacagtatggttaagcctatatgagtaaagatattgaactttttctaggtgcctaattgaatgtcgagatgaatataaatataatgtggaggctgtggagctgctaattcgcaatcatttggttaatatgcagcagtatgatcttcacctagcgcaggtatggaaggaatttacttgcacggacaaaaggactcagggaagtacgtttgctcttaagtgttttccctctcacattatgttttctgtgttgccagtcaatggagaatggcttaaactacatggctgtggcatttgctatgcagttagtaaaaatcctgctggtggatgaaaggagtgttgctcatgttactgaggcagatctgttccacaccattgaaaccctcatgaggattaatgctcattccagaggcaatgctccagaagggtgaggatgaaatgctttgagatccctgtgcatttagtagtcttctaatatctttaggaatgaatatgcagacttactaacattacttgttataactgctttaccaaccacatatgggtgggtagctttggtaagggctaatattgtcacttgaagtatgaaagcctaattgactgccaagtcttcttggcacagagcagtacatacggtaccagacttagtgtcagagtcctatgtttaagccctggtcatgccacttaaaagctttctgattttaggcaaattgacttatcctccttaaacctattctttatagaaaatggaaataatttctcaaagaactattggaaatcaagagaagtaacgtaaagaaagcatggtacatagtaggcaaacagtgaatatttgtcgactctgaacatcagtttcatttaaat

SEQ ID NO: 10159 - DNA, 1155 bp, Homo sapiens
tgaattaattttaatagtttttgtaagaagtcttttttctataaactttattctttttacattttcccaagctagtggagaagttgctttcttttaagagcacttgagccacaaattttaaataagccagcagtgtgtctttaagtagttaatgcatattgtaatgaacagtttgtccattaaacttggatttaaaaaaaagacatatctattattgtgtatcacagggtatactgaatacatttccctgtatggagctcagtttctgttacccgaattttccattggttaactttaagtagaaactggtagtttttggttaatcttgatttacaaaatcatgaatgtgattgccagtaggaattggattgtcttatttaaacaaggtgttgactttgtcctccccaaccccccagattcccttgtttcaggcccatccacagttgaagcagtgtgtgcgtcaggcaattgaacgggctgtccaggagctggtccatcctgtggtggatcgatcaattaagattgccatgactacttgtgagcaaatagtcaggaaggattttgccctggattcggaggaatctcgaatgcgaatagcagctcatcacatgatgcgtaacttgacagctggaatggctatgattacatgcagggaacctttgctcatgagcatatctaccaacttaaaaaacagttttgcctcagcccttcgtgtaagttggctatttccttggtataggtacaaaacgtattactgcttgtctgtaataatttttttctttgtctatatatggcactgggcgttaccacttattcttaataatcaccatatttgtttgatgtcttccatcattttagattgtaattctgtgaggcaaagcatcatgtctgtgtgtttttttttttttctgttatattctcaacacgatgtttgacagatagtagatacccaaatatttgttggtttaaataaattaagatttaaaaaggaaatgtgatatctgacaatctcatttctgttaaccaggaaggatgaaagctgtttgagaaggccgatacaaaatgacttaaagtgatgttgcatgtgcacacacttttcaaataattcacttactagttttgagtctcagatatcatggttaataattcaggtat

SEQ ID NO: 10160 - DNA, 1142 bp, Homo sapiens
aatggttggctttggtttttggttttttgttttgttttgtttttgaaatgtgatataggtgagaaggctaggggttttgttatggctacagaggtataagtgtttaactatgtttaactgtttttggttattttttaatccttgttttttgttttttatttgtttgactcccccctacccccttatgttgtattgaattgttttaaataatccaaattaaagggcacattttgggccagcttaacataatagcttttctttaggtttttaggccaccaaacccttggacaatggcaattatgaatgtattagctgagctacatcaggagcatgacttaaaggtaatttactgcttccttgtcctctggaacattctttgccttcacattattaaaacttacagtgaaggcagggtatttcgggggaagtactataataactgaaagtagagtatattatgagtaaaactaaagttttcttttaaaaattctaatccaactctggaactgtgcagttaaacttgaagtttgaaatcgaggttctctgcaagaaccttgcattagacatcaatgagctaaaacctggaaacctcctaaaggataaagatcgcctgaagaatttagatgagcaactctctgctccaaagaaagatgtcaagcagccagaagaactccctcccatcacaaccacaagtaagtgtgctaattagtcaaggaaggcttctgttagctaggatactatcttaaatggtacttgtccatgtatatcgcaaactataatttcccacataatgtagtggtgaaactttgtatacgttttggtgagccttctaattatcaagcagaagtaatgactaggccttgtgttaccatcttagattccatcctgacagttcatgcatattattaactaaatgtgatttaatcagttgcctctcataccccagctaggccaggttatctcctttgttgtgtgaagtcccagaaataactgcatactatgatggcctgttaacccctcaaatctgggtatggccagacctgctagatctgccaagggaatgggactgttttatctacatgaagaagatgggagaagggtatgggagtgttgaatgattgggagttgtggttagaataaat

SEQ ID NO: 10161 - DNA, 1250 bp, Homo sapiens
cagttctcttacttcagcctcccgagtagctgggattatagttgtaccgccatgcccagctaatttttatatttttagtagagacggggtttaatcatattggccaggctggtcccgaactcctgaccttaggtgatccaccctcctcggcctcccagagttctgggattacaggcctgagccactgtgcccggccagtcctcttttttaaaaaacagaaaaatatagtcttgtagaaaaccattgtatgtatttgtattgctgctgggcatttgtgttgttaatcacttaaactattataaacaatgctgtcctgaatgttttcgtttgtatcttgtagtattcaagtgcaagatatctttagactctaaatctgtttgtggaatagctgttgtctaggagtctgtgcagtttaaggtcaaattctactgagctgaggcttattcaacaaaattcaagtattttaatttctaaaccatcatttatttcttaggaggaaaaacttctagaaccagcatacagctgtggtcattctttgctcaataacttgggtcattggcttaggaaccagcactatatttaaacctgtggatgggaatattccccattcttggttacgctgtagtgcaaaagaattcctggctctctgttgcacagctgacttgtgccattctgctgttgctgtatagagttaaggaacatggctctatttcgtttttattatctgatagcaagggtggttgggatacataaaagtttccacatactctgtagcaaagtttcaagaccatgttttttaaacagaagtttaaatatagccctaagtcaagaggtaccacagagtagatgggtatatacatgtgtgcatacctgcagccaaaacactctcctatgttagttctgcccccccttagaaaaacagtaaccggagaatcagttaaatggtttgggttttttagaaatttgaaaagaagtatataaacagtattatactatatctcagaaagttatcttggttggctgcagagatttgttaatgacctgggtatactgaagattgcaataggaggctaatttgattatattcctttgtatgcttgctgcctttaaggacttaagcatggctatcatcctcatttaaattaatttagcacttcaaaatagctttgtagttaggtctctgctttaaacctagctaaggttttcagagttgaaaatacttttctaggggaggatagctggcacataac

SEQ ID NO: 10162 - DNA, 1068 bp, Homo sapiens
gttccagcaaaagctcctcttgctggtcaagttagcactatggtaaccacctcaacaactaccactgttgctaaaacggttacggtcaccaggccaactggagtcagctttaagaaagatgtgccagtaagtagatctatcttttttctcttccaggatttatgattatattgtaataatcagtggtgaacatgtattagaattttatcataacacatgcctactaaaaaagatataaaagactgacatgtcttcctttgtatctcccatccttatatttcccagaggcaaacatattaatagttcactattcttgcctacatttctaatacacagtcataccatgtgtattttttaacactaaatctgtatacattattggatttttttcagggaagcatttcaacttatttgccttatgtactttattttttttttttagccttctattaatactacaaatatagatacgttgcttgtggccacagatcaaactgagagaattgtggagcccccagaaaatatccaggagaaaattgcttttattttcaataatctctcacagtcaaatatgacacaaaaggtgagcatgctgtcatagtttataaatgccttcttttttccttaatggactaaaggatgtatagttggcccttttacatactcactttaaaggtagaggtaataaactcaaagggaatatgtatatttaactagtgggtttggtagacattaaatagtaccagtttttaaggttttgttttgcagcaagttataagctttttgaaataagcttaatgttctcatggtgatagaaagtttcatttgtactagtcattagtcatacctcattttctcccagagactattcagagtatttattacaacctaataactgaggcaaactttgtgaaaagcataaagaatgcatgctacttgcccctcagattacatggtaagacagtatagttgacccttgagcaacatgggcgttagggttgccaatcctgtatgtagccaaatcctgttataactttttactcccccagaacttaactgttaacagcc

SEQ ID NO: 10163 - DNA, 1092 bp, Homo sapiens
ccttgaagttagagctataatagtctctggctggctgtgttttatggggaagtggaggaagggcttaaatgcccactgattccttttttgtttccaacagcggacttgtctcaggtgtggccagaggcaaaccagcactttagtaaagagatagatgatgaagcaaacagctatttccagcgaatatataatcatccaccacatccaaccatgtctgttgatgaggtgagtgtctaggatgatctacttatttattgtttaggccagtcttaaataaatgtccttttcaatgtttttagaaatccagctcaaagtgccctgatatagcggtttgtgttttgaaaccttaatatttgtctcaagctcttttggtaaatgttctacttaatagtcttttgttaagcatatttgagaaaggctcttagtaattgtttcctttatgtgtgcgttgtttttgtcttgcttttccaggtattagaaatgctgcagagatttaaagactctactataaagagggaacgagaagtatttaactgtatgctaaggaacttgtttgaagaatatcgtttttttccccagtatcctgataaagagttacatataacagcctgcctatttggtggtataattgagaaaggactggtcacttacatggcactaggtctggctctacgatatgttcttgaagccttacgcaagccttttggatccaaaatgtattatttcgggattgctgcactagatagatttaaaaacaggtaagtggataggtttcctgtgaaggatctcttccctgaccccgcagacagggtcttaactctcatccaggctggagtgcagtggcgcaatctcggctcactgcagccttgaccttgcgggctcaagtgattctcccacttcagcctcctgagtagctgggaccacaggtgcataccaccattcccagccttttgtaatttttgtacagacagggtttcaccatggtctcaaactcccaccttggcctctgaaagtgctgggattattggtgtgagccactgtgcctggcctgaagcttttttttttttttttttgagatggagtcttgctctg

SEQ ID NO: 10164 - DNA, 1159 bp, Homo sapiens
gttttatttgaacttgtttgtggaaagcgaaaaacagaatatgggacagagatagttacttaattgctccatttgcattatctaatgtgctttgtcctttaggccttgtcaatgctgctaaatggtactccatttgcctttgttattgaccttgctgcacttgcttcacgtcgtgaatacctcaaacttgataagtggctcacagataaaattcgagagcatggggtaagcaggatttgttcatttatttttgctcttaaattttggtggctaaaatggctatcaagtacaacttttaaaatttgtgcagcagtaataaactaaagaaaaatttgaaagaaacaacttttttaaatggcaatgaagatgttacttattttggattttagttatagtgcttagtagttatctttaatccaaaaacatttaagatcaattttaaatacactgagagacttttctattcttcaggagccttttatccaggcgtgtatgacttttttaaagagacggtgtccttctattttgggcggacttgccccagaaaaagaccagcccaaaagtgctcaacttcctccagaaactttggcgacaatgttggcctgtctgcaagcttgtgcagggtaagaagtacatacatgaatatgactttttttgaattggattatatgaataattgtagacttgcggaagaagaggttcagtgaaagtgacagcagtttaaaatggtccaatggttttaagtccaaagtcctatactatttatgatacatactagatccatttgagttaaggttttgtatctggtgtgaggtagaggtccaaattcatcttttgcatgtgaatatccagttgttccagcagcatttgttgagaccactactttgccttttgaattattctcaaaaaaagcaattgcccatagtgcatgggttagtttgtggtctctctcttttaagtggcaaggtcttgctgtcgactaggctggagtacagtggtgcaatcatagcttactgcaacctcaaactcctgtattaagtgatcctcccacctcaacctcccaagtacctgggaccacaggcacgtgccacccactctcagctggttaaattttcttcttcttcttcttcttttttttctttttgtagagatgaggttt

SEQ ID NO: 10165 - DNA, 1143 bp, Homo sapiens
tctttccatttttataaagcttaaataccattatcacattaacaaataacagttccttaatataggtagttatttacatttaagttccccaattggctcaaaaatgtcttttaaaaatttctatgattgagaatccagacgcagtccatagtttcttttattctgtaaatctgtctttgttctgtcttttaaatttattttttgccattgatttgatagagaaatacagcatttgttctctagtctaccccatgttattttcttacctgttttctcatggtgtttacttcattctctatccccatggttttcatgggctgaggatagagttagatcttcaggctcagttaaagtcaaccagtttcaacctcttggggcaaaaataattcttaaagagagtgctgtggacttcaaacttctaatattaaaacatgacaccaacttggttttgtgcttacaagctggtatcacttattttgaaaattaatctgtatacttggattttcattgataaagcatgtttcttcctttctcgttaggaagagcttggatttgattgaatctctgctgaggcttgcagaggttgggcagtatgagcaagtcaaacagctcttcagcttccctatcaaacactgtccagacatgctggtattggccttactacaaattaacacctcttggcataccttgcgccatgaacttatctccactctgatgccaattttccttggaaaccatcctaactcagctattattttgcactatgcatggcatgggcaggtaagatgtgaccgtgtgcttaccattttttcatctgaataattgatcttctttggagtgttgaggaagctcaaccagagaaatttttttttacatctctgaattattatgactttaaaagtcatactgtcataaaacttgttttatcttttagaatcatgtgagcaataaaatacaagatcccaaaagcaaggaggcaaaataatatttaataattttattttctttccttttttttttttttttgagatggtgtcttgctctgtcgcccaggctggagtgcaatggtgcagtctttctcactgcaacctccatctcctgggttcaagtgattctcctgcctcagcctcctgtggagctggg

SEQ ID NO: 10166 - DNA, 1104 bp, Homo sapiens
tcttaatgtttatagagtttaattttaatgtacattaacattctcactaatgggaaactttccacttgccagtgaaataaatagactgatattctaattgtttgtttttgatgctttctttgtatgggaagtgatagccctattgtgcaaatttaaagtaatatttagggtacgaattggtcagtagatggaatgccagtgtcaaatgttaaaggtacactgatgagcattttttgtgatataaaagtattcaaattttggaattgatgttaaagtcgtaacttcggctagtaggctggaaaaatgaaataagcttggctttgaatatgaacttgtgagagaattgggtttgaggggattttggatagagcaaaagaggattgtttgtttttaattagtatagcagttgtaacctttttcctctctcagattttccccaagaacgctgtcccgtggtgctcgcaccacttttataccctgaaaaacgggacattctaatggacaggatcctgcctgattccggaggggtagctaaaaccatgatggagagctctttggctgatttcatgcaagaagtaggctatggcttttgtgcaaggttggtagtaaaatgtgttaagcttctgattattcttgtgccaaacatgatgtaattctttaaaaaaagtctctaaaattccttaaagttaatcatcttttcttctcaagaggcatgcttctaaattttaatcttccacgaactagtgtgtgtgacagctgtaaacatcctgggtgttaaatgtttatctccttcccctcaccagtttctcaaaattaggagccagaggtttccaggctagttgccacaataggcatattttggcttttggaaggaagagagagcattgaagcaagttagtgtttatggaacttgtatcgctttacacttaatgtgactaattttctcctctctgacccccacccctctaatttcttcattctgccttcttctgtggcttccttccttttctgcctcttgcgtatttttctcacttgcttagggcaccaaaggatattgtttcacactgttagtagcacttaagactgtgatacactggattatta

SEQ ID NO: 10167 - DNA, 1209 bp, Homo sapiens
cctgcctcagcctcctgggtagctgggattacaggcgtgcaccaccatgcctggctaatttttgtattttcagtagagacgggtttcaccatgttggccgggctggtctcgaactcctgcccttgtgatctgcctgcctcggcctcgcaaagtgctggggttacaggtgtgagccgtcacacccagccatgtattttctttttatacttgccctgcctaattgagaaacctggcatttcttatcaacagtggttgagctaccttactatctttttagagtcattagtaacattttaggtactaacacagagacgatggtagtttaaccctattctcttctaattattaatttgcaactagttgtgatcaattagttgtaaacaccactgcgcctggaccagcctcctttttccttttaatttaaaaatctggatttgtgtgtgtgtgtttttttaaacaggtgccatgtttcagaacagagtaagacccctggtaaagaagaactgaagatattatacagataccagatatagcctaattacaaagaaagcattaacctgcctctgaggtgactaaaggggaataatggtgattttgcgccgggctcggccgcctgcttccgccccaaccagcaatgaatcttgactcgctctcgctggccttgtctcaaatcagctacctggtggacaatttaaccaagaaaaattaccgagccagccagcaggaaatacagcatgtaagtaaactagccagaaaacaagtgccattaaaggaatgagtagacagtggaaagaaaaccacacatttatgtgggcatgttgcatgaaaggtaactaacttttgccccttaattcaagtgatttctgtcatcatcatctgtaaaagagctcttagcccaatcttttttttttttttttttttgagacagagtcttactctgtcgtccaggctggagtgcagtggcatgatctcggctcactgcatcctctgcctcctggtttcaagcagttctcctgcctcagcctcccgagtagctgggattacaggcatgtgccaccatgcccggctgtatttttagtagagacggggtttcaccatgttggtcagtctggtctaaaactcccaacctcaagtgatccgccttggcctcgaaaagttctgggattacaggcgtgagccaccacgcccagcccaatcttttttttaaaa

SEQ ID NO: 10168 - DNA, 1091 bp, Homo sapiens
gtaatcccagctacttgggaggctgaggcagcagagccgcttaaacccaggaggcagagactgcaatgagctgagatcgtgccattgcactccagcttgggcaacaagagtgaaacttcatctcaaaaaaacagaaacaaacaaaaaggcagctgggttgtcactgatgggcagcatttgagcctgccacactggcctggaagtttcccttccagtctggattttgtctgctccttccttccccctcaccccgttacctcttcacctcccatctcacttcactgtgtagctcagtctctcccacgcacataattggggacagtgggggctctcttaccagcctcctcagcaacgcacgtccatcaggcctggcctcagtggccagccacattgatgtcacactggaattgttaccccagagagggcgaagagataggctatctccccacctcccaccctactccccactatattcccgttttgaccacctcagcccctcagctgccccctctcactttggccaatcccaggcaccaatcagacttcctcctccacctggagcccctagcatttccttgtcccctcttccccaaaacctctgtaaagggtacgagagggaccccctgccgagccgcccgccactcagggcagtccgatctaagaagcagaagctggttggaggctggctgggcctctgtccagtccccagatggataaactgccttttctcacatcccctcttggtgcctgatcttctctgcccccggggccagacccactgtgctgttttctgtcagtctgtggcacagcaccaagctctgccagcaccagtccctgacagggctaggaggacagcctggtcagcagggctgcagtcccccagtgccgtgtttcgggggtcaagggatgtaagtggagtcattgcacagagacagaccagtcaggagaaggagctggaatctggcctcttgtcctaacctcaggagccccctcccatcctctccccaccctccctatcggggtacttcactgtttcttttctacttgtgtatactcgagaaagggaagatggttaataaaagggatttgtg

SEQ ID NO: 10169 - DNA, 1707 bp, Homo sapiens
tttttttttttctttttttgagatggagtctcactgtgtcgcccaggctggagtgcattggcgcaatctcggctcactgcagcctctgcctcccaggttccaggttccaggttccagctattctcctgccttagcctcctgaatagctgggattacaagtgtgagccaccgccccagccttaaagtagctttttattcttattttattccaagctaacagcaaattctgggaacaggttttaagcgaggaaatagagcgttggtaagttggctactgtgccatgtcaggccggggagaatcccctgtaccgggaagaggtacccaagttctttcctctctgcaggtggagcggctgatcaaggagttctccatctacatgacaaaagatggccgcatctctgtggcaggggtcacctccagcaacgtgggctaccttgcccatgccattcaccaggtcaccaagtaatgtccctggtgcgaggaaacagagacaacctttctgtcttcagcctctgctattgagagcttcacacagacaatgagagagggtggatggtggtgagtggatcatttctttcagccacagtgtgtaacactcagcatttgaatgtttctcagaaaagaacatgtagtgacacagggcagaggcatccatggctggcgtctggaatattaaaccaaactctccccggtccttttttctccaacttttctcaaagagtttacatgtgcaagaaagtcatcgcaccaaaaaacctgtcaattatgccattgcaatatttcagaagctttaactgaagtgtcaggttcctcgtgagaaacagcacacgttagaggctttgagagaaggcctagttctgtcatgagtagtcggcctcgtgtctgtcctcccatcttggaacaaccttatcaacaggccgcactgcagaaatgatgttttatgaaaaccaatgaggctgctgccactccagcaagggaaataatgcagtttcctgtcttatttaagaaaaagagaaggctctcttttctcccttgtcattgccgttcttttccttacacgcaaagattttttaactattgcagattttcatcccattctactgcttgattgaccatcaactccatcctatcgagatttatttaagaatgaagaacataattttctgctgatgctgtaccctcacccttttcagcaaagaatagtggagagtaggaaactgtactttatctcggcatcctcttgaatgatagtgcaagtttctccagttgggatgttgtctctgcccggttggacctcctccctttgttgaatgtggtgtgcagcctctcatctcacactgtgagtccagcggcgcagggtggtaccaggaaagaggatattctaggctttgcgtgctgctagctgggttcaggcttcacccactggaaagaaccaccatctgctctaaccatgtagacttattgcggcctggtttctctgttacaataaaattactgtagacccaactactgtctactaagttatcttttttctttaatgggaggaaggggtaggagtgggtaaataaataaaggggtaggagtttggaatcgtgtagctgatcataagccagtagatgtatccactattccaaatattggctgaagattcgtcgttttcttcatgttgccattcagtttgtccagtccgaagatgctgagaatgt

SEQ ID NO: 10170 - DNA, 1219 bp, Homo sapiens
aaagtatagaaacattctcttcccaccatgtactataatatgacaccattttgttttaaggtgttcaataattgagtatagtatcttgtttacagaattcatctttcaaaaattttcagggagtctttaacgtaatctgggaacttttgtgcctagatgcatacaagacaagagacaatgagagggagtaaggtaatgaggtttactcagcttcacccttttgtgtgattacagtctttgtagaaattatgacattaatggcagtagtagaacagtggtgatgcctgatgctgatggtacaagtaatagtagtaggtcatatgagctactattaactccattctcagcgtgtgttaagatcttaacatctattaccttatttaatgcccatgtaatactttgtgctgggcactatttttataccaattaaaagaatctaaattgattccaaaagaaacttatttatctaatttaggcagtttgaccaagcttttcatataataaagagttctatagattgagaagctatctgcagtggagccgccaccaaaatgcagattttcgtgaaaacccttacggggaagaccatcaccctcgaggttgaaccctcggatacgatagaaaatgtaaaggccaagatccagggtaaggaaggaattcctcctgatcagcagagactgatctttgctggcaagcagctggaagatggacgtactttgtctgactacaatattcaaaaggagtctactcttcatcttgtgttgagacttctggtggtgctaagaaaaggaagaagaagtcttacaccactcccaagaagaataagcacaagagaaagaaggttaagctggctgtcctgaaatactataaggtggatgagaatggcaaaattagtcgccttcgtcgagagtgcccttctgatgaatgtggtgctggggtgtttatggcaagccactttgacagacattattgtggcaaatgttgtctgacttactgcttcaacaaaccagaagacaagtaactgtatgagttaataaaagacatgaactaaaaaaaaaaaaaaaaaagaagaagaagctatcaacctcataatttatatgaaaatcataggtttcctaattgtttttaattaatatttttgttattttgatatatagaagtgtttttttattttatttttcttatatatttatttatttattttttgagatggagtttc

SEQ ID NO: 10171 - DNA, 1207 bp, Homo sapiens
acatttaccccctcaccctcacacacaatcatgcacttacacacccacaaccacacacccactctcagaaccctcacccttttaccctactttattttcctttttcattgcagtgacatcagagtgtgtttacatttgtttttattttttctctttagtcggcctcattaagagaggaatcttgactgttttgtttagtagtaaacaaaacaagcaaacaaaacagtgtcctggcactaggacagtacctccatgtacagtattaggctcccaataaacattaaataaatatataggagggtcacactgcaggaaagccttctggagaaggtaacgcatgaccaacttgtgaagcaggcaagttgcgaaggaggtgaaataaggggagtgtcgaatatagagttagacagggagggatgttaaagtttgcatttttaaagtaactatggagctgttgaaggaaggcttttaaacagagaattttttttttctgggctcttcgcaataccataagtgagccttggagttaactcatggaccatcctgaagacatgaaaagaagcttcagctattttgctaaatgaagacatgcatggttctccatcattacctgatgggaaatgtaacagagcattgtttttctcccttacatgtggcaggtgaccccagcatttcacctggacccagatattgttttatcacccttcgtagaacacattcttttgacaagcaggccatgtgggatcctcctccccacatccactcacttctttcatgttttcagtcaatagaaagttcaatttcaaatcctttgagaaatttattgggattcaatgaaatctatagtcttacagctgccaaataaaagagaaaataaaaatagatgtcttcttcttctaggcgtataccagatgtctgtgtcagaagcagccgtccctggggaggaagtaggaagagtgaaagctaaagatccagacattggagaaaatggcttagtcacatacaatattgttgatggagatggtatggaatcgtttgaaatcacaacggactatgaaacacaggagggggtgataaagctgaaaaaggtgagttagggtaaggaatcagacgtgtcagtggtatggcctgctctgccaaggcaacactgcaagaaacagggaggcgacggttaagaaatgagaatttgcgaaaccaggggctgacc

SEQ ID NO: 10172 - DNA, 1111 bp, Homo sapiens
cacaagtctgtctatgtatgtacagatgtgtatgaatggacagtatgactgtggtgctgctggtgctgctaatgcatgggggggttcatcatgaaagtgtctttttcagttagagcctgtgagcttactatcagagaaatggaacattttgcaaatgagataacaaggaaggctactaaatgtggccccaggaaggcactgtggttactcaaaggaattcaaaagcaagaatctacacaagactcttttgcctggccgggcacaagttcagcatcctcaataagcctgaggctcatataacattcaaagagctgcatgctccattatccacactgtacgattgtctggtgagctggaaaagaaaggtcaagcagaattattagcaggcagcctttactgcccttggtcatagacaatcatatagtaaagttacattgctactgtactggttttactggtttcactgccgtgaacttgaatgagatttggacaaaatccacataggacatttttttttaaaccttcacattaattggtaattatctacaagggactcccacttcccactcatcctttaatatagagggcatggtgagattaaatagattatgaatccaaaagaaagttgcaaagcaaaatactattgataaatatagacaaagtattagaactgatgaaatctctgtaaggggaaattaaaacataatgagctgaagtaacttgcccaagaccactttgcttggaaatgatagaggaaagattttcaaccctggcttccctatattgtgtgttgcacagagtattaaatgtgaaaagcaaataagataatgttgaatcttagctacttagtgcaaaccttccagtgatttccccaagtttaaacaaaacctgaagtcttttccattccccacaatggtctattttacgcaatttggcctccacttccttacagcccttctctctcaccagaaggctgtagtcactctcctcctcttgctcctctgcaagtattcaggatcttctcaccttagggtttttgccatttgctaatcacctggctggtagtttttatcctgcagatatgcacgtcattgtcttcctcagtcatttt

SEQ ID NO: 10173 - DNA, 1179 bp, Homo sapiens
gtccaatgtgggtgcgtacggtgtgggaggcctgctctgcttccaggcctggtgtctctgtggtgggtgggctgaagcccgttctcccaaatcaggaagtagagcttcttctttatcttttatggcaaaataacaaaaggaacaaaaattcttttgttcctctgtaaaatgggaataacaatttctagtcttgtaggaatagagataatatacatccagtcgctagtgcgtattgatgtctaataggtaatgacactggtaatatctgttgcctgtagacattgtgctaattaatgacttacatgcactattttatttagcttttgcaatgattaatctttacaatgaggtaattccaactcaccgtatttcacagataggaaacccatgccagaaacaagctaactaatttctgtagggacatttgagctattaaatggatctaaaatgcacatttaaccacagcactatgtcactatgttcagaagtacgtatatcttttcaacatgcttgaagacacattaagttgctaaaggataattttttaaaggatttattcaaagaattagccaccttctggcaatagccttctttataacatgcacataatgaaacatttgcataatgtttcttttgagaaacattcctcatattaagaaaggtttgtctttcaaacagtgagtagaactgttctaatcagggagtgagtctgcttaaaagagttttagagctcaaatgaattcaggaacattttacagatgagaaaatccagcaagtataggaatcaacctacttaagaaagataggtttgactctagaacgctaagatccttccactgtgcatacagagctttttatgccagaaaatggtatattccttctccaccaggaaaagtcaagtacttatcaaaagccagcctgaaccatttcccacctttgtctcttccattttccctgcccagtccttcagcctcttggtgtttagcctgtgtattataatgagaaacaacaaatatcaaataaatccatacagaggaaacagcagtgtcagcaactgagtgtcaagggtggggatggggtggaaaggcaaatcatcaaaatatataatccaggaaaattttcattattctcacctttgcgggctcattgatgtttagggataaaattcaggcttttttt

SEQ ID NO: 10174 - DNA, 1220 bp, Homo sapiens
ttggctgccatctcagacaggacgcaggcctgacaccctcagcttttagctttgtaaacttccctggcgctttgtagaatcttgtgtttcttctcttctcagcagatatcattcaagtcacaagaactgtctggttgagaaagtaatttaaaatatttgaccttttatgtttcttttatttagaaactgtgagagaaaataccgtcaatatctgttaggtctagaaaaattttcttccgaaagtgaatgttctgtttaattcttcttcatgcaagtgagtggcattttgtacactctttagcttgaagcggagtgggtcctattgtattttcccttcttttgtctggaatatattctttttccatttggatacagtttttcaacctttgggatttttttttcctttctagtttttcctactccacaaacgtaacagtaaggaaaaaatcacccacaaacctgctgagtttgaatcactggcaacttgcctagaaaagttcagatgatgggtccttgaactgtgtatctatttcatagggtaagtttgttgtctatgtttgtttttttatgctgaggctttaattcaggtgacttgctatctagacacctggggtggcgtgttttctttgggatgcataatacacaaaggccagggagcctttggcttggacccccagggagctattgaaacttttaaagtttgagtttaggagtaagaacatatctcagaccaccttagtcagctttgctgatgggatttagggccaggtcagagtttcttttcataactgcctgaaaagagagatggtgtgaaacaagattctgataatggtttgtgtgagatttgatcatagtctaaaactatcacgtctgagttgccttaggatgacagtgctgacacccagtaggaagtatcccatttttatcaggaaagtcagtcacgcgtagggatggtgaggagacgcgtagggatggtgaggaggggagaggagggagacctgctggtgcccttgcaccagggtgaggcctgactcacgctgcttccccccacaggccctgctttgcttgcctgctttttccagaatcgattttgcaagcttcaagattctgttcccctcttcgcagaagtgaggaaggcaaatactcagggtttgaagggagacctggccggcctgagggctggcagatgtgagggcaggacacctgggatggactcgtag

SEQ ID NO: 10175 - DNA, 1999 bp, Homo sapiens
tgctaagaccaggatttttctgatatggcacatgctatcagttttttggggcaggggagatgaactttaaaaaaaaaaaaaaaacttcattggcttgtccgagtgtgaaatgcacatttaggaaggttacatgtcagaccctttgttaaggataacccttggactctggggcatgtggctcttttgtgggaggcaagcacatctgggcttcttgtggaggggaaggtagagtgaaagaaagagggcccactttctaacagggtggagcaaatgagaccaagaaatcattggtaagatgatggttagtctgaccagtttcatgttagtaaattcacttgttcttgggaagcagattaagtagcagaaagtccaggaaagaaagaccagaaggagtaatgagacaagtgatggtggggaagctgaatgttgagggaggtggaggaaggaggagatgagcagtgtcagtaaatactgtgcattcagtagaagttgaagaatcattgttagaagcatttccaaacaaaacactaagcaaaatgggaattaggcttattttgaatgcatctttaacttacgaaagatgtactaattgtgggggtgcctgagtcaggcggagctgacccaggggtgggaacgatggcagctgcccaggacccatgtgcttggcccaggctatgtcctcgtgagaggtactggggtccacggatatgtgttgtggggcagacagtcactgtgggatgtcttcaaagtcagcagttacagaattagtttactttgaattttgttgtctaaatagctcctgctttattttttaaattaaattttttgtttttactatcacaggctggcctaactaatacaaaataggtgatgaacctctggttttaccataatgcaatgtgccacggaaagtttgggggaggtttttaatgtaattgcactctggttaattggctcgtaccaagccctgccttatgacttgtggaaagcttcaaggagttccactgatgcaaaagggtcttttcctagcttcctggtctgatcagtgctatgagatggacagataagtgtgaatgttttatacagaaaatggaaatgatacatttctcttgttaggtgttttcataaaatgtagcattttttttcttatggaaataagagtttcaggtgtctccccacctagggcaaattcatgcacattgtcatgttataccaccattctggaaatgatttctgtggatttgaaattgcacttttaattttatatatgacagcatttaaatgcaaacactaccatgaatttaatgtataaaatgttgtcaaaccaagggaaaaaaccacagttcaccatgtggagtttactttttttatatgaatgtttgttgtactgtgtctaagcataacttccctaatgtcattacttttacataccagatttgactgaccactaatgtagtactggggataacttaatatcctatgttgtgtcaagactctttgaagactttcttgaattgctttcgtaaaggtctgaacactgttaaggagaaagctgagtatcaacttgcctttctgatagaaatgtttcttgtgccagttttattgttgagatatactatttttttccttttttaattcagttttttaaaaaaacaaatgtattgtggcttccagttaccaggttgtctaggtaatgacagtaaactgactgtagaatgataattgtggtatagtgaccaatagatgccaaacagcttgtggcctcactaaaggtggggtcgcttagtccccgggagtaaaatgagtgacctcagaaacaagaattcctggaaaggcacatgccgaagaggaatatggtataattttaaattttaatgcaaaattttaatttgtctttattttttatcatttgaactgataagcactttttgtgtcaatataaaatatactaaaactgatgaaatgctaagacatgtcttgtgaaggaaggtttcttgga

SEQ ID NO: 10176 - DNA, 1180 bp, Homo sapiens
caggaggaaaaaaacaaacagcctagctttaaaaaacagtgaaatagcagtgatttcatgtccctgtatgttctgattaagtcttatatgcagagaggacagagcataaagtctatagaattggcttgggcttgtgtagccccagtcatttgataaagatgttgttaaactgtgtcagcctgagccttcaaagggtaaatttaatcatgattctgagaataaagaacttcaggagcttcttaggtcttgccacaaaaatctgcaaatttgataattctcctgaattcacaatcatggacttgtagactatgaagagatattttatttgtttgtcttttatttaaattactaaggtctaggtttacaaagcatactacaggacccttttctatgcaatatcctaacttttttttttgtgattatgcttgtgagaaattttgtaatactacattctagttctgttttcgtttattttaaaactgaatccttaaacttgcaaacacgcctactgtaagcatgcttggaatgacttgttttggttttcagctgataggatctatgcctctggaccagctgaacttactggtgcagctttttgtgccctctactgagtcccattccagaaactttgagccatgctaggaggtaactagtctatgccttaactcctgacctttcctgcattagtaaaatttcctcctgggctgagcctttgggggttgattcacagcatttaagctttctgattatacctctcaaacattcttctgtcaattccacacaatccttctacctctgctatgctgaacccctcattcaccctgcacctgccaactgcaaaatattgtctgaaagaatctttcacatgttcctgcttcctatggctgcaggaaaggagaaaatgtgattgcatgtggtagttgtggtgatagacgtttagacaggacaggttaatttagcggattgtggacttaagattcaacctctatctggagaggtgaaaacacaaaggcttaaggacaacagtttctaaccaagtttctctgaatcctttcctgagaggtggtgggcaggagggaggagtgagacttatcagatgggacgcttgccccaagactgtgggataaaccaccattgctagtcctcaggaattagaccatatttagtataggagttgggg

SEQ ID NO: 10177 - DNA, 1146 bp, Homo sapiens
tttgtagagacagggttttgccatgttgcccaggctggtctcaaactcctagactcaagcaatctgcccacctcggcctcccaaggtgctgggatgataggcatgagccaccgcacccagcctatctcctagatcttgaatcaaaaataaaatgtaaatcacttccattctgctagcatgagggtttgttgctaaaattgaggattctatctgacgtttactttttgttgttttttgagacaaggtcttgctttgtcgcccatgctggagtgcagtggcatcattataactcactgtcaaactcctggactccaatgttccctccccttttagcctcccaagtagctgggtctacaggcatgaaccatcaggcccagataattaaaaaaactttttttggtgaaaacatgatcttgctatgttgctcaggctggttgtctggcattttctttgtcctttattctttatactagctaaaccctggagtatccttgaagcctttactggcatacagagtacctgaatcttactttggagcctagcatgggtcataaatatatctgattcattaacctgtgagacagctgagagaacacagactccttacctgtatctccaggcatatctggtttttctctgcctaatagattttcctgctttctagttagtaatattgagaaagaagaaaggcttatttatcatttgctttttttccactgtgaatcatctgttctttccatgaacattctggggagcacctcctgattaaactcctgtctccctgaccactatcctgctgtcattggacttcttgaagcacatgggctactgccccaggacactgggatttgagaggagtttagtggtaattgtcaggtctttcaaagcatttattattccttttatacggagatttcagtattgagacttaaaatgaactgaaaaatgagattgaacatttaatattttggatgtaacttttgaagaaagtatgctttggtgcttaaaattgtatatgattttaggtaagaaactttgataatattggcataatttagatttattttctttcttttttttgagacagtctcactcagtcgcccaggctgaagtgcagtgacacagtctcagctcactgcaacgtct

SEQ ID NO: 10178 - DNA, 1191 bp, Homo sapiens
gcatgctccaggaacccacgttgagggaagcagtgcatgctctcttcagagggtggtggcttccaattgttttccatctttctacccaacattcaaaaatcaaagtgtctggccgggcatggtagctcacgcctgtaatcctagcacttttggaggcaaaggctggcagattgcctgagctcaggagttcagcaccagcctgggcaacatggtgaaaccccatctctactaaaaatacaaaaaaaaaaaaaaaaattagccaggcatgatggtgagcgcctgtaatcccagctactggggagtccgaggtgggagaattgcttgaacccgggaggcagaggttgcagtgagctgagattgtgccactgcattccagcctggggagcacagcgaaactccatctcaatcaatcagtcaatcataattttattcatcttttctacagagtttatataagtaagtttaatctttttattttcatgtgtctgatggttttcaattattttcatccttttctgtgtcttaggtatatttgaaggctcccatgattctgaatggagtctgtgttatctggaaaggctggattgatctccaaagactggatggtatgggctgtctggagtttgatgaggagcgagcccaggtagggtaacatcaggctttattgagcatggtccctttagtccctaatcttgcctttgcctggggacctattttacccaatttttaagagtaagtatagaaagtattgtgttgaagcaatattgaggaatcctgaaaatgttgatactcaaattctgatcctgattttgggaaagttttttcttcagcagttctaaatttcatgggttattcgtatctgctcagtgggtgcttcaaagtccagcaagtagctctttaaaatatttattcttgatctttagaacactatgaatagggaaaaaagaaaaaactgttcaaaataaaatgtaggagccgtgcttttggaatgcttgagtgaggagctcaacaagtcctctcccaagaaagcaatgataaaacttgacaaaaattgtttaaaaaaaaaaaaaaaaagctggacgtggtggctcacacctgtaatcccagcactttgggaggctgaggcagacggatcacctgagacttgaggtcaggatttcgagaccagcctggccatcatgatgaaacccc

SEQ ID NO: 10179 - DNA, 1172 bp, Homo sapiens
gcgtgcctgtagtcccagctgcttgggaggctgaggcaggagaattgctgtaatggggttaagcctatgattttcaggttgtggtgagctatgattccaccactgcacttgtactccagcctgagtaacagagcgggatgctgtttctttttttttttctttttttttcttttcctttttttttgagacaggctggagtgcaatggcgcaatctcggctcactgcaaccttcacctcctgggttttaagctattctgcctcagcctcccaagtagctgggattacaaacatgcgccacaacatccagctaatttctgtatttttagtagagatgcggtttcaccatgttggtcaggctggtgtcgaactcctgacctcaagtgatctgcccgcctcggcctcccaaagtgctgagattacaggcgtgagccactgcgcccggccactgtttcaggaaaaaaaaaaaaaaaacaaaacccaaatattgtattttttttataaatcaaaattaaaataggtatttcatgtattctgacagcaggaggatgcattagcacaacaggcctttgaagaggctcggagaaggacacgcgaatttgaagatagagacaggtctcatcgggaggaaatggaggtgagagtttcacagctgctggcagtaactggttagtactttcccccaaactctcaggctgtgtttgtgatgtttgtgcataatgctttttaatagtttaattttgtctttcatttttaaaaagttgtactctctggctttgtgtttattaaatgtaattgctataaagaaatttattttaattttaaagttgtacatcaattcctcattcattggtcttcataaaaatcatttactataataaggtatattttctcttaattcatttactcaaaatctcacctctttttttcttatttttcaaattatttgtaaaaatcagcttatgttaacagattgcatatttttagaacattattaaaactcgagtaatactactttccatttttctatgaatatttgtcttggttttataactataattgtcagtcatttgtgtgattttaactaaaggaaaatttaatattcaaactattcaaagaacggaattaaactttttcttttaacctttctattgtaaaatacagaaacagaaatc

SEQ ID NO: 10180 - DNA, 2267 bp, Homo sapiens
ttctagatgttttggttatacagcttcattttagatgagcattcttattttttgttttgtttgccccatttccttttgtgtttttatagtctatagcattttaaaactgctgatgttgtttgcattatttacaggctaaaaacttagtagcatagagctgtctgccacagccttctgacaaagtttacagttattaaagttgcagtatccttttaaatgctagtaatcagcactctttcttttttttttttttaatagagacagggtctcgcagtgttgcccaggctggtctcgaactcctggcatcaagcgatcctcctgccttagcctcccagagtactgggattacaggctctttctttttaaacataaaagttttaaattggtattaactctgtactctgccctagattgttttagcttctgttctgtaatcatgagtttggttggagatattctccatagatgatcttctactgaaatgcctaaagaagtcacaggctggcttctgttttattcagggatttttttaaaaagtcaatcagaaaagggatactggagcttcttcatgtatgtaacagcatattaaactggagacagtgatgaatcagctacaaaggtaatattgtattaaaatcatgtttaagatagctgcttttatgtgtattttatattgcatgcttttgtaaaaacatgctgggtgatgaaagattagttttagagagaaaatgttcatctgtgcagaggatgcattttcttccattaattctggaaaaaacgttcacagttatatatatggtattttgcaaaaggactattaatagaaccttttgagatgaattaatgtaagaatattttttaaataggcttactgtcaaattgcaactttttttttagatacagagtggaaaacagtgctaagtcatttggcacctccttacaaatatttttcatggtcacatttattaaatgttactacatttctgaatttttgaaaaatgtattttatcattaaatggcattattttaaagggtgaaaaactgacacagtcaattcagaaaatggactgaagtctgaataaggtcattgcatttaaaaagcatataactgtacttgactgatgagggaggtgttactttcattgtatataggtcttatttcataaacagatatcctgtatcaaataaaagtatttgttatatatttgaagttatgcatggaaaggagtgtgtttaaattgttacaaacaataatgcgtcattaaaggccatgctgatcttgcataactataagtactatgaatgaatttggttggttttggtgttgtacagctcacatgtttacacactcagtgccctaatttcccctgagggaatcgctttttaagtgatccttacagtggtgttttatgttactttattacagagctccttggttttttacttctgcacttaaatttttttaaataacatgatgatggtacattttcctctattgtctagctaagggctttcggtccaccagtaaataagatcaaatgctcttaaatgttcctgttaccatcctaatgtaaatactggatttttctgtcatttagcaccatgctgcttctgtctgtcttaatgctggcattaagatcatgagccctttttctccagtagtacaggctttgaaaactacttctattaagttattgatgcaatttgatattttttcataatctatatttaaacaaaattacatcattgcatcatcttttctaaattcatctccattaaaacttgccttaagctaccagattgcttttgccaccattggccatactgtgtgtttgtttgtttaatttactttcacaataaacttctgtgtagtaaaaacagggtcttggctctttcttgacctaacccagtaatttctaagaaagcaacaacagtggcatctagtggtaatttctgttgattccaaagaagactactttaaatataggtatcacaaggtatacaaatcccccagtgtatattatggttttcaagaaatctggcttgatttacccatcctgtgagatatgaccataaagtagtgatgttgggagaaagaattttaaattacacatccaaattagttccatctttcaagctagttgttttggaaatatacagccgttttgattgtgctggtgttatatcaaacattcttaagactcctggcattttcctacaacagaaaagtaagcccttttccttgaaagtatgccttaagcttgaca

SEQ ID NO: 10181 - DNA, 2326 bp, Homo sapiens
agagggtgttgggggccctccagtggcatgtgaacaaatgcattgtaggggagtgagtggctctggaggccctgctgacttgggagaacagcaagctgcccttgttttccctgtggatgcagtatctccagcagacacttaacagttccagaaggactggacacgtggccatggtaaaggctgtgtgtaaccattgagaaacaggcagatctcaggcagaggggggcctttagcatgaaccaggggaggttgaggagtcgggaaacccagccattaggtgcaggtatgtcacacaacctccagccctcatgcacaggatctgcctacatccctttacctctcccccttgacccactgtcctcttctcacaccaggtcatgcagaacaaccacattgcctcggtgaccctgtatggcccccccaggcctggtagccacctgagaacagcggaactcccctagggacaccaccacccatgcccctctgtcccgtggaactgtgcatcacatcctgctcagtgggcctctgtaccaccctgtgggttttcttggacacctggccagtgctgaagggctgttgtgatgttctgaggttgggctcaggctgggtgctctgccatgggctgagtggcccagatattcttctgtccatctttggcctgctggtgccagcaggggacacagactgcaaagagaagcacaaagtttgagccttgattcctggacccaggagctctcaactaacaaggaggcaggagaggtcaacccttgtcccatgcacattgggaagacttggggctctttctgtgactgaggacacaggcacccaggataaggacaaggtcctgcctttggctccacattgccacatgacccttaaggcaagcaggtagcgtgtccatagtacttggttgcgacatttgcactacatccactttagttacttgatgagctggctgtggccagggtggcccacctgcccttccctgttcctttcttgcacgcgctccctgcctgggcacaccaaactggttgaaacacagctttctaccatccaggtacatgcccaggcctggttctcacccctgttggagtcagctttcaagattgcctgtgcccctgctctgccccatcctggctggcagggctgcatgtttccatcctgtttgcctcttttatttaatgccaaagttttagccaaagacatcttcctacttttgttgtgtttcagcattctgttctgcactgtgggctggctctctgccccaaccctgggcactggcccctggctgggccatttcatggctcaaagcctctgggggctcaaggaaggctgggctgctcagtcccttcatgggtcttgctaatggaaagtagcatatatgtgctttaaaaatattaatccttttgaaaagaactgagaagaaaaatgtataattttatcccatttttaatattttggtctagcaacttgtgatacatagatgacaattttgtgagtttttcaaatgtgtgtacagatttttgtaaatatgactcttttgtaattaactcatgtacagcctcatcctgtatagtttaatgatgaatgtgcaggggacctgtctcaggctcctatatggttcctgggccttatagccaggtttgtgtggcgctcccgacttttgtgactgactggtgtcttcccatttggactgtggcctggccagagccccttgcatatccccactgtcaggggcagccaggactgttcccatcctcctggaatgggggaaccttccttatcccctgcccacatcccctctccaataaagcacctgtgccctcagcaatggcctgccatgtgctgttgctgggatgtttgtattaaggtaagtgtgggtattggttttttgagcaagggggtggttgaagcatatggggaaattaatagtggtggcatctcaggggaagacattccttggctcctctgaggggatacagcctccagtgggagactggcattgttgtgtgagttcaggaggtgaggaaagactaggtaggaccgtgcactcatttgtcccttatgtgtggctccatccctggtgctcagccacacctgggcccaggagaggttgtgggaagcataatatctgttttcagatgagctatggcaaagtgcctgccaggttcatgaattcaggctgtggcggccggagcccctccacctccctgtggggcctggccttgagagcctctgcatacgtccgcgtcagcctagggggttccaaatccagcagagtggtaggattccctaagtccctgccaccacaccagaacacacctct

SEQ ID NO: 10182 - DNA, 1212 bp, Homo sapiens
tccccactccctctgcagtgaatcggccgctgagcctgaaggaccaacagacgttcgcgcgctctgtgggtctcaaatggcgcaaggtggggcgctcactgcagcgaggctgccgggcgctgcgggacccggcgctggactcgctggcctacgagtacgagcgcgagggactgtacgagcaggccttccagctgctgcggcgcttcgtgcaggccgagggccgccgcgccacgctgcagcgcctggtggaggcactcgaggagaacgagctcaccagcctggcagaggacttgctgggcctgaccgatcccaatggcggcctggcctagaccaggggtgcagccagcttttggagaacctggatggccttagggttccttctgcggctattgctgaacccctgtccatccacgggaccctgaaactccacttggcctatctgctggacctgctggggcagagttgattgccttccccaggagccagaccactgggggtgcatcattggggattctgcctcaggtactttgatagagtgtggggtgggggggacctgctttggagatcagcctcaccttctcccatcccagaagcggggcttacagccagcccttacagtttcactcatgaagcaccttgatctttggtgtcctggacttcatcctgggtgctgcagatactgcagtgaagtaaaacaggaatcaatcttgcctgcccccagctcacactcagcgtgggaccccgaatgttaagcaatgataataaagtataacacggattttgatgtgagaaatacaagtagtagtggcttacacctgtaatcccaacaatttgggagacagagataggaggattgcttgagctcaggagtttgagaccagcctgggtagtcccagccacttaggaggctgaggtgggaggatccctggagcatggaaggttgaggctgcagtgagatgtcactgagctactgcactccagcctgggtgacagagtgagaccctgtctcaaaaaaaaaaaaaaaaaaagaaagaaaaaaaaagagaagttgtggaggatggaggaaggggcctaacctgggcaggggacagggggtaggcttcctggaggagatgagtgtgagtaggcataggggtgggctatcgagagaagggcagtgttcggggcacagtctcaggcaagggcttgaggaaggcttgtgggtttttcaat

SEQ ID NO: 10183 - DNA, 1773 bp, Homo sapiens
ctccccaaagagctgtcagaaatctttgatcccacacgaggtaggctgctgcattcctccctgaggctaggggtaagggacacagctcattgggtcctatggctgttttcttgcccttttgaggaccttgttgtggcgcttatggtaactggggcaaagggtgaagttcctgatgggcaggtggggttccctttcctgggctttggtgggtggagaggtgggagctggaatgttagtaactgagctccctccattcccagagtgcatgagctcggagctgctggaggagttgatgtcctcagaaggtgggtggccctggaaggtgggagtgggtgtgggcaggggttgggctgctgctaggggagccctggcccagggcctgagactagtgctctctgcagtgtttgcccctctgcttcgtctttctccacccccgggagaccacgattatatctacaacctggacgagagtgaaggtgtctgtgacctctttgatgtgcctgttctcaacctctgactgacagggacatgccctgtgtggctgggacccagactgtctgacctgggggttgcctggggacctctcccacccgacccctacagagcttgagagccacagacgcctggcttctccggcctcccctcaccgcacagttctggccacagctcccgctcctgtgctggcacttctgtgctcgcagagcaggggaacaggactcagcccccatcaccgtggagccaaagtgtttgcttctccctttctgcggccttcgccagcccaggctcggctgccacccagtggcacagaaccgaggagctgccattaccccccatagggggcagtgtcttgttcctgccagcctcagtgtcttgcttctgccagctccttcccctaggagggaagggtggggtggaactgggcacatgccagcaccacttctagcttccttcgctatcccccaccccctgaccctccagctcctcctggccctctcacgtgcccacttctgctgggcctttagccctagaacctgcaggtggtgggggcggctaccaagaaggaacagaggtctctggggaggagtctgggtggtccagccctgatgattggccccacctcctgctgccccataaccctctcttcatttcggctttttcatttaccctcatttagagccatttgcagagatttagaaagatttacagtaacgaatggattcctatataaagattatttttatactttttgcagcaaaaggaaattgtaatatttgtacagtgttcaagtgaataaaaaccatgcctaaggctagctctgatgtggttctttggggaccctccttgggactgtgctggactggcagtgtgattgggtgggtcaccttgctggaactaggggtggggcggcctccggcagcctgccctccccgcccccacctgccgcaccttggtgtggggcggggccgcctcggcggggcggggcaggcggagccgtcctaccttcctacccccagactccaacccggaactaacctcggctcccttgggaaggccgcgttgcatggccaggagcagcagtctgggccgcgagtgcgggacaccgaggtcaggtctcggaaagggaggacctcctcgtccccaggggccccaggccaggtgcacccttggccgcaggtgcacggtctccggaaagtgcaggcgcccacgtcccagctggaccatggcgcctccgcggaacgtggtgaagattgccatcaagatgcgtgacgccat

SEQ ID NO: 10184 - DNA, 1773 bp, Homo sapiens; identical to SEQ ID NO: 10183

SEQ ID NO: 10185 - DNA, 1131 bp, Homo sapiens
gtcaggagctcgagaccagcctgaccaatatggtgaaaccctgtctctactaaaattacaaaaattagctgggtgtggtggcgtggtgtgcacctgtagttccagctacttggaggctgaggcaggagaatcgcttgaacccgggaggcagagatggcagtgagccgagatcgcgccactgcaccccagcctgggcaacagagcgagactctgtctcaaaaaaaaagagtttgacggaacatgaagaaggacatccagaggagactggtggtgtcagggaaggcttcctgaaggaacaggatgagaagaaaggttgggcttctgggatcagtaatagcataagtgaaggcaccatggtgtggaaccaatcacacaagttccatttggctggaactaagtgagacatggcaggaggcgaggctagaatggcatcaggctgcaagctggcagatgtgccaggcagcagagtttggctttctcctggtgaccatcaaggagcccattaggcaggcaagtgacacagcgtgatttgtattagaactctgcagtgcagagtggactgggagagtgagacagcatagggaggaggccagccaggaggtgaatgcagacatctgggctagtttgaaaggcaggcagtgatggctcattgttttaattttgatttgtttattagtgaggttgcactgtttttctcattagttcacccttcatatttcccccttttgtttattcatgttctgtatccatttaactattaaggtcttagtatttttctattccatttgtatggactttttctttttctttttttttttttttttttttttgagataagagtcttgctctgtcgcccaggctagagtgcagtggcgctatctcggctcactgcaagctctgcctcctgggttcaagcagttctcctgcctcagcctcccaagtagctgggattacagacacacgccaccatgcccagctaattttttttttttttttttagatggagtcttgctctgtcacccaggctggagtgcaatggcgcaatctcggctcactgcaacctccgcctcagcaattctcctgcctcagcctctcaagtagccagaattgcaggtgtgtgccaccacactt

SEQ ID NO: 10186 - DNA, 1104 bp, Homo sapiens
ccagaggcaggagggcatggcttggggtctggggcttcccgtgctgacagttcacccagtctccctccctagctgctgaggactcagagatctcgtcccaatgcccatcagccagtggctccagtggctctgacagcagctgtgtgtcagggcaggccctgggtaggggcctggaggacttaccctgtgtgagtgccatttgccctatacccaccagcccttccccagcccaagctgagcctgtgactgtgaccagcccctccccagcccaggctaggcctttactttgggtagagcttggggtgggtgggccagagccattccccagacacctcctgggtccagagtcagggaagcaggcattcatgcctggcctggccctgcaggtctgagcccgggactggacgagcagtagatccagcagcctgcagctccaaggaacattgcctctctggatctgctgtgaccagggtgtggctgacacctgggctacctccaacctacatgtgcaacgctgttgactaccctttctgatgtgtgtggccattggactaactggcacggggcctctctagggaagtctggttgtagagcctgaataggctcctggccccatgaccccttctcctgtccccagctcccatcccagttgtgggttaagaataggctagagcagacattgggtgtttccatgctgtaggctggtgggggaccatgtgcctctaggcagtgactagggtgcccccacccctcaggaagaacacaggtgggctcctagcagctgatccccaatgcctggccttaaagccgagctcagttaccatagggacaggtccacctctactgggccctcatgcttgcctttcctggcccccaggcccagcccctttttactggggcagtttcgttattttgacttgatgccttttgaataactttcaatagaattgtctaaaattatcttactggttgttaggcctttggtgtctcagagaaggagtctaggtctttgatgtgtgatttaatcttttatttgtttataataaaaaatagactgatatgtaccctctgatgggcacatgcattctgggctatctccaatta

SEQ ID NO: 10187 - DNA, 2149 bp, Homo sapiens
gaggtgagggggtgaaggagactgtagcctgaagcagacagtcgggtgggccctgccctggcactcctgggtgggaggctgtgggcagctgccacttggctgattcacagaagtgtttcattggctttgctgtaagggctgccccggcccatccatgggtgtgcttgtacccaccttgaaaggggctagggaggggaggagggagctgtgagggcttgtgcctagcaagccctccagagcttccttgcctgtgctgagcaagctccatactctctacaggcctacctggagtccttctacaagttctgcaccctactgggcgggactacggctgatgccatgtgccccatcctggaggtgagtgcctgcccgccctcctgcctgctggtgcccgctagccctggcctggggaggctctgccaactgactggctactgcctccttcttcctccctctcttcttacctgtgcactggctccacagtttgaagcagaccgccgcgccttcatcatcaccatcaattctttcggcacagagctgtccaaagaggaccgtgccaagctctttccacactgtgggcggctctaccctgagggcctggcgcagctggctcgggctgacgactatgaacaggtcaagaacgtggccgattactacccggtgagtgccccggctggcaggacagcggttggatgtgttgtcaccaagcacccccacccagaaccctcatgcttgtgcttccccccacccccctggccaggagtacaagctgctcttcgagggtgcaggtagcaaccctggagacaagacgctggaggaccgattctttgagcacgaggtgagtctgcagggtctgcttgtcagagggaggccaacctggtggtttagacctgactctgtggccatggccacctggacaccacatctgcccgtgtccacaggtaaagctgaacaagttggccttcctgaaccagttccactttggtgtcttctatgccttcgtgaagctcaaggagcaggagtgtcgcaacatcgtgtggatcgctgaatgtatcgcccagcgccaccgcgccaaaatcgacaactacatccctatcttctagcgtcctggcccaaggctctcaattgcactctttgtgtgtgtgtgtgtgtgtgtgcgcgtgtgtgtgcgtgtgtgtgtatgtggtctgtgacaagcctgtggctcacctgcctgtccggggtgtagtacgctgtcctagcggctgcccagttctcctgaccctcttagagactgttcttaggcctgaaaaggggctgggcacccccccccaccaaggatggacgaagaccccctccagagcaaggaggccccctcagccctgtggttacagccgctgatgtatctaagaagcatgtcactttcatgttcctccctaactccctgacctgagaaccctggggcctgggggcagtttgagcctcctctcccttctgtgggtcgctcccagagccatggcccatgggaaggacagagtgtgtgtgtccttggggcctggggggatgttgctcctcagctccctccctcagccctgcccctctgagacaataaaactgccctctctaaggccaactgtctgctgtctcgtttaggccctggtacctctccatgacccctaacttccctcgtgaccccaccttgctaagcaaccctgcctaagcctccacctccctccctcagtcagcagccgagattcttcagggttggggagtcccagggagatagccccttcttctgctggaggctcagatgcatacaggcctggggagctagatgttggccctggaggcccccctggcctccccagttgcttcaagcaattgggatcagtgtcattacccccatttcactatgaggaaacccatggtctgaaatgatttgccccaggtcagtggaggagggggaggtgtgaaccagagtctaccaggggaatcccagcctccacgctgagccccaggagttgccaccctgtcacacggccacactgtgtcactcagccagccagtcagtgaccccctccaaacagcacctgccgcattttagaagaaataaaaatttgtctttatttaaaatgtggcaattgggaagtacagtacatgcttccctgtg

SEQ ID NO: 10188 - DNA, 1154 bp, Homo sapiens
cacatctacagaccctgccccatctgcacacctagactcagttcataagtccacagactctggcccttcagaactgccaggccccactcacaccactacaggctctacctatagtgccattaccactacccacagtgctccaagccccctcactcacactactacaggctccacccacaagcccataatctctacccttactactacaggccctaccctcaatatcataggcccagtccagactaccacaagccccacccacactatgccaagccctacccataccacagcaagccccactcatacttccacaagccccacccatacccccacaagtcccacccacaaaaccagtatgtcacctcccaccactacaagtcctacccccagtggtatgggcctagtccagactgccacaagtcccacccatcctaccacaagccccacccatcccaccacaagccccatccttataaatgtaagcccttccacttctctagaacttgctaccctctccagcccctccaaacactcagaccccaccctcccaggcactgactcccttccctgtagtcccccagtctccaattcctacactcaggcagaccctatggcccccagaactccccacccaagtcctgcccattccagtaggaaacccctcacaagccctgccccagatccctcagagtctacggttcagagtctaagccccactccctcacccccaacccctgcaccccagcattcagacctttgcctggccatggctgtccagaccccagtcccaacggcagccggagggtctggggacaggagcctggaggaggcactgggggccctaatggctgccctggatgactaccgtggccagtttcctgagctgcagggcctggagcaggaggtgacccgcctagaaagtctgctcatggtgaggagggctgggctgggctagggcaaccagggagggcagccagggggcggcagccgctctgatgcccttcacaacctcagcagagacaaggtctgactcgcagccgggcctccagtctcagcatcactgtggagcatgccttggagagcttcagcttcctcaatgaagacgaagatgaagacaatgatgttcctggggacaggtgagggggctaggcaag

SEQ ID NO: 10189 - DNA, 1212 bp, Homo sapiens
cccactccttctcaaccccgactctcccagaggccctggcccctcaactgtcagtcctggagtggcctttgctggttcccagttgagagttgtgccaggtccctccttcctctgctgctgcccaggctacagccccatgccctgcaccctttgcagtccacttgtcataaaccatcccgcctgcagcctactcctacccatgccatccccagtggtcccagctggaggtagcatggcgcagactgactccagagatccctactaccacctgctggtcccagccccttcctccttctggaaatcctccatgaacttaccccactgtctgctgtcggtgcatcatcttcttcctttctggcatgggggaagcttaataaaaataaacgctggtgaccaggtggtgatgtgtgcctgtggggtggtggaccccatttttccctcaggcctccaagcagcccggaggctggggctgaggacagcatagactcacccagtgcccgccccctcagcacggggtgtccagctctggatgctgccttggtccggcacctgtaccactgcagtcgcctcctgctggtgaggctgatggtgttcccccacccttcctttgtaacccctaaccccagggagtcctgcccttccatcctggtcctctatacctcctctgagtgccacaccccagtgccccagggcccttggcatctggcccttgctgaatggagtatctcccaactctgcaaccccaacctcccccagtgcatgctgggacttgtccctgagcacgatcctcccgagccctaccctgaggcctgagctacttggccacccatgttctccagaaactgggcacatttgggcccctgcgctgccaggaggcatgggccctggagcggctgctgcgggaagcccgagtactggaggcagtatgcgagttcagcaggcggtgggagatcccggccagctctgcccaggaaggtaaaggccctgggggttcgggctctgccatctgccttgaagctcctacctcagcctactgccatctgcatgctctctactcacctgcctgcctgttgctgacggtttccctcaccccctcacagtggtgcagttctcggcctctcggcctggcttcctgaccttctgggaccagtgcacagagagactcagctgcttcctctgcccggtggagcgggtgcttctcaccttctgcaa

SEQ ID NO: 10190 - DNA, 1114 bp, Homo sapiens
cccccacttccccaaccctgtacgggttcagggggccggagacagcagctagggaataaggtcaagcggactggatccggcaccgcccaggggcggcggcctccgcccaggaagccccacccagcgggagccaggacgccgcggcgccggcagagcccacgagcgacccggcgagggcgcgtgcggcgtgacgacgcgactcgcggcgcgtcccgtgacgccatcgcgcccgcttttgaaagttggcgcccggggccgcctcccatgctgccctgcgccaacccctcccctcacctttcctcccccgccctctactcgccgcccggccggtccccccacccgtcccttcccttatcagcacccgcggccccggcagcgccgacgcaggcgcactgcaccgcgccgccgccattttgtgtctgagcctgtggagcgattaaaccgtgcgcggagctgcttctttggcggcagcggcggcggcggtggccggtgcggacgcgcggagctcgccggagacgccgggtggccggagccgtggagcggcggcggagcgggcgccgcggggggtgtggcgcggaggtaagggggcccggggtggaggaggtttcgcgggccgcctctaggtgtcacgatggggccgctccggtcggcgctggctgcagcccggcgccagcgccgccgccggggggtgtttgtctccctctaccgtccctgctgcggcgcggccgccgccattgcccgtcgccgccgtggcccggccgccccccccacccccacgcccgcccgcccgcccgcccgctaggcctccctcctggcagcgcgctaggcctcgggcggcggcagaggcagaggcccgcgcgcccggcgactccattttccttcctttgtctgccctcgaggccggttcttggccggccgatcgcccggccgcggcccgccctctgtcctgtgtcctccgcccctcccgcggcgggtggccccagctgagacactatctccgcgtcccggcttcggcgcccgcctagcttaagggttcggaccgactgccgccgcgcgctaagccaggtcccggtgccgtatgggtgtcgggccctggccgtcgcgtctcgggctg

SEQ ID NO: 10191 - DNA, 1105 bp, Homo sapiens
ggcgggcccctgtactcccaggaggctgaggcaggaggatggcgtgtacccgggaggcagagcttgcagtgatccgagatggcaccactgcactccagcctgggcgaaagagcaagactccgtctcaaaaaaaaaaaaaaaatttccttaggtggattgaaacctgcaccccaccctaccccacccttagctagctgtagcctgttctgggtcttctcttgggggctctgttagatcttgacagaactaagagctggtctgatcctcccccgtctctgtctgcaggctgctgagcctccccttagagaacccagccttatccatttcccctgagcagagacagcgtgttcaggacacacttagcagatactagaatttttaggcttaatatggattttattaaagtaaataacttccaatctgatcttagcttttttagtggtgtgaaagaggattttgttctttttgttagaataccatggcaagacatgctgataattgtgctggcccagatggcgtagagggggaaaatggaggagaaacgaagaagagtaaacgtggaagaaaaagaaagatgcgctctaagaaagaagattcctctgacagtggtaagtgacttgttccttgatttgcttactatggcaggctttggagcccagtttccagtgtgtttatgtatggatatgctgggatatagaggcgggcacacactcttcctttctttaaacttctcatctcctaacgtctatttacaacagcagttagtgtttttctggggcatattttcttttttcttcgtggcattccgctcattaatgcccttttttttttttttttttttttttttttttttttttttttttttttgagacggagtctcgctctgtcgcccaggctggagtgcactggcgcgatctcggctcactgcaagctcagcctcccgggttcacgccattctcctgcctcagcctcccgagtagctgtgactacaggcgcccaccaccaggcctggctaatttttttgtattttttagtagagacggggtttcaccgtgttagccagaatggtctcgatctcctcacctcatgatccgccctcctcagc

SEQ ID NO: 10192 - DNA, 2148 bp, Homo sapiens
ataaaaaataaattgactgtctctggaccgctatctaataaggctgtcctgcattgctgacatcccgttcgctgtcagtctaaaagacccttgtgattcttggggctttaatggaccatttgttctgtctgtgctcttctttgccagcaacagctatcattcaggttgaagaccagaatacaggtgcaattgagaacattatagttgaagtaaaaaaagagccagatgctgagcccgcagagggagaggaagaggaggcccagccagctgccacagatgcccccaacggagacctcacgcccgagatgatcctcagcatgatggaccggtgatggcggagccttgtgcgtcgccaggacttctctgggctgtgtttaaacggcccgcatcttaatttttctcccttctttctttttttggctttgggaaaagcatcattttaccaaacataccgagaacgaaaacttcaaggatgatgttagaaaaaaatgtgatttaactagaacttgctgtctgatgttagcaaatcatggaatgttctgagtccctgagggtttactgtgaagtgctgaggacagtgttgacaactaactcgttttcctagatggaaacggagacattgacccctccctccatgtggtaaaccactccagaatggccaccaggcttcccagagttctatggtcttcttcccaagagagtttttaattgtaaatgcatacttgggaaggacttagagttttaaactgttttttgcttttgcttttccctgactccctttgcttggagtcagctgcacaccagtagtatggcatgctacgatcaggttctgtcctgaaagctttgcctctttcttggcaaagtttctggtatggtcaagcttgtaaataactttttttacattttaatcttttccattaattaagaggttgaaaagaagtgcagtgtaagaaaacccagcattttaattacttgcaaattaagttaccacagactctgtagtgtgtaaatgttgacaaggaattggatcacaatcatgtagcagaatggcacccagaccactgcccaccagtgacggacatgcacgtggcagatcatgatttccagcccacggagccagcatttgaaccttgtataattaactttcagttatgatttcccatcgacattttctttgccctgtttgtagctgattgttgtgttttataaatcttctgttaaggcagaagggtgattatgagtggttcacagcagcccttataagctgggccagaaaatttcactaggtcagtaatttaaaccttggatcttcaaaaaataaaataatgtgaagcaaaaccaactaaaaagtgattcttgcacatgaactgtcacatgtttaaaaatgtgttttttagagagcctcagtcttactgatttcaaacacttttttcttctgtgtattgcttttaagagagccatcagttagctatcagactctaggttgatgcattttgtacttagctgtactgtgtgatatttttcattattttaggacgccaacatgagacctgtaataaaatatgtaatggggttgaaagctggggaggaggatctactgctgtacagctaataaatcataacggattaacaagtgctccaaagactccatcttgcgtgattcctgcctgcttgagggaggctggggggctgcatacatggttccaggctgtgcaggctgctgcctttcacaggcaacctctgttccctgggatggtactttctctagcagatgggacgatatgatcttggcgggtgactggatattgagcgcatcctgctgtaactgtttttttgttttgttttgttttgttttgttttgtttgagatggagtctcgctctgttgcccaggctggagtgcagtggcgcaatctcagctcactgcaacctccacctcccaggttcacgccattctcctgcctcaacctcccgagtagctgggactacaggcgcctgccaccatgcctggccaattttttgtatttttagtagagactgggtttcactgtgttagccaggatggtctcgatctcctgaccttgtaatccgcctgcctaggcctcccaaagtgctgggattacaggcgtgagccaccacacccggcccct

SEQ ID NO: 10193 - DNA, 1129 bp, Homo sapiens
agtggaaataagagcacacacacagcgctaaataaatggtacttccttcgccctcccctcggattggcggagccctgctccccagactccgggggcgcgcggacctcagcgtgatgacgcaagagcggaggacggctcctctccatccacggctccgtttcctaggaaacgtggactccgcgttccactctgcgtcgctgcccccttgacgtcacgctccggatgggaaggcggggcgtgtgctaccgccaggggcggggcggcgcgggcgggccggccgggctgtgcacctgcgcctcggcgggccgcctggggcaccgtccccggcccgcccggccccgccatggcccggccgcagaggactccggcgcgcagtcccgatagcatcgtcgaggtgaagagcaaagtaagggctcctccggcctcggccctaggcgctcccaattccctctttctccccttcccagctccttggtccccgccacctcttccctctatcctccaagtcccattctgcttttctgctcgccttcccccatccgtcttccttcctccactgctggtctccagctctctgtggcctgagtacctggagggcggtaagaagaccttggacagcgtccctggtactggagctgaggtctgggcttaaggctgccgcaaaagcggcagccgcatctttcccattcctgccagcctgcggtgagaaaggggcgcaggctgtcctgactcctcctctcccccaaccccgacttccagtttgacgccgagttccgacgcttcgcgctgcctcgcgcttcggtgagcggcttccaggagttctcgcggttgctgcgggcggtgcaccagatcccgggcctggacgtgctacttggctatacggatgctcatggcgacctgctgcccctcaccaacgacgacagcctgcaccgggccctggccagcgggcccccgccactgcgcctactggtgcagaagcggggtgaggaggggtacagtgggcagcctctgtggggtaaggtgtctgtggggcaggtctacaagggttagtccatgcccagggtacccaagcgtcaccctctgcagtccctgcccttggcttgacctctaagtggtaggaaatagctac

SEQ ID NO: 10194 - DNA, 3185 bp, Homo sapiens
ctcattaaaaaagaagaatctctgtcacctcagccaagtgatttattttttgctcccccttttttgagtcacaggccgagctgcagcctaggaaacccaaatagggtttggtgggccacttagtgggcatggttacattggtttatagcatcccaagaactgtagatccctaggcccctgagagctggacagagcagagaactacagggccaagggtccagagaagtgataacttggcccagggccacacagcagaggtagagggtccttggccagcacactatctaccactctaccccacctcccactgcctgccttgctcccctttcctcccttttcaataccctatcttcccttgttgttaagatggccaaataatacatttactctaaattgattgcctggaaactacctgccttcgtcctgagagcttctgtgtgtcaggctgctggaaagaagactccattcccaggacagaggcccttgagtacaggggctgctttcttcctgcctagatcttcaccatctctgcacagctctgagagaatggatgctttctgttgagaaaccagtaccttgtggaggcaggttcttgggctgctactccagggagtggatggaatccttggtcccctaggccagacttcactgccactgtgccagacagctccctgcagctgggccctagccactcttaggaaagactattgggagtatttgctggccagagaatgggactctatcagctttacacatgtcccaccagctgtttcagatagatccttacagctggcagagtaaaagtggtcccgctaccattggggaatcaggaaaggaaagactgagatggttgccaggacttggggtggcccacctgtggagaggactggctgccctggaggaggaaagggaggaagtctacacagaggagcaccaggacggctggaatttccatatgtgcttcacattgtgaggggagtgcacaagccgcccatgcaaagagtagggtcagccatggcaaggccggaagttgaactttcagtccctgcctgaatctgggctttgcaagctcctgctccatattggtggacatgggaatggttggtgtggcctgagatacccattgctcaccaggcctcactgggcccacagctgggcaacaagaaaaatgtttgaattggaccaactgctggtgatggggccagggccctgggccctgtgctgtcagaattctgccttgggaaatgatcctatagctgctgctttttcttggtccttggggctggcagacccatagaccatggcctgttaggaggcgtcctgtctgtaaaggaaattcatctcttgtgacagcctggggctacctagctcccaaacccagaagttggagacatcaggctgtttaaatgatcatagcctagcaggattggattaaaaccacaggcttttgcagctggaatggggttcagtgaacatctcccccattcctctcttgctacaaataaggaaacaggcccaggagattaagtgacttggctaaagtcacatagcaaattagtagcagagccgggactatcccttatccctgtgggttgggcaacactatttagtcctgaaaccgaatggcagataaaccccatgaggggtcaggctgatgtgccctccagcagtatctgagaagctgctaccttcaggggtgtgtcagggatgaggacgggtgcctgagcttaggttgtggagtggctgagagggcccaggagggctcgggacagctgtgtgctgcatggggttgggtgtctgcctggctcgcacttggtacccatggccacctccccattttctgtgccttatctcactgtttcagctgagtccaagttgtttactctgttcctctccagaggggctctctgtcccagttgggcagctcacctttgggacataagcctttgccccacaagctgtggagagggccaaaaccaagctgcttgagcccactctcttgctgagagtccaggcctgcctgcctgccagccagaggtgccccttatgcacatccagtcctaccagcctgcttccaggagcctagagtgggaaaggcacctgggggagccctggtgaagggctggacctgacccatggaggcaggaggaagacctggctttcttggtttgtccggccctggggagcagccttccctactcactttccccttgcggcaccaaatggtcactccttccagagcaaaaactggcactcatagcaagccagaacccccatccccatcctcatgggtctgtggctgggtgcaggccatcaaaatggacaccacgagacagaagtggggactgcctggccacctagcgccttcccactccttaagcaagcacaaagaagatgaggcagagaattgtcagagctgaaagttcctttggttgctcacaactcaggtatgcacccatgtggcagccaggcagcggagccctactagactgccagtctcatgcacccagacctgtggccagattgtggcctctggctgcctcaggcattttcctctttgcattgggttttcctgcattagtaactacagctgcaacagacatcctccacattgtgcacactggttttgcctttgtcctcaagagttgatacttggcattagcatgaaacttgtgggtgtgggaggatggagagagaactctaacacaaaacatcttattaaaattgtacttgagagacaaaaaaaaaactctgttgtattttgacagaattatttttattaaaatacacatccatgagcagtcatgtgtgtctggtctctgttttgagtcttactgaggttggcaccccttctgtgacacatcctgtcctaaaggatttgggcccttcccagcctctcaagtgcccaggccctcaggtgccttcttcaaggacctttgaaactgtgtatttgtaagaccccaaagaggacaggtacttaaacctcagttctctcttgaaacggctttcttcttatacaaggaaaaagtagcaaattcaactaaagagcctgggcacagtggctcacgcctataatctcagcacgttgggaggctgaggcaggtggatcccttgagctcaggagttcgagaacagcctgggcaacatggcaaaaccccatctctacaaaaaatacaaaaattagc

SEQ ID NO: 10195 - DNA, 1361 bp, Homo sapiens
gcagccgcagagggcgcagccgctgcggccgccgcgtcggagttacaggctgctaccgcagggctggaggctgccgagtgccctatgggcccccagttggtggtggtaggggaagagggcttccctgatactggctccgaccattcgtactccttgtcgtcaggcaccacggaggaggagctcctgcgcaagctgaatgagcagcgggacatcctggctctgatggaagtgaagatgaaagagatgaaaggcagcattcgccacctgcgtctcactgaggccaagctgcgcgaagaactgcgtgagaaggatcggctgcttgccatggctgtcatccgcaagaagcacggaatgtgaactggtgccccggcagcctgctggactcccagaccccatccagccaggggaccgcaggccattgttgaactcctctatactcctgggcactggttgacagtactgaggcttaaggcagctggactctcttgctggtgacctggcatcctcaattgtttcctcctgaagtggaagctggggccttagactctgccctggtgacaccagcaattatgactttgtctacccttcctccccagttattgttgcagattctggttaagcagaggcttcagaaccactgaacttgaaacttaccctctagggatgcaggtgggatgtccagggactataggtttgggaaaaccataccttaaggttggtcagcagtcagacaactctaatgtgtgtagtgataagagattcaagtaacatcagttctcctccttttcatgcttttccttcccaggtgcagcctgtgattctgatggggactggtaaatctgtgcctctgcctcctaggacttattttcccaggaggccatttacaaggggatctggatgacctgctgatggagatccagcttgccagggacttaggtttatcctgttttgtttgctactggttacaaattctattttctgtacaattagtcagactaaagttttcactgtgtttgtttggcaaaacaaattaaacaaaaagtaaggtttttatttgggtctcgccattttatttttacaaaaacatagttaaatgtccttgaaacatggggaaataggcctcagcctttctgaaagaccaggctgaccctgaaagtagagatgcttcaatgaccagtttttccaaaaatgggccctaagcacatggatcctggccttataaggtcctcacagagttcctggcccagctcaccctaaagagtttggaaactgcaccaaatgggcccagtttgtccatggattatctccctgtatcctttcaacaagaaggaccaactggtaactaagctatattgtgatag

SEQ ID NO: 10196 - DNA, 1215 bp, Homo sapiens
ttctgctggatgtcccacagagccagttccaacatcaggccactcaggccttaggggtacaatggaaggtttgtccatgctgcctcttggggagctgggtgggaaaaccaagcttgagactctggtggtggcagggagacaggtggggcagcgcttctctgctactgcctgagcctggatacgtattcatggtccactgctctcctgattccagctgccaacaatggctctgccatggtgcgggtgatcagcgtcagcacttcggagcggaccttgctcaagggcttcacaggcagtgtggctgatctggctttcgcgcacctcaactctccacagctggcctgcctggatgaggcaggcaacctgttcgtgtggcgcttggctctggttaatggcaaaattcagtatccattccttcctgtgggtggtgggactgaagaagggtgggcggagctggggtgtcacgcctcttcattcatctatctagcccttaacaccctgctcagagaagagatcttggtccatattcggcagccagagggcacgccactgaaccactttcgcaggatcatctggtgccccttcatccctgaggagagcgaagactgctgtgaggagagcagcccaacagtggccctgctgcatgaagaccgggtgagggggctgacatggcgaagaggcgccagagaagccatagtgtggggttgggctgcacactcacctccctgtgccttccaggctgaggtgtgggacctggacatgctccgctccagccacagtacctggcctgtggatgttagccagatcaagcagggcttcattgtggtaaaaggtcatagcacggtaagcctgtgactgcctgcctcccctgccctccccacttcctcatatccatcttctgttccctatatccacagctgcccgggcagctttactagcattctgcccgtggggactctgagctcaaattggccctcacctgtgcagctttctccttatctagcagcaccctgcaggtctggccttctctaggaaccctgttcatttagtcagtcacacaagcatgccagtcccaccgtgagtcagcccagctcattgccatcctcacttgggaggggcttgttctcacctctagtcagcaaagctttttgggttctttctagtgcctcagtgaaggagccctctctcctgatgggactgtgctggctactgcga

SEQ ID NO: 10197 - DNA, 1099 bp, Homo sapiens
cttcttggctgtggcctcgtttttgacctgtatccccacttccctgctgccctgtctctcattactgctaatactaatgcctcgtctctgtgccccccatctctgcctcacttcctgtcacttaagcccccatctttggcccacctcaggtgcctactgccacctctgcactgtccctggagctgcaggaagtggagcccctggggctaccccaagcctcccctagccgcactcgttcccctgatgtcatctcctcagcttccactgccctgtcccaggacatccctgagattgcatctgaggccctgtcccgtggttttggctcctctgcaccagagggccttgagccagacagtatggcttcagccgcctcggcactgcacctgctgtccccacggccccggccagggcccgagctcggcccccagctcgggcttgatggaggccctggggatggagatcggcataataccccctccctcctggaggcagccttgacccaggaggcctcgactcctgacagtcaggtttggcccacagcacctgacattactcgtgagacctgcagcaccctggcagaaaggtgaggagcttgggaggggaaaagtgtgctagcaggaggggcttcagatagattcatccatggctaagttggcctgtcctcccagccccaggaatggccttcaggaaaagcacaagagcctggccttccaccgaccaccatatcacctgctgcagcaacgtgacagccaggatgccagtgctgagcaaaggtgggagccactctacaccattgccctcatggggggatgggcagcaagtgggcaggggcttactcctccttccccttcccacagtgaccatgatgatgaggtggccagccttgcctctgcttcaggaggctttggcaccaaagttcctgctccacggctgcctgccaaggactggaagaccaagggatcccctcgaacctcacccaagctcaagaggaaaagcaagaaggatgatgggtagggagaaatcctagggagggagagggtggtctctaggctgcctcacatagcctgaggtgcttctcgcctatggcagggatgcagcc

SEQ ID NO: 10198 - DNA, 1843 bp, Homo sapiens
cagggggctgtgactccccctgaactgggagcctggcctggcactgatacccctcttggtgggcagctgctctggtggagttgggaagggataggacctggccttcactgtctcccttgccctttgacttttccccaatcaaagggaactgcagtgctgggtggagtgtcctgtggcctcaggaccctttgggacagttacttctgggaccccctttcctccacagagcccttctccctggtttcacacattcccatgcatcctgatccttaagattatgctccagtgggagaccctggtaggcacaaagcttgtgccttgactggacccgtagcccctggctaggtcgaaacagccctccacctcccagccaagatctgtcttccttcatggtgcctccagggagccttcctggtcccaggacctctggtggagggccatggcgtggaccttcacccttctggactgtgtggccatgctggtcatcggcttgcccaggctccagcctctccagattctgaggggtctcagcccaccgcccttggtgccttctttgtagagcccaccgctacctccctctccccgttggatgtccattccattccccaggtgcctccttcccaactgggggtggttaaagggagccccactgctgctacctggggaatggggcacctgggggccaaggcagagggaagggggtcctcccgattagggtcgagtgtcagcctgggttctatcctttggtgcagccccattgccttttcccttcaggctctgttgctccctcctctgcagctgcacgaaggcgccatctggtgtctgcatgggtgttggcagcctgggagtgatcactgcacgcccatcgtgcacacctgcccatcgtgcacacccacccatggtgcacacctgtagtcctccatgaggacatgggaaggtaggagttgccgccctgggggagggtcccgggctgctcacctctccccttctgctgagcttctgcgcacccctccctggaacttagccatactgtgtgacctgcctctgaaaccagggtgccaggggcactgccttctcacagctggccttgccccgtccaccctgtgctgcttcccttcacagcattaaccttccagtctgggtcccactgagcctcaagctggaaggagcccctgcgggaggtgggtggggttgggtggctgctttcccagaggcctgagccagaaccatccccatttcttttgtggtatctccccctaccacaaaccaggctggaacccaagccccttcctccacagctgccttcagtgggtagaatggggccagggcccagctttggccttagcttgacggcagggcccctgccattgcaggagggtttggttcccactcagcttctgccggtcggcagcctgggccaggcccttttcctgcatgtgccacctccagtgggaaacaaaactaaagagaccactctgtgccaagtcgactatgccttagacacatcctcctaccgtccccaatgccccctgggcaggaggcagtggagaaccaagccccatggcctcagaatttccccccagttccccaagtgtctctggggacctgaagccctggggcttacgttctctcttgcccagggtgggcctggtcctgagggcaggacagggggtttggagatgtgggcctttgatagacccacttgggccttcatgccatggcctgtggatggagaatgtgcagttatttattatgcgtattcagtttgtaaacgtatcctctgtattcagtaaacaggctgcctctccagggagggctgccattcattccaacagttctggct

SEQ ID NO: 10199 - DNA, 1173 bp, Homo sapiens
gtgggcggagggccacagactggtggtcagccgtgctcctcctccccagacaccgtgcgctgcactacggctgcccacctggccctgctcgtgcccaagaacatcgccttctaccccagcaaccacgagcgctacctggagggccacatagacgtgtggtggatcgtgcacgatggtggcatgctcatgcttctgcccttcctgctgcgccagcataaggtagaccagggggtgggtgcagatgagaggggctaggcccttggaggagcagctgtgaccaaaccgcccacctggtcccttgcctcaggtctggaggaagtgccggatgcgcatcttcacagtggcccagatggatgacaacagcatccagatgaagaaggacctggctgtctttctgtaccatctgcgccttgaggccgaggtggaggtggtggagatggtgagccctctgccctgccctggccccgtggataccatgtcccgtgcagctgggtcctcacggccaaccctgtccccagcataacagtgacatctctgcatacacctacgagcggacgctgatgatggagcagcggtcgcagatgctgcggcagatgagactgaccaagactgagcgggagcgagaagtcagtgccctttgtggttcacgccagggcgggtggcagggtcaggcctttggagaccgcatcggtgggtgcggaggaatcagaatgactcaccgcagccctacccaagctagtgctcatttcccggaggcaaggtggtcacattgggccagacaggccccatcccccttttcctatgggaccaaggctatctcctgcaattgtcctcaggcccagctggtcaaggatcggcactcggccctgcggctggagagcctgtactcggacgaggaagatgagtctgcagtgggggctgacaagatccagatgacgtggaccagggacaagtacatgactgagacctgggaccccagccatgcccctgacaatttccgggagctggtgcacattaagccgtgagtgcagcaaaaacagccccagcggcactggaatctaggggtggaggtggggtggggcagacaagtagtgttagatgggccaggggtggggaccctccttgcaggatggctcatggcgacctgtgactggctacactacgtgtagggac

SEQ ID NO: 10200 - DNA, 1556 bp, Homo sapiens
aaatgacaataaaaagtaaccaggagtgtggcatgtacctgtgtcccagctactccagaggctgaggaaaggatcacttgagcctaggatgggaggttgaggctttagtgagctatgatcacaccattgcactccagtctaggtgagagagtgagaccctgtctcaaaaaaaaaaaaaaaaaatctttttcagggcataatgtttcctgattatctttttagaaaatgtggacataaaaaggaaaaattacatatgtaattgtatatgtaataatcacacatatctgcagaaataaccagatgcattgaaaaaacacacacatgccacttctttagtggagctaatgacatacattttatatcccacttttttctctcgagattgttattatttactttctcatctagtaatttatacatctgagttttctaatttcttgttttgttgggtttttttttttttgccttcctccccgtagatcttgagccagatgattgtgcatccatttacatctttaatgtagatccacctccatctactttaaccacaccactttgcttaccacatcatggattaccgtctcactcttctgttttgtcaccatcgtttcagctccaaagtcacaaaaactatgaaggaacttgtgagattcctgaatctaaatatagcccattaggtggtcccaaaccctttgagtgcccaagtattcaaattacatctatctctcctaactgtcatcaagaattagatgcacatgaagatgacctacagataaatgacccagaacgggaatttttggaaaggccttctagagatcatctctatcttcctcttgagccatcctaccgggagtcttctcttagtcctagtcctgccagcagcatctcttctaggagttggttctctgatgcatcttcttgtgaatcgctttcacatatttatgatgatgtggactcagagttgaatgaagctgcagcccgatttacccttggatcccctctgacttctcctggtggctctccagggggctgccctggagaagaaacttggcatcaacagtatggacttggacactcattatcacccaggcaatctccttgccactctcctagatccagtgtcactgatgagaattggctgagccccaggccagcctcaggaccctcatcaaggcccacatccccctgtgggaaacggaggcactccagtgctgaagtttgttatgctgggtccctttcaccccatcactcacctgttccttcacctggtcactcccccaggggaagtgtgacagaagatacgtggctcaatgcttctgtccatggtgggtcaggccttggccctgcagtttttccatttcagtactgtgtagagactgacatccctctcaaaacaaggaaaacttctgaagatcaagctgccatactaccaggaaaattagagctgtgttcagatgaccaagggagtttatcaccagcccgggagacttcaatagatgatggccttggatctcagtatcctttaaagaaagattcatgtggtgatcagtttcttt

SEQ ID NO: 10201 - DNA, 1119 bp, Homo sapiens
tgtggtggctcaagcctataatgccagcactttgggaggccaaggcaggaggattgtttgaagccaggagtttgagaccaggctggacgacaaagtgagaccatgttgctattaaaaaaaaaaattagctgagcatggtgtcatgcatctgtaaccccagctacttgggagactgagatgggagcatcacttgagcccaggaactggaggctgcagggagctaggatcacatcactgtgctccaatttgggcaacagagtgagaccctttcttaaataaatatacttagaaatcacattaatatatctattttgttttataaacagcttagttcttttagtgtgttttgttgccattgtcttgaattttaaaagcctaaatgaatcccaaaatttgcttctctttattttctttttgtagcttgagtttgtcatttatgtatcaaagatttttaactaatattttgttttttctcaactctttaaaaaaatttaaaacagcccagcggtctgctcaagaacttcctcatattgagaagtacagtatcaacagttgttctgtaaatggaggtcatgaaatggttgtgactggatctaattttcttccagaatccaaaatcatttttcttgaaaaaggacaaggtaagtaatatatgagttgattgacttcaaactaaggggcaaagggtaaaataaattatttagatgtttctgtaacaaaaattacaaagtagttttcataaagctatgggtgtcattttgcacttgattttattttaaaccaaacatttattaaattttcatataaatgttaaattatctttaaggagctgggcatggtggcatgtgcctgtagttccagctactcagaaggctgaggcaggaggatcacttaggcccagaagttctaggttacagtgagctctgattgtggcacttcactcctcagcctgggcaacagagtgaaaccttgtttctaaataataatgtaataataataatttaagatgtctgaaaagtagaattcccccagcaactctactcctaagtgtttacttgaaagggttagaaatacgtgtccgtacatgaacttagagacaaatatttatagcaactttat

SEQ ID NO: 10202 - DNA, 1109 bp, Homo sapiens
gagcaggcttcagacactgcctttatctttacagaaagccatgggaagggaaatgtctgaggtagagctcagcgttgggcatcatatggctaatcactcagaggtcactaatcactctcccttttcttgtttttcagtgaacgagataattgggagagacatgtcccagatttctgtttcccaaggagcaggggtgagcaggcaggctcccctcccgagtcctgagtccctggatttaggaagatctgatgggctctaacagtgcttactgcagccttgtgtccaccaccaacttctcagcatgtttctctccttggaccttgggtttccaactctgcagccttcaggtctggggccaggagtgggacccaccatttgtggggaaagtagcattcctccacctcaggccttgggtagatttggcaaaagaacaggagcagcataggctgtttgagctttggggaaatgaactttgctttttatatttaactaggatacttttatatgatgggtgctttgagtgtgaatgcagcaggctctcttgtttccgaggtgctgcttttgcaggtgacctggttacttagctaggattggtgatttgtactgctttatggtcatttgaagggccctttagtttttatgataatttttaaaataggaacttttgataagaccttctagaagcaaaaaaaaaaaaaaaaaaaaaaaaaagaaaaaaaaagaaaagaaaaaaagaaaaagaaaaaaatatcccaagcccacacctatgcctcagaaagtcagcatgtgtcctgaagacgttcatagatttataggaaataaagccaaatgtagctcatacctctttataaaactaaactgttgttagataaaatgagaagagaccattccatcattgaagtgttggaatataaaaagacattccagagcatagccttttggtaactttctaggtaatcttgcaatctctccatactggctccatgttgaaattgctttttccctcaggaccctgggtaagatggctacatttaaggtgactctgaatggtggggttctagcttggtcactttcatttcttgccatcataaaaactagtaggctgtgga

SEQ ID NO: 10203 - DNA, 2163 bp, Homo sapiens
taggcagctttgcagttctaactctagctagaggccaggctgtgtgcagagctaaagcacaaatgagcagtacatcagcatgggcagagaaaatacaggactccagatgggaaggttttaagagtcacactggcatggaaggcttatctgccattctatttatagcctgaaatgattctggcctaccctgtcctgtctgtatgatctaaaaaccagccttttccccagaaggctctgagcacatccagaagtgataacctgaccctccacaccaaagacaccctggtgctgctgctggtgagactggtgtccaaggcagggcccagcagaaactgcagcctgctgtctaccaaaggaggtacccgagttgggtactttaaaaaaaaaaaaaacctgcccttacccctctccctaatgggattttttttacctgttcctgggcccattacagagcctctgaagtttgcagtatgctttcaaatgaaataatatacttccattgattcaggaagcagattttttgagtgcctatatgtgagacagtgtgctggttgaaggcctgatgctgttattccaggagactgcaggcccttgatgccaggactctctctactaaggccagttcaggtctgggaaagggagctggcctattgcccaccacctgttgtcagtaggttaggagctgttgactcaggatgaggaagtatggtctttaaaaaaaacaaaatatattttagatttctcccctaaagttagttagagaaaaaggtctattcttcagcagatcactgtggcccctcttggagctgggtgttttcaaattttcttgaaaagtgagttgtgtcacagaatgtggatagtgagatttgcttctgggcctgtggttggacgcccacagcttcctttggaggggcaagaagttggcctctcggttgacattccagagaaatggccagacttgcccctacccttttgcccctggtgtagctgcctcacatgaggttattgcaagagttccccttgcaataccctttgtgccctcaagaattaaaagcctctatgatccagagttgctatgcaccaaattttgatgccttctaaataccttgatgcctgtagcactagaaatgctttcctatttaaaataaacattaaattttaaaatagagctttgtatactatgtaagcagttttatatcagctttgtaaaagctttggtgttaagagtcaatattttttggctttgtagataaagacttaaatttttgtgcaacatagtggtgttaaagcacacatccattggactatgcaaatcaatttctactagcagcactgagcaactgggcacgtgctagtacgcaccccctcctactctaactgtgctagctcttgggttgaggaatggaatgggtagccttctgcttactggagatgcacagagaaacatggctgaaaacagctttaaaaagaacatgtctttgggttcatgtgtggtgctgctgcccgggtgtaaactatccccacccagggccagccattatcaccagacctcttctgggcctggctgtgaagccctgtttttggtattcagaatggatctttaaggctcagatgggctcaaattgaaaccttgtgttttataaaatggatgtttagtaaaggaactggttctcagttatgtttacagcacttggaattgtgtgttcttgtacattttgtattttaaaaccttttatgggagtgcagtgctccttacacaaatacaaagggaagaagagccagcagttgaggctcctcagttttagtgctgaaataataaacagtgacaggtcaacagtatccttaatctgtctgagtgttcctccgcctggggttggtgtggagcccctcactttggggcaaagttaagggtcctgtgtcttttaaaaagtccatttggtcaataacttttcatttaaggaagagaagatcgagttccaaattgcttccgaggcttcagttctgtaccatttaatgcgtgcaaaggacattccatggtgtctgctgggttcagggcaactggctttcccaaggcatacaagaaaagttggcagaaagtcctcccctttaaaattcaagcctgaaggttttgtgtgggggcctactgccccctaatgtcttctg

SEQ ID NO: 10204 - DNA, 1162 bp, Homo sapiens
tatctccacagaatgagctatttggttttaaatcctttgttgataatttgtaatgaaaagattattgaagtttaaacacatttgaccttgtcccaggaccctaggccctaatccttgccttctaggattcttttgttccagaagctaatgctgtcttatgtctggatggatccattttgctagtttccaggtccaacacctgacttcagaggcctgaaatgctacaatttctccctctggctcaaaattcttccatggggagagagttagattccattatttattgacattatttagtccagatgggtagggatccaattgctagttagcatttctcaggcctgaggacagtgagatggttctgaaggcgtttcccccatttgtatgccaggcagtcgggacccaggtctaacccctctctaggacaccgtgtaatccatgttaaggttgctgcactgaagtgaggagggcctcagcgtctgcctttttctaaagtgcttgcaacaagggggaggcattgagtggaggaagggctgcaacagaagggggaaagatgctaccctgagggttaatgtacctcagggtacatcaaggaatggacctatctgatgccaaggggtcaatgaaaagagccagaggtaatctggtgaagtggcatcagatctagtactgactgctgggtgggggagtctcctgggggcgcaggtggtgacgatgctcacctgtctccccacccctttcccacagtgcaccatggcactcatctacctcatcgtggaggatgttttccagcttatcaactacttcagcttcagctactggttcttcgtgggcctgtctgttgttggacagctctacctccgctggaaggagcccaagcggccccggcctctcaaggtcagcagctctggccagactaggaggggtgggccatctccctaaggtggcttcttgcccacgagctgtttcctcttcccacgttacttaatctctcaccccctctatttcagctgagcgtgtttttccccatcgtgttctgcatatgctccgtgtttctggtgatagtgcccctcttcactgacaccattaattccctcattggcatcgggattgccctttctggagtccctttctacttcatgggtgtttacctgccagagtc

SEQ ID NO: 10205 - DNA, 1106 bp, Homo sapiens
cccctgagccactctggcagattgctgctcttggccacattgtgtcttcctaaagccagcagggttcccgcaaacttttgggccactggcctctgagtttagagtttatttatctccttggccacaatagccagctgtagtctacattgtggacgtcctgaaaactggcagttctctggcatttggctcctggattagaagcattgctcatactgcagctcgttgacagctgactctgttctccgtttcagtggcgggaccactggatgcagtgtgtgtacttcctgccacaagaggagcctgtggtgcagggctcagcgctctatctggtagcccaccacgatgactactgcgtatggtacagcctgcagaggaccaggtacgtcgagcctcgtgggggtggaggatgagcctctgagacttgtatgtaaattccccatttacagatcctctggaggtgccagtgggttgatttgtgtctggacagaataacataagaacaaagatttgtgaccagtgtgtcagtgcccattcgtgtgtacccaggagaggctgtcatgggttgctggaatctgtttagagcagatgcgtaggaaaagtctggaattagcgggtgctctaagccctcatgcctactggagaccagtgtccagattcatgccctctggagacctgtggaggcgctcacagcccacgtctgtttgttcatctcctggcctagccctgaaaagaatgagagagtccgccagatgcgccccgtgtgtgactgccaggctcacctgctctggaaccggcctcggtttggagagatcaatgaccaggacagaactgatcgatacgtccaggctctgaggaccgtaagtgtccagccccttggcttgttgtggggaaaagggagaaagaagtttgtcccatgaaccccagcactttgcttatgatttgctgtttctttcctgtgtcctcttgtctatgagtggcttcagcgagcgcctcctgggtgggcactggagcagaaagcgggagagcctggggctggacttcctgagggcttgctctctgctctactgggagagcctctggctgggctcctgctggacacctttgcc

SEQ ID NO: 10206 - DNA, 1211 bp, Homo sapiens
gcccttaccccctggcctgtgttgcactgagcacttgctgtctgctggtccctgagtgaatgaattctgcatgaataacgcattctttcatttctacctccaaaacctttaggggaggggagagaggggctcacagagaggaaatggaggcttgcagctggcaagaggcaggacccgccgctcctaactacctgttctctgttgccgcagaacctgaaggcggctaacacagaccccacagccccgccctacgacaccctcttggtgttcgactatgagggcagcggctccgacgccgcgtccctgagctccctcacctcctccgcctccgaccaagaccaagattacgattatctgaacgagtggggcagccgcttcaagaagctggcagacatgtacggtggcggggaggacgactaggcggcctgcctgcagggctggggaccaaacgtcaggccacagagcatctccaaggggtctcagttcccccttcagctgaggacttcggagcttgtcaggaagtggccgtagcaacttggcggagacaggctatgagtctgacgttagagtggtggcttccttagcctttcaggatggaggaatgtgggcagtttgacttcagcactgaaaacctctccacctgggccagggttgcctcagaggccaagtttccagaagcctcttacctgccgtaaaatgctcaaccctgtgtcctgggcctgggcctgctgtgactgacctacagtggactttctctctggaatggaaccttcttaggcctcctggtgcaacttaatttttttttttaatgctatcttcaaaacgttagagaaagttcttcaaaagtgcagcccagagctgctgggcccactggccgtcctgcatttctggtttccagaccccaatgcctcccattcggatggatctctgcgtttttatactgagtgtgcctaggttgccccttattttttattttccctgttgcgttgctatagatgaagggtgaggacaatcgtgtatatgtactagaacttttttattaaagaaacttttcccagaggtgcctggggagtgaactgttttctaaatagaaggtttattggcatctaactcacataccataccattcacttgtttaacgtttacaattcaatggtttttagaattttcagagttctgcaaaaagagtgggctctgtttaccctgctggc

SEQ ID NO: 10207 - DNA, 1232 bp, Homo sapiens
tgtctctctacaaaaaggcaaaagaaaaaaaaattagcctggcgtggtggtgtgcacctgtactcccagctactagagaggctggggccagaggaccgcttgagcccaggagttcgaggctgcagtgagctgtgatcgcaccactgcactccagcttgggtgaaagagtgagaccccatctccaaaacgaacaaacaaaaaatcccaaaaaacaaaagaactcagccaagtgtaaaagccctttctgatcccaggtcttagtgagccaccggcggggctgggattcgaacccagtggaatcagaaccgtgcaggtcccataacccacctagaccctagcaactccaggctagagggtcaccgcgtctatgcgaggccgggtgggcgggccgtcagctccgccctggggaggggtccgcgctgctgattggctgtggccggcaggtgaaccctcagccaatcagcggtacggggggcggtgcctccggggctcacctggctgcagccacgcaccccctctcagtggcgtcggaactgcaaagcacctgtgagcttgcggaagtcagttcagactccagcccgctccagcccggcccgacccgaccgcacccggcgcctgccctcgctcggcgtccccggccagccatgggcccttggagccgcagcctctcggcgctgctgctgctgctgcaggtaccccggatcccctgacttgcgagggacgcattcgggccgcaagctccgcgccccagccctgcgccccttcctctcccgtcgtcaccgcttcccttcttccaagaaagttcgggtcctgaggagcggagcggcctggaagcctcgcgcgctccggaccccccagtgatgggagtggggggtgggtggtgaggggcgagcgcggctttcctgccccctccagcgcagaccgaggcgggggcgtctggccgcggagtccgcggggtgggctcgcgcgggcggtgggggcgtgaagcggggtgtagggggtggggtgtggagaaggggtgccctggtgcaagtcgagggggagccaggagtcgtggggacgatcttcgagggaaggagaggggcatccgtagaaataaaggcacctgccatgccaagaaaggtcgtaaataggagtgagggtcccggggataagaaagtgaggtcggaggaggtgggagcgcccctcgctctgaggagtggtgcattcccggtctaaggaaagtggggtac

SEQ ID NO: 10208 - DNA, 1329 bp, Homo sapiens
gctgggattacaggagggagccactgcacccggcctacaagaggtcatttgtttttgttttggatttttgtttttttgagaccgagtctacctgtgtcactcaagctggaatgcagtggtacaatcttagctcactgcagcctggaccttctgggcccaagcgacactcccaccccatcttcctgagtagctgagactaaaggcgcaggccaccacacccagttaatttttgtattttttgtagaaacaagatcttgctatgttgcccaggctggtcttgaaatcttgagctcaagcaatctgcccacctcggcctcccaaagtgctgagattacatgaaccactatgcctggccaggaagtcatatattgatgccaaattcagaaatatctgggggaaatgctagactaaaaggaccagagcaagtttcacccggcatggaataagagtttttcaggcccgcatcttcatctctaggcctgatgccctggtcctcgtgtgggaaatgggaggtctgagccgtggggggtgttctccagcccatggctcttaccttgttataatctcactgaagcagcagcagcacatgtgtgagaaaagtcacccactgggggtctcagagcctaggaaggtgtggcagccaggggggcgcactctgctctggctgggccccttctcccatgttttcttcctcatcagagctcaagtcaccctcacttggttctttcagctcttctctcacgctgtgtcatccaacgggaatgcagttgaggatccaatggagattttgatcacggtaaccgatcagaatgacaacaagcccgaattcacccaggaggtctttaaggggtctgtcatggaaggtgctcttccaggtatatccactaatgagaatctgaatactcagaaagactcttaggttctttggaccccaaagtgttgtccaagcccaaaggttgtgtaactaaagctgatccttcctacggacagaacttcttggcaagccattgttgtgttatatgcatgtgtgtaacagtctacctgtggaaacatataaaatagggagagtttaagaacaatcttcccttttttattattaattttttttttttttaggctgggcatggtggctcatgcctgtaatcccagcactttgggaggccaaggtggatgggtcacctgtgctcaggagttcaagaccagcctgaccaacatggtgaaacctcgtctctattaaaaatacaaaaaaattagccggtcgtggtggcgggggcctgtaatcccagctacttgggaggctgaggcaggagaattgcttgaacccgggag

SEQ ID NO: 10209 - DNA, 2050 bp, Homo sapiens
ataaatgtacgttgttggtgttcactgctccgtggtgtgccacaagtctgggtgcattgtcgtaccttacatattgctagacttcttgccccagatgacaggtgtgcccttcctttcactaaaagatgcttttgtcccttcttctttagaatctgaaagcggctgatactgaccccacagccccgccttatgattctctgctcgtgtttgactatgaaggaagcggttccgaagctgctagtctgagctccctgaactcctcagagtcagacaaagaccaggactatgactacttgaacgaatggggcaatcgcttcaagaagctggctgacatgtacggaggcggcgaggacgactaggggactcgagagaggcgggccccagacccatgtgctgggaaatgcagaaatcacgttgctggtggtttttcagctcccttcccttgagatgagtttctggggaaaaaaaagagactggttagtgatgcagttagtatagctttatactctctccactttatagctctaataagtttgtgttagaaaagtttcgacttatttcttaaagcttttttttttttcccatcactctttacatggtggtgatgtccaaaagatacccaaattttaatattccagaagaacaactttagcatcagaaggttcacccagcaccttgcagattttcttaaggaattttgtctcacttttaaaaagaaggggagaagtcagctactctagttctgttgttttgtgtatataattttttaaaaaaaatttgtgtgcttctgctcattactacactggtgtgtccctctgccttttttttttttttaagacagggtctcattctatcggccaggctggagtgcagtggtgcaatcacagctcactgcagccttgtcctcccaggctcaagctatccttgcacctcagcctcccaagtagctgggaccacaggcatgcaccactacgcatgactaattttttaaatatttgagacggggtctccctgtgttacccaggctggtctcaaactcctgggctcaagtgatcctcccatcttggcctcccagagtattgggattacagacatgagccactgcacctgcccagctccccaactccctgccattttttaagagacagtttcgctccatcgcccaggcctgggatgcagtgatgtgatcatagctcactgtaacctcaaactctggggctcaagcagttctcccaccagcctcctttttatttttttgtacagatggggtcttgctatgttgcccaagctggtcttaaactcctggcctcaagcaatccttctgccttggccccccaaagtgctgggattgtgggcatgagctgctgtgcccagcctccatgttttaatatcaactctcactcctgaattcagttgctttgcccaagataggagttctctgatgcagaaattattgggctcttttagggtaagaagtttgtgtctttgtctggccacatcttgactaggtattgtctactctgaagacctttaatggcttccctctttcatctcctgagtatgtaacttgcaatgggcagctatccagtgacttgttctgagtaagtgtgttcattaatgtttatttagctctgaagcaagagtgatatactccaggacttagaatagtgcctaaagtgctgcagccaaagacagagcggaactatgaaaagtgggcttggagatggcaggagagcttgtcattgagcctggcaatttagcaaactgatgctgaggatgattgaggtgggtctacctcatctctgaaaattctggaaggaatggaggagtctcaacatgtgtttctgacacaagatccgtggtttgtactcaaagcccagaatccccaagtgcctgcttttgatgatgtctacagaaaatgctggctgagctgaacacatttgcccaattccaggtgtgcacagaaaaccgagaatattcaaaattccaaatttttttcttaggagcaagaagaaaatgtggccctaaagggggttagttgaggggtagg

SEQ ID NO: 10210 - DNA, 1136 bp, Homo sapiens
cttgagtgcagtggcacaatctcggctcactgcaacctccgcctcccgggttcaagcgattctcctgcctcagcctcgtgagtagctgggactacaggcctgccccaccacacccggctaacttcttatatttttagtagagatggggtttcaccatattggccaggttgatttcaaactcgtgactttgtgatccgcctgccttggcctcccaaaatactgggattacagttgtgagccaccacacctggcctaaaatgaaaattctaagtgataatgtgctataggtaattggcaacgttggtgttttttcttagtgatacataaaataacaatgcatgtttataatcagtggcatcatatattccatgaaatgtgtatgaattgtgtattgttcaatgataaccattttctgatcttaggtgttacttactgagccatctttctagtaaagcttccttccttagctttagtatgtcctattcagtgaggcactaaatatgggtaattttgtgtgtttattttctagagctttcagagagtgacatggtaccaggaactattttggtgacagaagaagaacttagtagatgcattgaggatgtgtttaaggttggtaatctgagtcactaatgtttttatttacttcttatttaaaattttttttaaattttttctttttttgtagagatggtggggtctcaccacgttgcccagtctggtcttgaactcctggcctcaagcgatcctccttccttagcctcccaaagtgctgggattacaggtgtgagccgctgctcccagccttttaaaataattttaccttttaattagcacttgaaccgttggaatgactaatctaaagctccaagctgtctggttttcactttgaaaaccagaaactgtaagctgacgttttttgtcttttgttgttgttgcttttcctttttgtggagaatgaggtctcactatattgcccaggtaggtctcgaactcctgggctcaagctatcctcttgcctctgcctccctaagagctgggattacaggcgcgagccactgcgcctggcaagctgacctttttaagtgaaaaaactgatatatttttgaaaccctgttaattacatcatttattct

SEQ ID NO: 10211 - DNA, 1183 bp, Homo sapiens
actcaagtcctcacagcactgtcatgttctcatcagagactgacaaggaacatgtgaacgatgatttagttcctcttctagttgattggcacagatgaaaggggttgaggaatcagcaatattttgttggtatgctgtttcttggtctccagctgttggtcttgctgagagtagatgatttttatccgtgtatactttctttgacagtgcctgatgcaaaggcagtagtacacttggaattaccaaaaaaaaaaaaaaaaaaaatcacgtggggctcatgtggcaaatcagggttgctgccagagccaaggattagtcagtcactcattgaatttcaggatatttgcattctgaaattcacaagaagcatactttccattcctgcatttcagtagtactaggagattgtgccagcatttaaaatgcagtggaacctgacagcctttctttctttttttatgttagcttgttagatgcatggagtaagatgacaagctcattcataactgctttttctgccaggtcactttgccaagaaatcttattatggattctggggaagctggaaaggaagaaggcaattgccagcctgaaaggatttgcagggttggacaaagctgtgccctctctccattctctgtgtcagtttagagttgccactcaaggtggcattatgattaccatcaaagaggccattaggtgagtccacccatccgttactgttctcttcagatttagttccgcccaaaaggccattcagtgattcaaccactaaggggcgctgatagaaaagaaaccagaaactcaagtggctcaggtgcctgctatttatattctctaaatgaaacgtgagccttaaataatcctccaggttttttcctaagatgcctgctaatagttggtgcaatttactggagcctcacagctctgcatcacaacaagcccacttactccaccatctttgccagttaatcagagtaaagggcagacacatgttcacccttaacaccataataatccaattatctttctgactctcaaaatggtatatgtgtgtgtttatagtcagacttattcctgagggaaattgtctaatagctatcttttatggtaattttatgatggaaatttgtttctcatagggattgattagaaagtgcttaataaatattagtggaatgga

SEQ ID NO: 10212 - DNA, 1236 bp, Homo sapiens
cacccctaaaaaggttgctgagtatggggctgggctcagattatgataacactgttccaggctacacatttagaaggcgctgctgtggataggagagaggatcagcaagtcctacgaaggggggactcagggtcagggtcttccctatttctgttgattaggaaactcagccatgagcttagatctaatattgatcatgtccaggatgctctgaaaatgtttccttgtggaaactgctcccatcactggcagttccacagagggaaattatacaggaatggagaactgcagcaaaggcaggaggcattgcctggatcatagaacgtcagtgctgggagtgaccttagagatcgtatcaggctgggactagacaaacacaggagtctcaactaccaggcccatcttcgttccactcactatgctgactctccaaacaataggcagcccttgctgggagagctttagagatggttttcagcatctctgcgttcatcccatcacagggtgactggtttatttgccttttgatcgtaaacagtaatgaatcctttctttttgttttcaaccccaggggttgccctgctgtcagacgtctatcctgagaaaatcttgccggacttgttggctcaatatgacagcagcaaagacaagcacacaccagagaccagaatgaaagtcggggaagtccttatgcgaatcgtcagggcattaggtgagttttcttgttccatccacctggaaaagggtggaggatcagtgtgactttgaaaccaaaatgtgtgtacctgggggcttgttacactagtgtggtgagggtagtttgagggctgggatgtacccatttaggaatttaggaaatattccgatgtctactatgagactgaaagcaacaatgtcctttttcttaaacctgcttagtctctcgccaggtgcggtggctcctgcctgtaatcccagcactttgggaggccgaggcaggtggatcacctgaggtcaggagttcaagaccagcctggtccacatggtgaaaccctgtctctactaaaaatacaaaaattagctgggcgtggtggtgtacgcctgtaatcccactactcgggaggttaagtcaggagaatcgcttgaacctgggaggcagaggttgtggtgagtcgagatcgcgccactgtgctccagcctgggcgacaaaatgagattccatctcaaaaataacaacaacaaaaaaaactgcttagt

SEQ ID NO: 10213 - DNA, 1577 bp, Homo sapiens
cacttgggtcttcagggtcccttccgagggcatgtgttcagcactcccgcgttcagcctgaggggtgtacagttaagagaagacagttacagatctcattaatctacatttttcactgtcctctagcattgaaagaaggatgtctacctggtgaaagtatattttaacatgactgatggaatttcactaattgcccactctcttggaacttgaggagaagcggttggccacccatatgtcacctagctctatattctttcaggctgagattcttcttcaggaaaatgaggagcagaactggccacccttggctgctcaagaggcatttcagagtaggagatgcagttggaggtggggaggggaaggaaatagttatcaaataatgcaaaatggaataaagttatcttggatggaaagaacagggctaaatctggtcctctggtgtcgagatggaaaactgtggagttgaagaggctctgatgcccagaaaggacaatcaagctggttgactcttccagagaagaagggtaagccctgtatttatcctcccaggccattcttcttcactcctgctgctgtttgcagagagttgccctgattatcaggagaaaagaaccacgagcatccagagagtttacatcctgccttctgtcctctgctccttcagaaagatgaatgcctagacaatgggttcacactgaatgcaggctggaaagaatgcatgctggtggcctaatgccagggctgttgaaacaatttcagatatagcactgtggtctccactttatttctttatatgttttggccgctgcattttgattgcagctaaaagagataacagaaaggagatactggctggctgcttcatattagccctctctgttgtcaacaccttgatgaggccaacccagagatgcttgatcagtcctcagctttgcagggctaggtacagaattttatcacaggattttatcacgctctctggggtgactagatccacaggaaccaaaacgcagtttccaaaagctcgagtgactgaaggatctatacacaaacatggctatttgctagttaacaacaggatatttctctctggccagatcacagacatggttctgagtcagatcttccttggtggcatccctttaaagaggccatcttatgaacaggatcacaagtgagcttagtgagcagagagttagaacaaatctagctaggtgtgtttaaggaatatttccattcagctagtgtagctggattaatttctattctccaaatcaaggatgtctagaaaatgggcattgtggctttcaaatctaagaagaatctcctttgggccagctggatgtacaataaaaatgcttgtttcttggccttcctttaactagactccacgcaacccacttcagaccagcagatcgaatgtgttgcacaatccattttacttacaacttcatttgcattaaccgcattccagttctgaggacagatcctgattgaccaccttgattagtctaagacactatctagtccaaaatcctcgagtgcctcatgaagcatcctagtacctttatctc

SEQ ID NO: 10214 - DNA, 1234 bp, Homo sapiens
ttcttcaaagccacattttttgaggtatcactgcagtcacctcttctaccctcatcatcataggtaaggttttcaaggtggcaattggggcggagccccggctcttatagaagcttcagcaggaggcaagcgtgttctcagcacatatgggaactatgaggagcctctgatcaaattggctacaatcttggagctgcttggacggattccttggcagccgggttagcatgtgtgactttcaggctactgttcttgacaatcatctccaatggaaagcttttcagtgttcccaaagtgaactctcaaatccaaaatggttatctttgagaccatccattctcctcagtggcttctccagggaattcttacagccaagttgtgacagtcactgcatttgcctgcttctttccagaaaccaaactaggagatgaaactggttcctacatcctaaggttcttgctttctctctcatgcctcctgaggctgtttttggctgttttccctctgctgcttttggggaatgaggggaagccattttccagtgacttgcaatccaggctgttctcagcgttttgagtttaaaacctgggatcctgactaagcctttgacttaagggttgcttgcttgccctccaaatgtcctttctcagaggggccagctaacccgtgcagaaccagcactaaggtggacagcagacaagagggcaagcctctagtgtaccaagtgcttcctacaaagacgcaaggtgtgctctgagccacagatgggcaaaccctggtgctttccttcatctcccacgaactcaagggttttccaggtgtagctaacagttgccacatcacacagacctcgagtttctggtaagactgctggttgacatcagacccaacccatgaaggctggaaggcagcaggcatttgctaaggcagctgatccaggcaatcgttctgctggccaagaagttaaactattttgagcattagaatggaggaaatccggtcagccaagtgcagagttcagacttcgctaagggcttgtttttcttcagcatttacttgaagattaatgtaggatgacaggctctcctggctgtcctaccatcagctctgccttgcactgtggtcgtcaactttcctcaaatcaaaaacaggcaggtacaggtagtgggctcacaacgtttgacctcgactggtttttctaagttattttgtacatttttcagcagcaaaacca

SEQ ID NO: 10215 - DNA, 1572 bp, Homo sapiens
tctcaaggccagttggccccatgggggtaaatgccaatccctttcccaggggagcaggttcatctgccttttctcagtcttctggcacattggcatcaaacccagctaccttccaaaggtccgctggcctccagggctcaaatccaaccattttcccaagagcctctgggccacttggccccaacccagctaacttcccaagggccactggcctgcagggtccaagtccaactaccttcccaaggtctactggcccattaggccctggtcaagttactttccccaggccagctgccgggcatctgggcccttctccagctggccctgtgggtatcaacccagctcctttcacaaggccaactgggaccctgggtctcaacccagcttcctttccaaggatgaatggccctgcaggcaagagtttcgtcccatttcctagagtggggagcctccctggcacaaacccagctgctttccccagaccagggggtccaatggctgcaatgtacccaaatggaatgttgcccccttaaacaccattttccctccaggaccaccttggtttctaggcactgtggttcttggcaggggctgtcttaggtaaaagggtagttgtggagctacagtctgaagaacatagcttgggctcaagttcaaatgagccatctttttcctttgcgtttttcttgactgaaggtgagatgttatttgtggcatgtgaactgtggcaggtgggaataatcctgcccttgagagaaaggatctccagcctcccagaagcctgctgtgctttcgtcccacagctttctgcccattgtttcttactagtttcttgaattgttcttgtggacttttcctcagggatacattggcctgcaggtcccagttcacatgtagtcccctgctcaccattggagaatcagctcactgctctctagaaacgtggcgttggtgaacggaccatgcttccgtagctctgacctgggcagcttggacctggtcatcctctactgccatacctttccctgggggcttgaacacagaacagggagatggacaaccacttcaaagaaagacccaccgaatgcagtttctgcttgactgactgggcctgcagctcccttctcctgggacttagaggtggccagatttaaggcccctctactcatccaactccctcttcactggtactcccaatcaatcaaagaacctcaaaatttaaactgatgtggatgggaatatgggaattagggtgggggtgggggatgaagggaagaaatcactgtgctttgttcggcctggtgtgcaaggatggttggtggttttcctgcattgtatcttttcttactgtttctttaataaatgggatgagagggctgctggtgtcactgtgttttgttacctgtttcatagggaaggaagtttcctctgcttttcattgtttcagcttggctacagtcttacatcatgtcggctaaaatgcttttgctccaagaggaagcaagctttggtttttagtcttagcaagggcccattcatctgccagttagttatttcaccaaagaccctcta

SEQ ID NO: 10216 - DNA, 1244 bp, Homo sapiens
gtttgttattcaaggcctagctaatctgcgatgctctctgcttgttctccccctacctctgcagtagcagggaaatttaattttggggaatctggaaagctcacatttctgaaagtggaaattctcctatgtggggctagaaagtaaaaagggcacatgggtgggtggtccagtgtggctgctcaacaatggcagagccagaccagggattggaggtgccagcatagcctgccaagagcagctttaggaggcgcctgagtgttatggccttgccccggaacctcaggaatctcgttcttgttctgccaaagggaatccctgtgctgatcgtggggcatcatatcctgtatgggaaaatcatccacctggagaaaccttttgcagtccttgtcaaacacactcctggggatcaggactgtgatgagcttggccgcgagactggcacccggtacctggtgacagcactcatcaaagacaagatccttttcaaaacccgccccaagcccattatcaccagcgtccccaagaaagtatgaaagaacctcggattttccctagagagcggccaactccttggactcgtgctccgctgccacctcgaggacggctcgacggttccctgggaccacaggggggtcctgttctgaacacaggccacccactgggtgtgaactcggatcccttccttatggcggccggttctcttggtggaaatctgaccccatttccaaggaacccatctccttttccagcttcatcaggctcattggcttcaaatccagcacctttcccggctggtgctcgtgacccaagtatggcttcttttccaagagggatgaatcccactggcacaggtgcagtttctttcccaaggcctggtggcctcttggggccaggcccaggcccaggccccaccctaaaccctaggacaggggctctgccaggcccagggcctctgtctaaccccaggttagggggtctcccaggaccaggtcctatgtccaacccaagggcaggtggtctcctgggagcaggtcctgaccccagaggtggtggtcccatgggccctggatctggacctaacctgagagccggtgttctgttaacctctgggaatggtcctcccaatcctaggccagttggcctgggcccaggaccaaaccccaatctgagatcaggctttttagggacaaaccctgcccccaggtcaggtgtgtttccaggcccaggccttgggcccaacc

SEQ ID NO: 10217 - DNA, 1144 bp, Homo sapiens
tgttctgaattcctgttcagaacaggagactgtccaggaaatggagaatgcactgaaaatatttcggcatttttctcaagcacatggtcacagtgcttaacgattgattttggttgtcaggaagtaggctctgtctccttccctgccttgatcttcctagaatataccgtgtacctatgtgaacaccttattgcttctctaaaaccacctgtattttactgtcacttgtacccatccaggaaaatatactacatcatcttcaaaagcatatttgcaagagccccttctctgtgtgcattattgagcctttttttgattcgtggctaaaatgtaccattccttaaattgtcaaaattatgggtcagaatgctgattttcttatctcactgtctcaaaaaacttagttcatctcaatagaacttggggtctttaaagcacctcagcagatgttatatttggtctttgcaatagtttcataggacataatctaggtgtcatagtcacaaagtgacttgttcttgactacacagtaaagaggtccacacttacaggcaggagagctaaatttaggccttctgattttaaattgttatccttcttcaagaaaccttataaaaggatttttaaagtgcttttagttctgttgagagtagtggtggggcctcttttggaaatgtttgggttctgagcttgggtattaccccttttccagtggtcccacaatctgtgctggtgcagaaggtctgactcaattcaaggatgctctcttgattccatattgcccttctgaccagctattgcatatactccatgcctgcctgatgccttgattctttttcgttctcattaatactttttttcctttgggaaggcagaattgtgtagtgattatgagtgtagatagtcagatggcccagatttctactctgtcacatagcagctgtgtgtgtccaacatacaagcaagtgacttcatctgtgtgtgcctcagtagcctgatctgcaaaataggaataaatacctatatcatagacttgtgatgatggttgaatgagaaaccaccaatatatatgcacagtaaaaattccacagtaaaaattcaaaacatgttagctgctacttatatttgaatttaaaaagtctag

SEQ ID NO: 10218 - DNA, 1212 bp, Homo sapiens
tttcgtcaagcaggtctaagcataaaatgccttgatagctacgaaaacttttgggttgggtgcagtggctcacgcctataatcccaggactttgggaggccaaggctcactgcagcctccgcctcccaggctcaaacaatcctcccccgtcagcctccgtagtagctgggactataagtgtgtgccaccacacccggctactttttatattttttgtagagacagtgtctcactctgtcgtccaggctggaatgcagttcaaaccttttctgctgaaaatgttttgccgaactagtcctagtaaaagaaacaaatttaactgtataaaagtaattagaatttgagctgaaaaaatgaaaatgtcattaggcatgatctgatagcacaaaaccccacactagttatttatggggaagttgtttttaccatgttgcctgtgaccactcagtaccggtacctgatgaatttgtggtaatgttgagaagttatggtgtttctgcagtttttcccaggtcatgagtctcgggctacagaagctttgtgctgggcagaaggacagcgactctttagtgctgggctcaatggcgagattatggagtatgatttacaggcgttaaacatcaagtatgctatggatgcctttggaggacctatttggagcatggctgccagccccagtggctctcaacttttggttagtaagcaactattggtaattcaaaccaaaatttctctcgtgcctgctcagactttcttccctgtgctcataggagagtaacgatatattatggcatgtggcaaccccaactataagattggaattgatagtgaagattttaaaaatccccagcattctttttgctactagtctggaccttgttgattcatttatgaaatgagaggattacatcagttcaacatttcccaaactgtgttctgtggaatttggagatgtagaggtttttttgttttggtttgttttgtgttttatggtaaatttcatttcacaaatacagcatatttaatcctgctgtaaattcacaatgcacatcggtacatgaagagttctgagagtcccttcagcaagttaacctgtgcacttgtgtttcagcccagtgtttctcaaaaatatgaccacacactgagccccttcccataattaccattagagtgggtgcttccagatctttaattctgtgatgagtctgatta

SEQ ID NO: 10219 - DNA, 1238 bp, Homo sapiens
ttttgcatcttcgtttattaagttgtctgtatatggtagtgaggtagtgatgcttagtgtcctttctccacagaccatggacctgcactcttgtccgaagccgattgtatttgtgttgcacacgtttttatcggccaaagtcactcgtatgggactgcttgtatgagcaacaaaaaatcagaaaagagccttgactgtcacaagaaatatttccacctcaaaaaaaaaaaagcacaaaaagaaactctttgctctccttcagcacagtgccttcccaaggacctgcaaataactgctgaaccataaccgtgtttaaagaagagcctacctttcacagtctaccttggccagatattctagcactctaaaaggctccaaaatgaagctgttgatttattctcatttcaaaatatggtttatgagtaattaggtttatttctactgctaaaaagaatggctcattgttttctttttttttcattgttttcatttttagacataatcaaatacccaagcattgttttctttttcttctccctgtaggatttgtgttgtgcttagccttgatctcttgttcagaacaattgtcccttcccaggtgctagcttgcagcagcctgttgcttcctgagcattccagataggtcgtatgtcttggaatttactgtcctcactagctccttccaccataggaagtccttgaattgtatcaccaaagggttgttccatttgccctggatctccctctatctcagcctggccatcacttcccaccttatcccaagctttgccactgtctctaggacttagaacttgtaaatttgatttgccttgccttctacttcctttctagtggtgactgagttgaaaagcaagttggaagccactgcttttaaagaaaagttttgcttggtttaggtttttccaattttatttttgttaggagccaggggataagatttattttaaatgaaaatcctcttcctaggttaagccattttttttattgcttaccaaatgtgcctttggttagggttagtggagctttattagtcactatttgaataactggaaatcactgccatttccaggagatcacctatcctagttttgaggaatagtcattgaggtgggtttccttaatggcatctcttctagtaggcagatctgtttgaacaagataaatcctaaagagccagcctgcttgaggagtagacttggtgggtgaagccagcaatt

SEQ ID NO: 10220 - DNA, 1211 bp, Homo sapiens
ggagtctcgttctgtctcccaggctggagtgcagtggcatgatctcggctcactgcaacctccacctcctaggttcaagtgattctcctgagtagctggggttatagctacccaccaccacacccagctaatttttgtatttttagtagaggcaggttttcaccatgttggctaggctggtcttgaactcccgacctcaagtgatccacctgccttggcctcccaaagtgctgggattataggtgtgagcccccgtgcctggcccacaataaattttcatttcagagaaggaaaaaaatctcttgaacgtccagaaatgatttctggaatcagaatttcaatatgtaataccctcaggtaggcaatcttgaaccctctatgcagtgagagcattattaatatgagatgttgaatgatgcctttacagacttcagcagcaaagccatttggttgaggttttctgtgttaatgtgaaaagctaagccactgagatttgcaggggagcttctgagccaccctgcttgttggttatatgaggatgtaaaataggtggaattaaaatgtgagcaggaaaggcaaggcatgtgtgcattttcactcattttggtcaaggttaaactgacatgtatagcactgaggtctgtagggttcttaatatcttttgagtcttgctgtgaaatgaaagtgtgggaggtttcctttgtccattagcagccccaagaaccagaacccttttgctgcttttcttacatacctaacagctctccagtcatgatgaccaaggttgttcttcaatcaaatgtgtttgtgggattttcagtccgcaaatgaagtgctctctaatgaatgggacaccatgataaatatgtatttatatttagatgccaaagtatggcaaattatttccaaatgataactacaaatgggaattttcgatattctaccttttttatagaaccagctcacttttcatttctttttcattttgaattaagaaaattgttgaggatgtggtgggttccagtgtgtggaatggaaaggaaactgcagaatagtgtctgctccccattcagagggactgcttcctgtgccccccagacccggggcttcgacagcttctccacattccacacagatgcctaggagcagcgagttggtatatgaaaagtctcccaccttttctcctaaaacttctctcctttctctccata

SEQ ID NO: 10221 - DNA, 1159 bp, Homo sapiens
tgcacaaagtagataaatgagaaagtctttcttaaaaaatgcttctttaactgtaacagcaaaactaaatgcatattttatcaaccccttatttctaattgctgtattcatttccacccttaaactatttaagcatttcatctgctgaaagtccttatatacatggtagacggaatatttctccattaatgatagatcaaaatgaagatatttaaaaattaacaaaatcaggccaaggcaggaggatcactttagcccaggaggtccagaccagcctgggcaacacagcgggaccccgactccatttaaaaaattaaaaaaaaaaaaaaaacttttaacatttaaaaaataaaaattaacaaaatttcacttattccaggacacgctggcatttggactcaatgaaaagggcacctaaagaaaataaggctgactgaatgttttccataattttcacacaataacagtccctttctatccagcttgccttccatttatctctagggttagcttttcaggcaacatccttggtcattgcccagaaagtacctgagctatcagtgattggaatggcacaggaaaccgaatcacatgggtgccctccccttggttttcaagtatcttggagttgtgcacaaaaattaggtcatgccttcagtgtcttgttctttaaacctaccctttgacaatcaggtgctaatgattgtatactattaaaaccagcacataagtattgtaaatgtgtgttcctcctaggttggaagaaatgtctttccttctatctgggtcctgttaaagcgggtgtcagttgtgtcttttcacctcgatttgtgaattaatagaattggggggagaggaaatgatgatgtcaattaagtttcaggtttggcatgatcatcattctcgatgatattctcactttgtcgcaaatctgcccttatcgtaagaacaagtttcagaattttccctccactatacgactccagtattatgtttacaatccattggatgagtgcagcattataagaccttggtgcccagaaaaatctgtcctttttggtaccaaacctgaggtcttttggaagataatgtagaaaaccactacctattgaaggcctgttttggctaatctgtgcaaactctgatgatacctgcttat

SEQ ID NO: 10222 - DNA, 1164 bp, Homo sapiens
ggtgaaaaacatctttgtgcctatgcttgatttgcaggcagctacggaatcctccaaccaccattggaatgatgactctgaaagcagctttcaagactctgtctggtgcacaggattctgaggcagcctttgcaaaactggaccagaaggatctggttcttcctactcaagctctcccagcatcaccagccctcaaaaacaagagacccagaaaagatgaaaacgaaagttcagccccggctgacggtgagggtggctcggaactgcagcccaagaacaagcgcatgacaataagcagattggtcttggaggaggacagccagagtactgagcccagcgcaggcctcaactcctcccaggaggccgcttcagcgccaccatccaagcccaccgttctcaaccaacccctccctggagagaagaatcccaagtatgaagaccttctttgtagaaattttggggctggttggtggtcctggttgggcctggtattacttccgtgaatgaagtaactttcagctaagttactcaccaccaaggcttgctcagactgctagaacttgacgcaggagtggccagtgacgacgtagccatccctgccggttctgaagccccgcatgtgggcttccaagccttgcactagggcatgagtgggaatggaaaggtttcagagcctcctactcatcgctgctttcatttttagcaaacatctgagtgtcttgacttctaaacattagtcttgtgtgttaaaagaaatttgtttgcattgggccacattatactttgacccttaaaaagagactgatgaatatgtataattttgcacccttctgagcatttgagacttggcaagttcagtgaatacttactaatctcccatgtcctgctaggtactgtggggcagtggctagaatactttaattttgctccccattgtgattctcatcctggctttgagttttgcttccctttgtgtcctgtggtggatcctccctccaggcagactggcctgcttgctctctggaacatgttgtttgtttctaccactgtacttttgcttcctctcattccccacagtggaccgtcatcccttcatcattgcttgtccaaatcccatttgtcctttaaagggaagaaaagccgttgttgatgaagtgctttctg

SEQ ID NO: 10223 - DNA, 1166 bp, Homo sapiens
attataattaaatttaattaattaatttatttgtttttgagacggactctcactgtgtctcccaggctggagtgcagtggcgcggtctcagctcattacaacctctgcctcccgggttcaagcaattcttctgcctcagcctcccgagtacctgggattacaggtacccgccaccacacctggctaattttttgtgtttttaatagagacagggtttccccatgttggtcaggctggtctcaaactcctgacctcaggtgatcctcctggctcagcctcccaaatgctgggattacagaagcgagccactgtgcctggcctaacattataattttatagaaagaatgctctctgccaagagtggttccaagtggttagttctagggaaggtgagaaataagatgaggcagaatttaacctctatcactgcccaggtgaggtgacctgatcaaggaatctactttcatttatttattcattttgcccgggggcatggcatgcactcacatgtgtgttcgcgcttgtgagcagtgtgtgtgctcactcccagctcccattatgttccaggcaccatgctgtgttctaaaacagccatgaatgggacaggcgtggtctctgttcccgatggagtttatctagtctgatggagaagaaagatattaaataaataattgcaattgtgatacataaatatcatgaaggtacatatggcattgtgagaatcagtgcagtgggaccccgtctggggggataaggatgtcaagttatgtttggatctgcagacctgaacttcagaccctgccaaggttacaccattcctggcagccagctggtttgcctctcttaggtgacagccttttcttatcaggctcattctaacccaaatgcaaatacctatagacctgcaccgtttcctcctgttcaccccccaggtctgttatctttctctgccctgcagactgttttttaggaagtagtttttgtcttctctaaaattttaacctccatgttttattttgatgaggtaatgtgtttggctagaggacccccttttcatcactaggcctaattttgcacttcctcaatcttaatgtttctggatttcattttccatgtcaggtgatctctagtatatctccattgttatatttttattacatcactat

SEQ ID NO: 10224 - DNA, 3101 bp, Homo sapiens
tttcgtgtcttgggggtggaaaggtagggatgaattggggtgatagaaccctggtgaattcagagtaatctttctttagaaaactggtgttttctaaagaaacaggataggagtttagagaaggcaccaaagctttcactttggtttggcaccagtttctaaccatctgttttttctaccctagctatcttttattggtaaaatataaatgtataattatgtttgtagagctttaccaaggagtttccctccttttttgtttgttgattagcaaatttttgattctccattttccaaaagtaagagactccagcatggccttctgtttgccccgcagtaaagtaacttccatataaaatggtatttgaaagtgagagttcatgacaacagaccgttttccatttcatctgtattttatctccgtgactccaacttgtgggtttgttctgtttttccatgagaataaaatactggcggtttttttctcagatgtgtgttcattgagaagtaggttactagaattatgttactgtgtcttattggttcaatgatgatttctctggcatattagacttttattttttcccccatggaagcacttgaggaaataaatagtacactggctgttttctgccagcaactgtggtgatttttctccctgtcctttgagaattgctagtctgcttctgagccattgtcatatccagcagggagcagcttggttcaagaaggaccatagaggctgctcagcatctcctccctccctcccagcttgccagggatttgatgagacaggaaactgcccagcaaaccagggactgcccatgtaaactatttaagaaaaagttcaacccaggtcttgtatcctgtgatttagcagttgaatgaatacagaattcatcaaaataatattaaccttgtacttgcacacttggatatatttgggagtaattttaggagatttctggctgacttttattatcagggatatgggtttagtaaagcttttatctttagaaaaatgtttgtatgcattataagatgctacttttaagacaatattgaaaaaaactttggttattatttaacaaaagtggtatgacttgatgcttctctatttaaaggcaaggaaggattggtatatgattgcctgtaataaataaattgcgtgattattggagtacattggggtaaaagtaaagaacagaggagtattgaggagcttgaaagggaacattcaaactaaagccaagcctgaagataacttgaatcagttgtaaaagtgtgttggcaatgtccgaaattgaatgaaaaacatctggcttataagaaatgttaaagaactaccatcttaagtaaaattggtgtttttgttatttttaaggtaaatgccaatgcaaaaggtatgtttttctacttcacattggttttcttttcctgtttacatctgcacttgttttttgctgagagccagaggaaaagataattagactttgtctcttccacccatgaaatcccccagtacccagggcttcttctgaactactgccgatgtgatgtcactttgtatctggaaaatcactttggggtccatttactgttattttgttgcctacaaaaacagccaggtgaaagctaaatcttgtgtgagagtttgcagaggtttttctatacaataaagtagtatagcacactagccaaatccatccaaaaggaccttttttttaggaagtagacttgaattcacaaaacagtcttgacatgggtagctggtgaaaaaccctctggagagcaagtggagccagtccccattggctgacagtgccacctggagctggtctctggggtgttcggttgtttattcctgaggaagactagctgctgctgctgctgctgctgcaaactgtactgtacacatcatggctgctggacacgaaggaggaggtgagagaagtttcatgctaccgaaatagagggtgttggtaccactgcccctggcctgagagccagggtttaaacctgcctcagtagagtctagtttgaaatgacaccaaaattcctcagcccctactcagcaattggttttggtttccaaatgacttctgcatttgtaaagataacagagtggtggggtcaaagtttatcttgtgtttagatctcttcaagactgcttaagcaaaaacaaaaatcccttggaacctatcgtttgagcctgtaaagttgttttagcagttgtcataaatgcatatgttgtgaaatcagaacactgtcgagtttatactcatttagctgcaatgtgggacaatgaaaaatgctttacaggcctggagtatcattacttatggtatctcctgctttaaaatctcaagcgatatctatctggttaaattccattttaggagattgagatgcagaacgttaatgttcattacctcctcctaccccaagagaaatggattcagacatgtcttgtctcaacaagaaattgatttttttttaaactatcttattctgttgccaaatatcacagaagtaatgaggagtttagttacatttggctgttgtgctctgaaagagccaggtttggaatttgtgggggtgatctaggaagaaggttccaaagaagcagaggcatttgtcaagttacctaccctatatccagcatcctcctcatgagcttcagtagctgctctttgcccacgcttgtatcctacgtttgctatttgggcaaaccattacttcagttatttaacttccctttttttttaacttcacctttgactatgaacaagtaacggtaacattccttttgtgtattcaataatgcagttagtttacctttttcagaatattttgaacaaagatctttgtctctttctgctggaatgcgcacacagtgaacgtttgttagaactacacacaataaagacactgttttccttttcttgccccgactacacttattatttttaatttaaaaaggtgttttttaagtagaagtgttggttttgtaatcctcaggtgttctggaagaaaaggatttcagaagcatgacagtctcccgtgtctgtgctaatggtgtgtttagcataacgtggtgg

SEQ ID NO: 10225 - DNA, 1148 bp, Homo sapiens
aaatctatggattgtaacataagtaaaataatgctatttgggcatttttaaaaattccatttcttaggccttatattgcttgaagcatttatattctaaaacataaccaaattctgactattcattttggggaaaaacaatcagttcacaaatcacattttcaatgggactgctagccagcataggtgaaaacatgtatagtgtatttactcttgaattgtacactgcagatgcttcttcagctccctcctcttcctccatgggcggtgcttgcagctcctttaccacctcttccagccctaccatttattctacctcagtcaccgacagcaaggctatgcaagtggagagctgctcctcagccgtgggggtaagtaacagaggggtaagtgaaaagcagttaaccagtaacacagttcagcagcatccatcaacaccgaagaggcacacagtcttgtacatctcaccaccacctgaggacttgctggataacagtcggatgtcctgccaggatgaggggtgtggattggaatctgagcagagctgcagtatgtggatggaggattccccctccaacttcagtaacatgagcaccagttcctacaatgataacactgaggtacctcgtaaatcacgaaaacgaaatccaaagcagaggccgggggtcaaacgacgagattgtgaagaatctaatatggatatatttgatgccgacagtgccaaagcacctcactatgtgctttctcagcttaccacggacaacaaaggcaactcaaaagcgggaaatgggttggtattcacattttttaaaattctatcatcattatgcaaaacaaacaaacaaaaaaaattcccaatttttcctaattgctgagctcaagtttgcatataaagcaacagtgctaattttatcattgaaatacatgaaaattttaacttaaaattaccaacttttactagatagaaaataaaataatcatagattctagcaatagatatcttattatcagtatagttaggtagtagaaaatgaaaataatctgttctgaaataaatttcaaatgaatttatattttaaaaggacttttactcagccaggtgcggtggctcacacctgtaatcccagcactttgggaggccgaggcggg

SEQ ID NO: 10226 - DNA, 1253 bp, Homo sapiens
ctgcagtgagtataaattcacttgtcacctcagtgctttacagtttgaagtggtcacttacctgatggttcccacaagccttaggctttacagggttgtatcattgacttaaaatgaagaattaacttgtgttacatctataaagagcaaaataacacactccagaacttggcagttgtagcattagttatacagttttgggtgttcttgccacccgtgggatgcctgcttctcactaccacctgtgtctggacacatgcttatgtctcattttccttttggcatgtggaaagctgtcaatgcagtgtaaggccaacgtgtgtgtggcttctatgtgttgagataatgttttggtatccttgtccgtttcatttattttttaagtgtacaaaaaataacctgttaattgttgaaggctacttttctgttctttttttttttttttttctatcctgtacatttagttgaactgtgcggaattgtggtgttggttttgtttacacagccagatttttccttctttttgttttgtgatgatcttcctttgttctttgaatgtgctcttttgtctttttctcttttttctcatgttttcttccctccacctccacccctttctttctttctctctctgattgagaggcattgaattacgttttcagtagtacaggcttcttgccgatatgaagggaacttttcagaaagagacctactctgggtcatttaattttgaatacagttttcaatcgttcaagttttggatggtttatatctaatgtgtgtttcatttttttggaaagctatattttgtatttaggaaatggtatactattttgctatttgtactgagtgagtacattggcataaatatagaaatttatatatatacatatatataaactattcttttttgccacacatttttgtggtaaatttgtgagtttgtctgatgttctaccacaacgtggcgtctgataacagtgagggggggtggggtttgttatgtctttattgagtatttaagtatcttttgaaacaaatgacctgttcatctgtggccattccatcaggcagttagttccttgatgtcagtagtgggctaaaggcagcttactgtgtgtttgctggagctttcactcagccaagtgttagagtcaggaaacccattgaggcaatggcgtcaaatggtgtttcacaagaatgagccattcagtctttgctcactatatatttaatattttattattgttgtt

SEQ ID NO: 10227 - DNA, 1208 bp, Homo sapiens
gtattctatgccttttatttataaagacactaagaaaacccatgtttgtaattttaataacatttttcccatcttgtaatatccagagctactttataaattctctgaaccaaaagtattttcctcagtgtatctcttctcccccagcccctattgggaaaaattacccagtatagttcaggttatgaggaggatcagccacacaatccagtgcttcagtttgaaaatgtaaaattctaaccctaaagtagggttggttgaaatttcagacaaagcaaacccagcaggtataaaaagtagtataaatacaaatctgtaagttatttttgaattttctgaacttttttctaagagattacataggagactaaagaaatctatctgttcaagttctaattaggatgattgttaatactgcactgtggatgaagtggcgactggcttgtgtgctgacttctgtggtttagcaagaggtttattgttatcaaatgctaattggcaatgccaagtcactgggaccaattttctgttttataatatctaagtttagaacagaatatatacctgaactgtagtggtttgatcggatggagacagaaaacccgatttttattctcataaattttgtggttatttatacaagggctgtgctatgctaccatattcttgttcaataataataggtttgttgttttttttacattgttaaatgttccttacccctaaaggtcaatgttaagtacaacattctgaaaatacaatttggctacgaagagtattcatcttctttgaagctcagtggttgatatttgtgctaataatgcaatttcctgattactgttacaagttatagctacatatgggagagactcagtgagccagcaaaggccatagaaacaacaatttattaaatgtatttatggcagaaggacctaaataaactgtgagccaccttttcttctttatattgttacatttaagtgttcttgctttcagcaactcacattaatgcttggagcttatctctttctctctctctctctctctctctgtgtgtgtgtgtgtatgtgtgtgtgtgtgtgtgtgtgtttccttattgtcattccattatatatccacaccaacatgggtgacgataattcaaagtcatattttgcctctaagcttgatcatgttacctttatgattaaagtatcatgttatttagc

SEQ ID NO: 10228 - DNA, 2445 bp, Homo sapiens
gtcaaaggaaatgagaaaaaggttatatctgactccctccagacctaagataattccttttgatcagatacagtcagatggagtgccttggtttttgttaattttgcctctattccagctccttaccacagcggtggtgcttaaagaaaggatcatcagcaacaggtcaggatagttctacctttgggatagggctgctttccccgtgctagtatttctgtgactgttagtggcactgaggactgcaaacttttatgcaatattcttaataccctattgatattatgcactttaatcattccaaagaagccaagaatgctgtatagtgatgattccttcctaatgaattcatcttaactatttagaatgttatgtcccttttcttttggatagccaacttggtataaatgttatatggatttttctaaaatgactatataggacttaagactttgaaatgtaatttacttataaggggaaataattatgctttagcacatcattttagaaacgtcacattttagaaacattcagcttgctaacctacatgtttgggaattcattaaaaccagttgtctatatattttgtgccatgtatataagaacattacaatatatctttttctacatatgtagtatgtgcaaccagtggttctcagagtatggttctcagcccaccagctagtatcagtatcacctgggaactagttagaaatgtaaattctttggccccatcccagacatactgagtcagaaactctggaatagggcccccgcaatctgttttcacaagccctccaggtgattctgatgcacactttaaagtttaggaaccactgggctaagactctgttgagatatagagtttttcttccactcagactgatatagttatacattgttcttcatgtaaattcagcttaacctggttatctataatcttttattggcaaaagttaattctcagtactgcctatagagatacagtgtattttatgtacatacacaattagtctaattcttgataattcagttaatttagtttggcattttcctaccacttactaaaaggtttacattaaatgactgatttaaatatataggtgcaatgttctatgtttattttaattgttatgacatttaagtagctaatataattgaccggtgctaaagtctcctgtttatccataaaatgggtacattatgggcagtgtaatacaagctttcttttcattgcctagtactttaccagcagaccacagttttgccctggctagaccaaccctcagaacaaaatcatcattccttgtatttatatttgtatctgagatagtaaacaagatggctggccaggtcaacatggcaccttaacttatttttttaataggtaaaacttcttcaaaagtagcttgctttgtataagaactaagctatcagtatagatatagctatccttggagcttatgtttcagacaagaattatttactaaaataaataataaacaagataatgcattatacaatttgggcatttctcgtttctcaagtgtatgcatcatggtaaatataaactaaccacaagataggtagattgattcatttcattttaatctccttgtgtaattcagtacctccataattgttctaatcttcttcccactgtttacaaattaccagttaattaactcgtgaaagaaaaattcacatatcagaataaaaataaatgtatactcactttataaaaatcaccactgctgtctttccttaatactagcagtggaaatgtaagtggcttactctacaaattttggtgctggcaaatacataggcaaactgttgggagctgctctagttacattcctcccttcttattccctttttctcttcctcactttattgcataacatattcctgtacccaaagcattctaccacagttctatttgactcccacttgtaataactcctttaaaaaattccatgtttaaccatatgaccctgcttgcttactcatattctccctccctctccccttcctttctctctcttccagaagtcatttgcctggtttgaaatattttgtagggattgcttattatattattttagctgatgaacctcaggacaacgtctacacacacacacatacatacacgcacacaaaatctcagctgttgaagagtgggcttggaatcagacttctgtgtccagtaaaaaactcctgcactgaagtcattgtgacttgagtagttacagactgattccagtgaacttgatctaatttcttttgatctaatgaatgtgtctgcttaccttgtttccttttaattgataagctccaagtagttgctaattttttgacaactttaaatgagtttcattcacttcttttacttaatgttttaagtatagtaccaataatttcattaacctgttctcaagtggt

SEQ ID NO: 10229 - DNA, 1427 bp, Homo sapiens
atgccggatggaactttgggattgaccccaccaacaactgaacgctttggtcaggctgctacaatggaaggaattggggcaattggtgaaactcctcctgcattcaaccatgcagctcctggagctgaatttgctccaaacaaacgtcgccgatactaataagttgcagtgtctagtttctcaaaacccttaaaagaaggaccctttttggaccagccagaattctaccctggaaaagtgttagggattccttccaatagttagatctaccctgcctgtactactctagggagtatgctggaggcagaggacaagggaggggtggtattaaacaagtcaattctatgtagtatattatttaatcagttctgtgtggtgcattcctgaagtctcaaatgtgattgttgagggcctggggaaaccatggcaaagtagatccagttagagcccattaatcttgatcattctgtttttttggtttgtttgttgtttttttttttttttttttttgtccatcttgtttcatttgcttgccctgcccccgagatggagtcttactctgtcgcccaggctggagtgtagtggcacgatctcggctcactgcaatctctgcctctcgggttcaagcttgtccaggctgatcttgaactcctgacctcgtgatcccctgcctcagcctcccaaaatgctgggattacaggggtgagccaccgtgcccaacctcacttgctttcttatccttacactcccccagtcccagagaaactgccacatacaccacaaaaaccaaacatcccccaatgaccttagccgcattgctccattcactcccaggtgagaattcaggtaaacgtccacaaaggtcacaggcaacgtacatacggttctattatatcccatatattaccccttcatgtcctaaagaagacattttctcttagagattttcattttagtatatctttaaaaaaaaatcttgtgttaacttgcctccatctttttcttgggtgaggacacccaggaatgacccttttgtgtctatgatactgctgttcacagcttttcttgataggcctagtacaatcttgggaacagggttactgtatactgaaggtctgacagtagctcttagactcgcctatcttaggtagtcatgctgtgccttttttttccattggtgtattgtatttgatttgtctctgatatatttggagtttttctgagaactggagcagtaatgcagcatcgacctattaaaatacattttaagcctttaaaaaaaaacagtacctatctcataggggtgctgtgataacgaaattaggtaatctgtattgattgacttttaaccataagaatatatacaggttttaaatttatttatttattgaagagatgggggtctctctatgttgcccaggctggtt

SEQ ID NO: 10230 - DNA, 1194 bp, Homo sapiens
accatactccaagaaagcatcatcaacatcaccaccagcagcaacagctgcagccgccaccaccgccaatacctgcaaatgggcaacaggccagcagccaaaatgaaggctttgactatttggcctgaagaattttagaaaaccaggagagaagaccttcacccaacgaagccgtctttttgtgggaaatcttcctcccgacatcactgaggaagaaatgaggaaactatttgagaaatatggaaaggcaggcgaagtcttcattcataaggattaaggatttggctttatccgcttggaaacacgaaccctagcggagattgcgaaagtggagctggacaatatgccactctgtggaaagcagctgcgtgtgcgcttttcctgccatagtgcatcccttacagttcgaaaccttcctcagtatgtgtccaacgaagtgctggaagaagccttttctgtgtttggccaggtagagagggctgtagtcattgtggatgatcgaggaaggccctcaggaaaaggcattgttgagttctcagggaagccagctgctgggaaagctctggacagacgcagtgaaggctccttcctgctaaccacatttcctcgtcctgtgactatggagcccatggaccagttagatgatgaagggggacttccagagaagctggttataaaaaaccagcaatttcacaaggaacgagagcaaccacccagatttgcacagcctggctcctttgagtatgaatatgccatgcgctggaaggcactcattgagatggagaagcagcagcaggaccaagtggaccgcaacatcaaagaggctcgtgagaagccagagatggagatggaggctgcacgccataagcaccaggtcatgctaatgagacagaatttgatgaggcgccaagaagaacttcggaggatggaagagctgcacaaccaagaggtgcaaaaacgaaagcaactggagctcaggcaggaggaagagcgcaggcgccctgaagaagagatgcggcggcagcaagaagaaatgatgcagccacagcaggaaggattcaagggaaccttccctgatgtgagagagcaggagatttggatgggtcagatggctatgggaggtgctatgggcataaacagcagaggtgccttgacccctgctcctgtgccagctggtaccccagctcctccagg

SEQ ID NO: 10231 - DNA, 1176 bp, Homo sapiens
tatttcaagacaatacattttcaggattgaaaattttaaaaaacaacatcatgttttaacacaaataagaaaagaataagcccctgcaatccctcatctagatggagatgcctcctgttgacagttccttagggtctcctcggtttctatgggcagggggatattacttgcaactaatttcttcgtctgtacgccatcaatatccctatgcttttctcacagtcctgcaagtataaacaaactaatacatcagtaatgtggaaattatggtgctgacccagtgatatgaaatgtttagaaagagtgcagcttcccctccagcctgatacaacagtgatttcattagacatattccttcccactcttttttccatgccacgaggcaaaatgtgaagatgtggagaaagcattcccagagaagccagcaaaggtgaaatgaaagcttctaatttagagaatcttaacttggggtgcattctctttagcccatccatgttgccttttgtaccccacagtggagaacatgcagctgaccctgaacctgcagacggagaacaaaggcagcgttgtctcaggcggagagctgacaattttcctggacgggccaactgttgatctgggaaatgtgcctaatggcagtgccctgacagatggtgagtgccgccctgctcctcaggactgtgccgggacagggtggggctgggcgggggccaggaggtgctgagagcttggttcttactaggccatcttggtttgattcccactcagcctggcccatagctagcccggactcttcttagctccgtggatcagtatcacaacatgaattttcaagggtcacagtaaatgtccagtctttgtaaatatgtaattgtttggtttgatagcagagaaaaacatctttcatcccatgtggactttggaaaatgaaatatctttatcaaatgtgactttggcccattattttccttcccaatacagttacactttttggggaggttgaaggtgtttttatgagaggcattggttgggaagggtacgctgtgttcttctagagatacacactagcaaaatacagacagagcagggaatttggagagtgtcccttgctctgtcccgaatgttggtagtttgtttcttttgatctagtctgaaattagtcacctttggatctag

SEQ ID NO: 10232 - DNA, 1164 bp, Homo sapiens
gatgcctggaaacatgcaggtttggagctggatcttctcgatgcagacacttctgctctcgggtagttatttaagaggttgtgtcaaccctgttatacctgcagggtaccacttagtcaatgagcactgcagtccagtgtgccagaagggccttctggtccttctgattggagagatcatttagtgaagcttccacacatttgttgatgttcagcttggggatcccttacgcagatagctgccccacatggctccctggaccaaagaaagatcattagtatctcagagattggcagcaactccaatgcgagagagtaaaactctgaagaccctgcgtcgtcagtaggcaggggaaaatgcgtcagattaaacaagaatctgtactgctgtttagtagccagtggcatagaagccggggacttctagtgtatttcaggctctgtagaggcaggtgatgtagcccagtcaagtgggttttcatgccagttctgctgagtgatggtcaccaggtaagcacagctgatggagacttgaaaacagctctcgaatgctaagtgtggaaatatttgagatagaaatggaggagccgtggtcagagtcgatactgttaatgaacgatcagaaaaaaacccacaaaactgtcatagtctagaattaagaggaagaacattctggctaaaggccagggctccttctgaatctcagatccttggggatctgtgttggctgccccagggctgtggctggggccggctccccagggctcaccgagaatgaacaggaagaacagccagaccaagtgagagtgatcggcagcttgctaacccagcctgctggtgtccctctctgctgccccaggagagaccccgcatcttccccacacactgctgtgggactcaggacacctcgggttcagatccacatctgccctcggcagccctgaccctgggcctgtggctgaatatgtctgagtccctttgtcctaaaatgaggtcgagccaggtgttcctggggtctttcccagcccccaactgaaactgaatgccgcgaggcagccagccggccttgggaggcctccacacagcagcagtgccagaaatgacgacacaggcctcaagcccgctggacagatccccctggccctgtggttagccttggctttgg

SEQ ID NO: 10233 - DNA, 1308 bp, Homo sapiens
cttcatagcctcgagtctggcagcttttgcgtggccctggggtgttgggttggagagatggggctgtgatgggcatctgatctaccgggttttacatatgaagcacttctgttccagtagtccaagagctactgccccaagtgtcccccgcaaccaatttccagctgtcctggcccctcccttaacaccccatggtccaggcacctgcaatgtgaaggcctgactggcagcccctgagccctagccagtgtggtgcaagccctgtggccctgctgcaggcaggcatggtggggctatcagagccctggcctcctagggctgactgtcgtgcttccccactctcaatagcttcaaccgtctggatcttccaccctacaagagctacgaacagctgagagagaagctgctgtatgccattgaggagaccgagggctttggacaggagtaaccgaggccgcccctcccacgccccccagcgcacatgtagtcctgagtcctccctgcctgagaggccactggccccgcagcccttgggaggcccccgtggatgtggccctgtgtgggaccacactgtcatctcgctgctggcagaaaagcctgatcccaggaggccctgcagttcccccgacccgcggatggcagtctggaataaagccccctagttgcctttggccccacctttgcaaagttccagagggctgaccctctctgcaaaactctcccctgtcctctagaccccaccctgggtgtatgtgagtgtgcaagggaaggtgttgcatccccaggggctgccgcagaggccggagacctcctggactagttcggcgaggagactggccactgggggtggctgttcgggactgagagcgccaagggtctttgccagcaaaggaggttctgcctgtaattgagcctctctgatgatggagatgaagtgaaggtctgagggagcgggccctggggcgaggccatctctgcctgcctccctagcaggcgccagcggtggaggctgagtcgcaggacacatgccggccagttaattcattctcagccaatgaaggtttgtctaagctgcctgggtatccacgggacaaaaacagcaaactccctcagactttgtccatgtataaacttgaagtggttgtgttgtagggttgcaggttttttgttacgctgctgtcactttctgtccaggagctggcaccccaggtgttctgagaccttgagggacccagacctttgggtccaagagtttcccaaacagccacgcctctcaggaacccacctggcggttccgtgagctcaggc

SEQ ID NO: 10234 - DNA, 1152 bp, Homo sapiens
taccgcttccaggccaaggccaagctctaccctgtcgcctccctcttcacccagaagcgccgaaaggatgacatggagctgagtgacttacatgggaagtgatgccaccagggcagcctcacctcctccccatcatcttgtcctagagtgggcgtcaccttggagcttctcttccttccgcctctgttcctcttctggagcctttgcctcccatctcttatctccttgatataattttgaacttgacctactttaaacttttttgctctgcagccttccttgcccttccacctcctcctcctaatattcactctgggctcttcttcccttcccacccctcactcagcttctcgtggtggcaggaggtatgtctgacaggacagaagcaagctccactgtggacatgagtgatggtgacagctgctttcaaattctgcatctcaaggcagggcaagccggggtggtgcaggtctcagggcacgagtccctctcccttgggttccattttcttggagcagcctattagttctggtggggttgccgtgtgtcggatgcagccctgaggggcagctcgtgcctgcagcccggcagctcgttctcctgttctgctgtgctgtgggctggcactcgatacctctggcaagaggatgattatctacctcactgataagaggcatcgcatggacgttctctggtctgtagtggagacaagcagttaacctagcaccatcctcatcctccctgcagaagccattagcagacctttgggccagggcagcctccctataattttcttcatctcttgctaatctctataataaggttgctttttctttcttagttgagtaaacaagtaagccacagtgtttgaaagggaaaaaccatattgccttgtgtgttgcttttcccagtcaaaagggtctgaccttagaaagtccccaccagtgatgctgagtgttctgctatggaaacaatgctgcttttctctcagctgtccaaagttcagccgttcctccttccccttctcccagtgcgtttgactttgtcaggtcagcctcacttgtccctttcacagttggcccataaagtcatgtttctctccctttagaatagggaggggaagggatcaggtgtgttgtcctgggcctttca

SEQ ID NO: 10235 - DNA, 3102 bp, Homo sapiens
gagcaggagacaatgtgggtgcccagaagtgccctgcgctttcaggcagtgtctctgttttcccaaggtgaaacttagatatcatggactgttgtccagcctcaatgcttcattttccccttgcatatcaactgccctaatctgactttttttaagtgcaaataaactgctataagacattttggttagtaaaactctagcctttggcgtgttggtatcttggaagcattagctctgataggtctataagtgtattaagggacatccttccatttcattagagcagcttaaaatgctcaggtgtctgccttctctggtgtttctttgggatctctgtttacccacttacgctggctccttctagacatttcttgccacttccccaactagaccactcctagtgattactgactttagtgcctaaacctttttggaaggttctggttggcttgttagaggagcatatgattagaattctgtttgggggtctagttgtcttggagcaagtatgtacttaactagccgagagatgctgcctctaggcagagaggaggagaggtgttgccggctggagggccaaccagtgaacaccagctgtgaaggccttgggagaggaggaacaggcccttgggcagatgcaggcattaccagcagggagcagacttacctccgaagatggagacaggtgactgagagctgcaggcctcctctgctcttccaaacacgtagcatttgcacccctccaaagccatctttgtaaaggaaaacgtatttgtaattgaatccagaagaatttagttacacatagacataactcttcaaccttaactatggcaatacatttgtgctttaactgttacatagcagtatcaccacttaccaggatccaaatcgaaataataaaagctgtctccatagtttaaaatcgaatagtgccatcatcacagtatattagtcaaatagaagcttcatcagaaatgtatcccacatagagttttaagacttggattctcttctgcccttgttaatctccaactaattactacagattgacacgtttttaattagctgtcctttgtaagaagtcaggaaatctgatgctgtgtccaaaattatgcactgtttgttgaagtagaaccagaaatcctgacctcctgttaaatgacatcagtttccccctctgagcaacagactgcttgtcttgctaggagaggaggatggggggctgagcactcaggctgtccattgaaaccccttgtccatgaatagggtcatactcctaagactgatggggtgttgatcttctaggacatcacttgtttattcagtgccccaaacacagatttctcttctagcactttagagttgatccttgaagtctctcctggttcattcaaatacaagctgtgtgagtctggtggttttctgtgattggtctaatgtgagctctttgaacagacagatctgacagtgaatgactctcccctgcttctggcataactgctttgcctctgtctagtgtccaagcatcttagctgttcaagaggagagggcagcataacttcctgaccaccggtgtcagatatcagagcattctggactcctgagaggcagtggcctcttgagtgaacaggggaggccagtagatgccccagatccagagccgtggctgcaaatccagcaggaataaggagggacaaccacagcctcctcatccatgtgtcatttccaagggtttgccttgtgtctcagctcattctgggcagcacgtttgtcttctgtccctagagatttgaaggattttggactcttgtgaatgggtgactggacttggctttacagagttgggtgcttttttctctctgcaattacctgtcatagcattttgtgctcaccacgaaggatggtctctgccttctcttgtcggtgtatgccatctgaacctaggaacacaaagtatattggcctcaaacggagacccagggttgccagttttccgtgggccttcccctcccttgaaatgtctttaattacctccccttcatcgtcaggccacgtgtgacttctgttcttagcactgccagggtcattgacttccatctaagcttgcatcaggaagatgttccttctgtgatcattggtactgaagccagaaaagctctcattcaggaactctgaagagcaaaaagggacaaacactaactgctgagctgggccatttgatctcctttcaccttgcattgctgtcacagcaccttgtatgatggcaggacaggctccagcagagagaactgcacagtgaccactgtatttttcacgctcttccagggatccctgtcccccgacattgaagagatctcattcaggccagagacacagagaccacatagcccagtgattaaaccccggtttcactctggccccaggagtggagcctggccactcctgtttggttctcactgggaggcccactggccttggatcatctcctcatgcacacccggagttttacctgcttgcttgctttcctggactgctgtttgcaagaaagtaactaaaacatgaaaagtaaacctccagcttccacagtatattacctgccgttgcatgcatttgaaagttagcctcctcccttgccaccgtcttggtggcagtagcgatgcaagaatgatgggagctttccgagagcgttcagtgtttcactgaagacaggacccatagccttcatttctggctctgtgtctcctctggcatatggacacatttcctggcatttgcctgagtctacaccactttttgagaacctgaaatagaagggaatcttctgtggcccacagtctccatattggcactagaagactggcctggcggaggaatttgcgttggcttgctttcaggggttagctacaagattcagctttatatctctgttgcttcttggccagtgtagtcaataagggtcttctttaacatctaagatagaggtttggttggccgggcgtggtcgcttactcctgtaatcccagcactttgggaggcccagtgaggtgggagaattgcttgaacccaggaggcagaggttgcagtgagctgagattgcac

SEQ ID NO: 10236 - DNA, 1327 bp, Homo sapiens
acagcctttctgcccaccggttggttacctttgccagtaccccttacccaggccttcttattggtgaagacatctggttgatacctggctttgccactctgtcctgtcctggcagtggccatggccgccccctgtaccagccgtaaagtctgtctcggcctccagcagtatcacccagggcaaggagtgggtgatggctcctccatcctttctttccctgcattcctccctcaatcccatcttctgtgctgactcccccttcccttcctgtcttctagaatgcagccaatcggggcttaaaagccagcgagtgggtgcagcaggtgtcaggcttgatggacggtaaaggtggtggcaaggatgtgtctgcacaggccacaggcaagaacgttggctgcctgcaggaggcgctgcagctggccacttccttcgcccagctgcgcctcggggatgtaaagaactgagtggggaaggaggaggctcccactggatccatccgtccagccaagagctcttcatctgctacaagaacatttgaatcttgggacctttaaagagcccctcctaacccagcagtaactggaacacacttgggagcagtcctatgtctcagtgccccttaaatttctgccctgagccctccacgtcagtgccatcggtctagaaccactaaccccgcattgctgttgatcgtcacgctcgcatctatagataacggctctccagacctgagctttccgcgtcagcaagtaggaatcgtttttgctgcagagaataaaaggaccacgtgcaatacttaatgccgcatgatctctatccctcttcccaataggggctggctcttttgacagcctttggcgtctgtagaataaatgctgtggctcctgctggctgctgtggtgttcacctagtccagccccagaacccaaaattttgggaacagcccctagggctgcctcaaacgtctgtggaggtggaggccaaataggtggggtgacttggagcaaggcgttcataattcagtagatgaggggtggaggtagttggaagcagagaagcctttcttggagctgctctcccccctcccttccagcaagatggatggatccggctaccctgcacaactgggaccgggccgttctccctccgggcctccaggggcgctgtagtgcctcccgccgctctctcgacagcccatgcgcagccgcgcgtctttaaacaacggaagaaccagtggatgcggcagggcgttgggcggaaggggttcgcacgccaagaaccgccatgcctggggatcaccgccgcatccgcggccctgaagaatcgc

SEQ ID NO: 10237 - DNA, 1327 bp, Homo sapiens; identical to SEQ ID NO: 10236

SEQ ID NO: 10238 - DNA, 1113 bp, Homo sapiens
ttttttgagaccgagtcttgctttgtcacccaggctggagtggagtggcacaatctcggctcactgcaagctccgcctcctgggttcacgccattcttctgcctcagcctcctgagtagctgggactacaggtgcccgccaccacacccggctaatgttttgtatttttggtagagacagggtttcagcgtgttagccaggatggtctcgatctcttgaccccgtgatccgcctgcctcgacctcccaaagtgctgggattatagggggagccaccgcgcccggccgcgaagccctttcatattgtctaatgagtttgcttccaaaatacaattggacaattaggagctaagaagagtttgcgaaagagaatccagcaaaagtcagccaagaaggagtgaaaaggtcattgaccccactgtcccctttctatgcatttcccttgagcagtatttgagaacacagtggctacggtgatggctctgcgcagggagaagatgttcgtggaagaggtgtccacaggccaggagtgtggagtggtgctggacaagacctgtttctatgctgagcaaggaggccagatctatgacgaaggctacctggtgaaggtggatgacagcagtgaagatgtgagccaacagttcttccttgttagccgaggagggccaggcgtggagccggggagctgcttttgccccacagtgctccaggccttgggagcagacctgacacacctttgggttgggttccatggtatttctgaagccgagggagctgttgcttgtacctgttgctttcctggccatcgggtaccctcgtaggagtatttttgcagccagggtacaagtttcctacaagctttgcacattaaaaaggagaggcagctctctgaaggggagatgtccttgtagaaaactcagcctcgagctctgccgctgctgaatgagttactttgtctccctaggcttcaggttccttatggaggcttttagatactcaaagatgcggctgggtgtggtggctcatgactataatcctagcactttgggaggccaaggcgggtggatcgcctgaggtcaggagttcaagaccagcctggccaacatggtgaaac

SEQ ID NO: 10239 - DNA, 1103 bp, Homo sapiens
tctcctgacctcctgatccgcccgcctcggcctcccaaagtgctgggattacaggcgtgagccacagcgcctggccaaattttttgtatttttcctagagacggggtttcaccatgttagtcaggatggtctcaatctcctgacctcatgatccgcccgcctcggcctctcaaagtgctgggattacaggcgcgagccacggtgcccagcccaggtgaggtttaaaaaacaaaacaaaacaaaacagaattgtatcaggacatccattgtgcttcccccaggttaactgaaaaagatgtgctggattttctgatgggcacacagggccgatactgatagccttgtgtctttaattccttctgccagtcccagcatccttttggagggcttggcatggaaaaggggctgtctgttttttttgacacacctcctttgtgctgtgtaggagacactgcttggctcctctatgacacctatgggtttccagtggatctgactggactgattgctgaagagaagggcctggtggtagacatggatggctttgaagaggagaggaaactggcccaggtaaagaacttggagagtgaacaggaaacccaacaccttccaacccagcaccacttggctgcagactgagcatgagtttccttccattaaagtctttgaagtgctttttcccctagatcagtggttctcaagtgggggcgagtctgccttccagggagtaattggcgataatgtctgaagacatttttgattttcacaactaggggcagatcctgctgtcacgtacttggtagaggccagggtgcccctcagcatcccacactgcaagagaagtttccacaacagagaatgatctggccccaaatgtcagtagtgccaggattgaaaaaccctgttctggcagtttatgctgggcatagtttagcaagttccagtcctttggagtcccttttctcctactttacggtaacttatgcttgtttctcttgctgacagctgaaatcacagggcaagggagctggtggggaagacctcattatgctggacatttacgctatcgaagagctccgggcacggggtctggaggtcacaga

SEQ ID NO: 10240 - DNA, 1068 bp, Homo sapiens
caggacctgtatgccattatgagggtttcaacttgtactctgaatgaaacgaggaattattggaaggtctttgggcagagaagtaatgtgagctgactcacattttaagaatcagtaggccaactgcagtgactcacacctataatcccagcactttgggaggctgaggcaagaggatcacttgagcccaggaggttgaggctgcagtgagccaagattgtgccactgcactccagcctggtcaacagagtgagacctaatctcaaaaaaaaaaaaaaaaaaaaaaaaaagaagaagatgtggagtgcttcaaatcccaccagaaaatcttatttctatagtgccctgttcttgtgaagctagcatatgtaactctgctacataatccaaggtctcctataaatgaatttttaatactcatttttttaaactttgttaactaaaaggttgagatttaagctcctaactagtttgtttcttgcgcagcccacagaacttaattgcccaatctcagtctggtactggtaaaacagctgccttcgtgctggccatgcttagccaagtagaacctgcaaacaaatacccccaggtaaggatttatgaatttaggttttctactaatgcatagatagaaggggatttccatttgatggattaaaagacaagctatgggctgggtgcagtggctcatgcctgtaatcccagcactttgggaggccgaggtgggcggatcacctgaggtcaggagttctagaccagcctggccaacatggtgaaaccctgtctctactaaaaataaaaaattagctgggcctggtggcatgtgcctgtaatcccagctacttgggaaactgaggcaagagaatcatttgaacccgggaggcggaggttgcagtgagctgagatcgcaccattgcactccagcctgggcaaaaagaacgaaactctgtctcaaaaaaataaaataaaagccaagctatgcattactttttacacaaactgaaactccttaaattgagcacaaataatacgggatatcttccaatggcaataaaaatcctgtttcct

SEQ ID NO: 10241 - DNA, 2452 bp, Homo sapiens
gtagagacctgtgtatctttcccccagataagaagatagaaagattggacacagatgatttggacgagattgagaaaatagccaactgagaagctccaccagccactgatgccagccctggcactgcccctgcacaggagacaagtgcgttcagggcacaggccccgacatcaccccaaggacaacggcacaagtagagagaaactacctacctcacttcaaattatgtttggacttgacaaaaatgtatgcaaatgatgggggatggtagaaaaaaattatttacacaaccttggaagattaggcatgaatacacagagatttaccttttggaagtttcatcttttaatttggccagtgtttccttcatgctaatctagatgctgtggctgattacttgcccaggatctcctgtggcagcctctgcttgttctctggcttggagtggatggggcagcctccagctcctgtggaagtaatggaatagtggtggaaagggaacacagagagggaggcttccagtaagataggtgtgtaagcccagccatcatgtttggaatggcatgaggcagcagaggaggcctgagagctgctgctttggacttgggggtgggacagctcatctgagtattgccagccccctgtcctagtgcccacagcagaagggaatttgttaaataagcatggaccaaaatgccaacctctcggttgtgtatatgggtttgtgtcacaggactgtgacctgttctcggtgggtgcagtctgtgtagagtgcacatctgattattggtgggtcctgtgcctgtgcttaagcaagtcctgtggagaagtcatcatggagaattagtggtggccctagcgtgccacaaaacctggtctcatgagcatttgcaacatcccttttacatccttaatatccccttaccccacagtagccccaaacaaatgtgatctgaggtttagatcctcagtgaaaattgtggtttcaagtcttcatggccagcctcaaggcagttctagatgtgatcagcagtagtcacaaattcttgttttgtctccacacccagaaggcaagttttgtcagagctggggaataatttcagatatttgacatcttgattataaagggcttctgaacatctgtgtttactgcctttggaatacaaacaggtgcaactgagggactagctacactaccaccatttatctgtccaaggcaagagtatcaccaaggcctttgctccagccttacttggcatctttgcgcaagatagtcagagcaaacaatagtaatggacacttctcacacctggccaaggctgttggtacccacgaaatgacagcaaagatgagaggaaactgaattgcaagagcaatatgaaaccccaaccaagaggagtactctgcagttctttggctttggtatagagtggccactttctctaggacctggaagaagagtttgatggctaagaacgattgtgatcctaggtcttctttgtacgcatctccgtatttaggccagatctgcctcctgggaagggaaggggccaatgtcagcctccaggtgatttctttaatctgacattacaaagagaccaacagactgccaattctaccacattcccctggtgggtactcgactatgtagttttctctatgcttctggtcaactctgacacatcttggaattcttgtaataagaaaagaaatttttatacttttttctccttccctgagtcctgtggaccaaccctgaaatactaaaaacaagggcaataattaaagaagtatagactctttagtaggccacaggcagagcagactcccaccttctcaagcacatacaacctctctactggtgtagccccaagtgtgagaaggaaagtgggaagcggggtgctgcagactctttgacagcaggaggaatgggaatctggtagaagtataggtcaacagttctttttttttttttttggaaacggagtctcactctgttgcccaggctggagtgccgtggcacgacctcggctcactgtaacctctgcctcccaggttcaagcgattctcctgcctcggcctcctaggactacaggtgcacgccaccgcacccagctaatttttgtatttttagtagagatgggggtttcaccatgttggccaggctggtcttgaactcctgacctcaagtgatccacccaccttggcctcccaaagtgccaggattacaggcgtgagccaccgcgcccagccaacagttattaatcaggggtcttggacctctaagaattcactggatgggtttcatggagtctacgaagtatatatacagtagtttgagtttaaatgtattttcctggctgggtgcagtggctcatgcctgtaataccagcactttggtaggcctaggtgggcggatcacctgagatcgggagttcgagaccagcctgac

SEQ ID NO: 10242 - DNA, 1438 bp, Homo sapiens
tactcagtcacggcagccaggagaccccaggtgagtttctgagcgcatacgtagttggttcttacccccaggtgtcacacggggccgagagctgagcaagaatttggaatggaagttatgaccaagggaattatgctgttcatttataatagtggacattatggagagctctgattcctacataatatgaataaggatggataggccgggcgtggtggctcatgcctataatcccagcacgttgggaggctgaggcgggcggatcggttgagctcaggcgttcgggaccagcctggccaacatgatgaaaccccgtctctaccaaaaatagaaaaaaatatagccgggcctggtggcgcacgcctgtagtcccagctactcgggaggctgaggtaggaggatcgcttgagcctgggtagaggctgctgtgagctgaaatggcgccactgcactccagcctgggtaacagagcgagaccccgactcaataaataaataaggatggataaattgtagcgtatgcaccattcattatgctaagacattttaaagtaattatgagaaacgctctactaatgatttgtttttatttgtatttttctgcttattagacaaatatatactcattttaaaaaggcgtgtgtgtatataaagtgagagtgctctctatcccttctcttctgggatcctgattcctggcagcttggtgaatattctaccatattgccttttatttgcataaacccatttttcttttacaaaaacaggaacattctgttcacactactatgcaacctgctttcactgatcagcatgtgttagacatgttgacatgtccaatacacacacatcttccttgccctggaaacaccatccaccttcctttctgcgtgtagctgtcccggcatttatctcctggttcctctagtgacaggcatgggggatttctagtacatggctgttatccacagtaccacaatgaacattttttttttctttttttgagacagagtgtcactctggcccggagtacagaggcgtgatctcggcccactgcaacctctgcctcccagcttcaagcagttctcttgcctcagcctcccaagtagctgggattacaggcacatgccagcatgcccagctaatctttatattttctgtagagatggggttttgccatgttggccaggctggtctcgaactgacctcaagtggtctgcctacctctgtcggcctcccaaagtgctaggattataggtgggtgccatcacgcctggccgaacatttttttttttttttttttgagacggagtctcactctgtcgcccaggctggaattccgtggcgtgatctcagctcactgcaacctccacctcctgggttcaagcgattctcctgcctcagcctcctgagtagctgggattacaggcacatgccac

SEQ ID NO: 10243 - DNA, 1227 bp, Homo sapiens
aaaaatacgaaaattagctgggtgcggtggcatgtgcctgtaatcccagctactcaggaggctgaggcaggagaatcgcttgaacccaggaggtggaggttgcagtgagctgagatcacgccacggaattccagcctgggcgacagagtgagactccgtctcaaaaaaaaaaaaaaaaaaatgttcggccaggcgtgatggcacccacctataatcctagcactttgggaggccgacagaggtaggcagaccacttgaggtcagttcgagaccagcctggccaacatggcaaaaccccatctctacagaaaatataaagattagctgggcatgctggcatgtgcctgtaatcccagctacttgggaggctgaggcaagagaactgcttgaagctgggaggcagaggttgcagtgggccgagatcacgcctctgtactccgggccagagtgacactctgtctcaaaaaaagaaaaaaaaaatgttcattgtggtactgtggataacagccatgtactagaaatcccccatgcctgtcactagaggaaccaggagataaatgccgggacagctacacgcagaaaggaaggtggatggtgtttccagggcaaggaagatgtgtgtgtattggacatgtcaacatgtctaacacatgctgatcagtgaaagcaggttgcatagtagtgtgaacagaatgttcctgtttttgtaaaagaaaaatgggtttatgcaaataaaaggcaatatggtagaatattcaccaagctgccaggaatcaggatcccagaagagaagggatagagagcactctcactttatatacacacacgcctttttaaaatgagtatatatttgtctaataagcagaaaaatacaaataaaaacaaatcattagtagagcgtttctcataattactttaaaatgtcttagcataatgaatggtgcatacgctacaatttatccatccttatttatttattgagtcggggtctcgctctgttacccaggctggagtgcagtggcgccatttcagctcacagcagcctctacccaggctcaagcgatcctcctacctcagcctcccgagtagctgggactacaggcgtgcgccaccaggcccggctatatttttttctatttttggtagagacggggtttcatcatgttggccaggctggtcccgaacgcctgagctcaaccgatccgcccgcctcagcctcccaacgtg

SEQ ID NO: 10244 - DNA, 1184 bp, Homo sapiens
gcacaagctccagatattcggcctctgggaacagaagcctactgtctgtcctctccagggtctcacatttaggggagagctacatctgaggacaaaattttcatcatgggaaaggccctccagccctaacaggaagcagagaggggaagggactcaacccatggctgagttccaaggaagtctgagctgggcagggtccccagtgtgtggcttcacagctccctagatgccgactatgctgggtgtggtgttggttgcttcctgcacattggtcctcaggcagtcctgggaagtgggttactcctggctccagccggcactggaatccggcttctttaccatgacactggctcagcagcacgtcttggcacttcatgcaatctccagatgggtgctgagtatcttggcccaggcacgtcactcccctctgccccacctcaggaagcctgcctctgctgggccagtgcctgacctcgtactgggagcagaagaagctcatggctccaggctgtgagcccctgactgtgcggcgtatgatggatgtcctggccccccacgtgcatggccagagcctggctggggcaggcggtggaggctttctctatctgttgaccaaggagccacagcaaaaggaggccttggaggcggtgctggccaagaccgaggtactgatggggctggggttggtaaagagacctctgggggcaagagacctcactgtggcccaccagttaaccaggggctatatctgtaagtccccctggtcctgcaggcccagtccagcctccagaaggcctgagatttgtccagagccttctaaatacttcctgtcttgtccagggccttgggaattacagcatccacctggttgaagtggacactcagggcctgagcctgaagctgctggggaccgaggcctcaacctgttgccctttcccatgaagctggcttctctctgcaacaggagaaaacctggagctacagtgtcccccaccttccttgccccatgggaacctccacctcctactccccacccacctctgcgaatctgctcccaaaggaagctgaccagagcaagatctgggcaagcagagagtgcctgggacaggactgtgacctggtggacaggggcctagatgtagcctctgttcctcctggacataggaaggtcccaagcttagtat

SEQ ID NO: 10245 - DNA, 1085 bp, Homo sapiens
gccatttgtgtatctttggagaaatgtctattcaaatcccattgcccattttttaagagttgtctttttatttttgagttctctatgtgttctgggtactagacccttgtcagaaatacgatttgcaaatattttctctcattttgtgggttgtcatctttcttcctttgatgcacaaaagttttaaattttgataaagtccagtttatctgtattttctttgttgcttgtgctataaataaaatactcactgcacttcccagatcttttccctgaattgttttgaaacaaatcctagctgtcgtacttagtgataacacctaaaaataataacaatagtatcttaatataatcaaatagcttgtgctttatgttgatgccagacattatcgtcaggcagagaactcgttaccgaaagtttctctcctctgcttcttcccagttacttatatcaaattgcacatcttggagatgatgatgaagaacctgagttttcatcagccatgcctctggaagaaggagacacattcttttttcagccaagaccacttaaaaaccttgtgctggttgatgagttggacagcctctctcccattctgttttgccaggttggtgggcctttccagccccttccacaatagatctaaagttaaactgaggtctagtctaagaaatagctttattagtatttccatgaactcgccagtgtgtaaagcagttagaggtagaagtttgagcacaaaaaaccattaataagtcctcgggctttttttcccataatgacaaaactcacgtttaatgtaaaaatgcagatcatattcctgtacagcttgcaggggaggaaaaaatcagaccatacaagaagtgagaagtaaaagtcctccccgtaatcttctcacctgtccgctccattgagccatattgcttgtattaacaacttcttgtgactgcttctaggtgttttctctgcatttacaatcatgtatatgtttatgtgttatatctttttctttttaaaataagtggattcatatactccacagtattctgtggttgacctcttgtcatgtaacagtctacatata

SEQ ID NO: 10246 - DNA, 1112 bp, Homo sapiens
tcttgaactcctgacctaaggcaatccacccgcctcggcatcccaaagtgctgggatttcaggtgtgagccactgggcccagccggtggtgactgatttctatgagtgcttatagaagggagaggtgactgccagccaaggggataagggaataattttgttaaaggaggtggcatttgaattggtccacatgggatttggccttatgggagctggggaaagaaaggggatgctaatttagatggcctgattgattcccagtggttactgctgttctgaggatgatcaaggcatattgtacttgaaggaaaggggtatggttttgcctgcagcaactgtaccctctcagacatcctgtaacttttgcttaagactgtcatggggattgccactaagaaccagcctgtttggttcttagattcttctttcactaggtggtttcatcctttaaatacagcatacgttgtgaaccctgcctttgagaccttattttttgatgtgattgtaagcaggtagctgagttgcatgctcactggatctgtggcttccctcttctcctgtcaggtgtcagaaatggctgtttctgagctacctggtaaccccaacgctgtctggacagtgcgtcgacacattgaaggtaagcagctttttcccaatagtcaaaatgaggatctaggtgccattgacatagaaggcttgaaaggctgcgttcataatacttctgtatcatttcatttagcaccatataccagaaactttctggcccaacactgtttttgaggctcttccgttcaggatgccttcacctaccatttctttttgtgcaggtgggaaagggggaacataggttggctgttatattttagtacataaaggtttcagaatcatagagctgtcaaatgtggtattgactttatattcataaaggtactggtttcatctgtaagaggtatgatatgagggaaagttgtgctttttcattcttcttcaactatattcttttaaattgttttgaaaccacagtgaaattgaaggtggtgttctaggaattaagagatttgggaaagcttgttagtcaatcttgctagtgcttaaggaaagcagagtggaat

SEQ ID NO: 10247 - DNA, 1205 bp, Homo sapiens
ccaaccctagaatgagttagtctcacagaggcttaagtaatctctattttattcattagagcttgtgttcatttctacataagctgcttttggaagaagttaggggtctttcctagttagaaggagtatctcttcttaggaaggggttgtgtgattgacaactggcacaaataaatgaagctctagctcagtatgttcatgtatcaatattgtagtatttaaaatgtcctcatgtctccgattctcttgctttgtcctctcacttctttagcagatgtctcaagaaaatattgaggaagcagagtatatctgtaggctcttctgacccctagttttcttctggatcattttgctctgtgtgcatgtgtatgtgtgtatgtgtgtaataactacacatagaagaactgccttggaaggtttctgaagagaactcttagtgtttcatttggctttgtaattctaatgagttcttatctaaccaactcccttcttttctttttcagatgagtttgatgcctacatcattgtgtctttcgtgaatgccaccctagtgttgtccattggagaaactgtagaagaagtgactgactctgggttcctggggaccaccccgaccttgtcctgctccttattaggagatgatgccttggtgcaggtgagggttctcagagcttacctacttggcctgctttgttctttcttggccttcattgtgatgcaggctgctgtgttcatgtctcttcaccctcaccttccagcaagccttaggggtagggaacatatgatttgggcacataatatccctctctgtatttgccatttttctgttacagagccacatcactgcagctttcatctctaataaagatctttataagtgttttgttaataagctttgaacttctttgaagtggacactgcaaaacatgaactatttaaaagttgaccttgcctgaggcctactaactcttttgtctttgattcaactggtgcctcaaatgcagtggccccaggtctgattttagtgacagatctgatagatgtgagggtcattctgagtgatgaatcaaattgttaaagtcaggtttctttctgttactgactctaggtctatccagatggcattcggcacatacgagcagacaagagagtcaatgagtggaagacccctggaaagaaaacaattgtgaagtgtgcagtgaacc

SEQ ID NO: 10248 - DNA, 1179 bp, Homo sapiens
gatccactcctgatgtctatctctgagatcagctgggttagaacccagaatccatacctgctgcttctcttgtcattgcagtgtgtttcaggagtttcctgctgtggtttaaggatatgatctgagactacagaaatgtttctttggcttaagcctcaactcctttttttaagttaacaaccaagactgcataaatttgacttgctgcaggaccctaggtgacttttcaggaggtgtgctttgcttaattacctttgccattatcttctttgacaaaaggaggaaagcatgatcttcccgaagcttattctgaaattgggtgtaactaataactcagtactctcttagaactcactccccgggttttttctgtgcataaggaagtactttttcaatcctagaattagatttctctgggtatgtttttttcctaaaattgtcattttctgtgtttttatgatttttctctccctctcaggactgtttgcaacctctaagcatgcaggctctcccagcccagcctgagtccttgtgtatcgtggaaatgggtgggactgagaagcaggatgagctgggtgagaggggctcgattggcttcctatacctgaatattgggctacaggtaagagatccagaggcccacattgtggacattaggccttctgtacgtttcacacactcctttgtttgataacagggattttctctgcccatggtttcagatcctcaccttatgaaaagtgaacagtgtcactctgggttccacttttctcagctctttaattcgaacaaatcaggctgagaaagaaatattttgataaagagtcttcacatctgataaatgctgtttgatagctactctaagtcagaactggatgggttcctgaaggatcaactgtagttcccactattcactagtttcaaaagcagcaatgaatacctctcagttcataattggcttcattagcaataaaggacccctaaatgttccctgttgtcaaagttgctgagctctttgtgccgtgaagaaaaggtgtgctttaacgctaagatagtgtcaggattcttgatcatatgcttttcattttccttaatgattattgactcagacatctaagtaatctagcccaggtactttttgctttttaattttacttcctaatttagaaatctcaaaca

SEQ ID NO: 10249 - DNA, 1129 bp, Homo sapiens
agtgggaatttctatttgaagttagttcttttgtccttttaacatgaccccactatttgtaggggtttccttgccttgttgcacaataaagtatccccacatgtgtctggaacattcttgcccctgccccaaactagtcattccttttaggaaccttgttcctttaagaggaaatgctgtttagggaccatggtctttgtggttatttaattatttatttgaaatatacagtagtgaagaaggatttaatatacttggtaaaaagaaatattaagaagatatagtgaaaaataagtgtgtatttacttagtagatgctccataactttggatgattaagtgatttactgagagaatgaaatgaatggctatcggattattaggatcttttttaaacacccaagtcatttctttctatctgctctaatttcttatgtgaagtacccaagggagaggttttcccatcatagctgataagcttccatcaggcttcacctgctcctctccttttgattagaacggtgtgctgctgaggactgtcttggaccctgtcactggggatttgtctgatactcgcactcggtacctggggtcccgtcctgtgaagctcttccgagtccgaatgcaaggccaggaggcagtaagtaatgaaggttggggacaggcaacatctttgggattttagtggcaccatctgagaacaatctttgctgtaagcttcactgtcactaatttgccactccatcttgattggtttccttcatgtgagaagtcctgagttttcctaacctagagcttcctcactggggctccatcgcaccatgtcatgatttggttatagctgggtagagatatcgatccctttagccctctggctggtcaaatagggctggaaacctcccctctaggacaccactagccatgagaattctcaggttttatcccagtcttagatcagtgtcacgtttactacctaatgtgaaagagactgggaaacattgtgtcctttgtagttaagaatgttagtgtttctgggcactgtgctaattgattccatttaattctgttttttgttgtttttttttttgagatggagtctcactctgtcgcccaggctggaatgtagtggt

SEQ ID NO: 10250 - DNA, 1985 bp, Homo sapiens
gaccttgtgatccgcctgcctcagcctcccaaagtgctgggattacaggcgtgagccacccgcgcccggccaggccgtttgtttttatagtgtcccagggtttgcttcagtctgatgcgagtttacaaggttagcctgagcccagagctttagaactggactccacagactaggattgccaggattgatgggatgatccctcctggggcacacactgccatatggaatcaactctaggtttgccagagtttggcatgttttattccagccaaggaagctgggatcaggaatctgacctcacaaaccattctttatgtgtggcattctctcttgcactgcagacaacatgtggtctccttttggggtttaactatcgtgttgtagcagaaaaacctgtgattatcagaaagtgattagatatttcccgtgtgtttgtgtagtaaaaatgaatggcttgtctgttcgttgtgcttgtggaaactctagactagttgaaatcacttctcagtgacagattttttgtttcttctgccaggaccatgacttcttccagcatgtggaaatgcacctgcggtctgaacatccccctctctgtgggcgggaccacctcagctttcgctcctactacttccctgtgaaggtaggttgggggaatctgagctgaaaagggagatctgagaaaggagcagcacagggagtggattgatgggaatagtaccagggagggtgctcccctcagggcagaccacagccagagcaaaggcttcacctgcttctgccaatctgaactctgagtaccaagagtcaacttaagatagtgttcctggatctacaagtggggttcaagtatcgagtggagaataaaaagttttcccggtctgggcgtggtggcacacatttgtggtcccagccaatcgggaggctgagccccagattttgagagtgcagtgagctaagattatcccactgcactgcaacccggatgatagggtgagaccctgtctcaaaaactaaaaaataaaaacagctttccctacaagtgctgctttagcatgtgccattttctttgggcatctcaccattttttttctttctgctttctccatatcttagaatgtgattgatggagacctctgtgagcagttcaattccatggaacccaacaaacaaaagaacgtctctgaagaactggaccgaaccccacccgaagtgtccaagaaactcgaggatatccggacccgctacgccttctgagccctcctttcccggtggggcttgccagagactgtgtgttttgtttcccccaccaccatcactgccacctggcttctgccatgtggcaggagggtgactggataattaagactgcattatgaaagtcaacagctctttcccctcagctcttctcctggaatgactggcttcccctcaaattggcactgagatttgctacacttctccccacctggtacatgatacatgaccccaggttccagtgtagaacctgagtcccccattccccaaagccatccctgcattgatatgtcttgactctcctgtctacttttgcacacacccttaatttttaattggttttcttgtaaatacagttttgtacaatgttatctctgtgggaggaaggaggcaggctgtggtgggactgggtagggtatagtatcactcctgagttccactgctctagaatctaaccagaaatagaaacctagtttttaaggtgactggcatccatgtgtcttgttctggagatgaggatgtaggtgggaggtttgaacccaagttagagcaggaagaactgagtagactccttccttccagataccgacttggacttgcggcactctgtggctccccacccccaggtctgtggtggtttctttgttttttcctggttctttttgctgtgctgatgaaacatgacctcaataaccatgtgtatacccacccctcttcccactgggtattga

SEQ ID NO: 10251 - DNA, 1120 bp, Homo sapiens
aggttgggaggctcccggcctgtctgctgtggtctgagctggctgcaagcccaggtgggggagcgagtctgggaagattggctttgactctctgttgccggaggagatgccatcccagcacggcccccactgtagtccaggctcgtggtggcagcgggggcaaggggaggggcaaggctgcccccaccccacgcaccaagtcacgccaagtctcagcaggtaaaagcacgtgagcctagggcgagcggagggagtcctggtggccccgcaggtcaggagggaaagcagggctcagagggcatcgtggccccagggcagggtcctacctgggggtcaggagcaccttggtcttgatgattgattgattgattgatagaatggagctgggtctgagcctcccaggcttgagctcctgggagttcttgtgcggtgagctgggcagctcctgggtaggtccgggcaccaagcaggccctgatgtggacagagtcccatcagagggagctgatgaagaatggtccctgtaagtaagtcactaggttcaacaactgcctggccgagcactcagcccgtggagctcaggccaacaccagagccccggttttaggggccaggagagcaggtgaccaattatttggggagtcttgggtagaatttccgccacacattctccccagggctgcaggggtcttccgaggcagggcggtggagcaggattcaggatgtggtgggaatagagtgaggggcagtgggtgggcagacctgggcgtcagaggtcctgatgggaaaggaggcaggggctacccagagaggggggctcgtgtggcacagcccccaccgactccgccgtccccctcccctgtgagccccgggggctgtacatactctactccatccccttgtccatccctgagaccacccccgccgcccttgcgtcgacttagcaaccacctcataggcccacccacctcgggatccgagccaaccatcccacatcacaaactttggtttgggggactttacgttcgtttaatttctcattttgtacggagaaatattcttttcaaaagcgtcttttgactgaagtaactttcctggtgctgttgttaactcgttccttt

SEQ ID NO: 10252 - DNA, 1057 bp, Homo sapiens
cactgctctgtcggccacccccacggaggagacgcccaccccacccccagccgccaccagcgaccccccggccgaagacatgctggtggccatccggcgtggggtccggctccgcaggaccgtcaccaacgacaggtcggcgccccgcatcttatgatggcgccaccctccccatcctctcaggccccagtgcgagcaggtggcctggtctgtgagccgcaggcactcagagcaaaggcccagccaggagagaggacagagccagggcagaggccatgccactttatggaaagacacctcacttggattccagcatttaaacaggaagtgacttcttagcaagcctggccaggacggagcctgcaggcctgggcctggttcggggtctgttttatgctcttcggtccctcctcttcctcctctggggccctgcctcttccctacccataagcaccagagccagggccgctgcccatgacagaggggccaggctggcctccctttcaccatcccggcctctcccagggctggtcctgcctcagctcctcctggaatgctggcccccctctcccctgcctgagccccctcctcccctcttgccttctctctgcctctcccaggcccctctccctccaggaggcggggcggctgtggaggggccaggtgcacgctgggctggatgtctgctgggggctgggggccagggcggcaggttggagttgggcggccaggccccccgtgtgggaagggagttccagggcccacgccaagtctcagggaggaaaccaggggctgcttgggggggggggtcttgggggccctgtggtggctcccacccctcgcctcccccaccccgtgaggctggctggagggggccagagcagctctttggaaactagggcagcagggttaggaggccggaggccctggggtcaccggccagccacacaggcaccgttttcagatgtccacttctcattgggtacatcaatcttttaactttgggggtcacagttttagccacctttcggggggtgactggagcagtaggaggtgt

SEQ ID NO: 10253 - DNA, 1143 bp, Homo sapiens
acccctgggcctggtgggactgaggggccacagtcacactccatgctctgcccttggctgtgattgcgaaccagagaccccctgatagccctggacaccctgagcctcagccacagtgacgggcccccgggccataggtggtagggccagtggtccccctgacctgccacaccctccctgcaggactggtccaaggtcggctcccatgagcagccctcaggcgccactctgcagcggaggaaggaccgagtggagctcctgcgagacacagagccaggccctgccagtgggggcaccctgggccccagcggggaagaggcaccgcgaccccggatgtcccctgccaccatcgcagccaaggtaggctggccagggccccccttcacgcccaggtcagtcccaggaggcccagccagtggcctcagggccggctccaaccacctggcagggctgcctggaatttgggcagaggggattgggggcgcaaggcttcagcctgcactttcccaccctcagcacggtgaggaggtgtcccccgccgccagtgacctggccatggtgctgacgcggggcctgagcctggagcaccagaagagcagccgggactcgctgcagtactccagcggctacagcacgcagaccaccacgccctcctgctctgaggacaccatcccctcccaaggcaggcccgcggggctggggtgggaccagggacagctgggacttagccatccaggagggccccgtccttccccctctgtgctcaccctggtgggctgggggcaaggggccacctgggccctgggcctcactgtgtcccgtgcccccaggctccgactacgactgctactccgtgaatggggatgcggacagcgagggcccgcccgagtttgacaagtcatccaccatcccgcgcaacagcaacatcgcccagaactaccgccgcctgatccagaccaagcgcccagcctccactgctgggctgcccaccgcggggctgcccacggccactggcctgccctcgggcgcaccccccggcgtggccaccatccgccgcacaccctccaccaagcccaccgtgcgccgcgccctgtccagcgctggccccatccccatccggccgcccatcgtccctgtgaagac

SEQ ID NO: 10254 - DNA, 1237 bp, Homo sapiens
tgggggagctcctttttgtctcccccaaaatggcctcctttatttccaccctcaagctgctgggccccggctggcctcacgttggaggggcagaactgtagccacagtggcacctgccagatacctaagctggggctggataccaggtgaagctcttacacatcgtgtcaaggcatcttggcagccaccccagggccgctccttaggtagccctcgctttgcagatgaggaaacagtcacatgctcaagtcacaccgctaggaagcggtggagttatggttgggtccaggtctgtctagatcctgtgctctgccagtgcctgcaccccccttcccggccccgccgattggcatcttttcataaacttgaagggccccaagactctctgcttagctgagcagcccacagtcttcctgagaccccttcccaggtccaccaggcctcagggcctggaaacagatacttcctagcccacatggatctgctcctccaaaccagtgaggccaaagggagggagcagaacatttcatgagacactgctggagggtgagtaggaacaggacaggagcccaaggggatctcatcgccaggggcaagctaagcactgggcttgacagggacagcaaggctaccgcattgcaccattatagggagcatcatgcacactagctgtgcagtgcacaacctgtgttgctgtacagagcaactggagagggtggcagcaacaggaatgtaggagctgtaggcatgtccagtggtgagaccggcattcctcctcccagggacagtgagtgactgcaggccttggggccccaacactcaaaaacaaatgtcctgccaagtggagggcccggcagaggctcttcagcaattcccattttccccagtcctagccctgcctctcagagaaagggccaagctgccacctcccccttctccccagaccctgttccaggccccagctggcttcctggctggctgctagccctggctttcaccccaaagggagccactcgtaaacaggaaatgcttcccaatgcgatgcctgctctgggcgccatcgccagcccacaggccgagggcaatagccaagcagcagtgttagctgttcccaccaactgcggaagagggggatgctcaggggcttcccagctctggggcccgccatgacggaagagttgccaggcctgagacagacgcccacaggccgagcccaccagcctgtggctctgcctct

SEQ ID NO: 10255 - DNA, 1159 bp, Homo sapiens
aaaggcgtttttccatcctgccctctcttaaagctgtcctaatctaccgtctttctctccagcacaccctatttatagctctcccgtgctggcacgtgtggagccaactggagaatatgttacactacaggccccgagccctcgtatcaccagggaggcagctgagcggggggcgggaaacagaccaggccccacagcgtgtctcggggttgtggggctgaggtgactgttggaaagatcagacaggcaggtgggcaggtggaaaggaagatgagatcatggaaacggctaggacactcctgggggaggtgggggcagcgcgactggctgtgaaggagcccctgactcgctggaagccacagccacctggctgggtccacacagctgggtccttgggctgtgggtgccatggcaccaagtcccaggtggtcctggccagtcggaggcaggcagtgtgggctgggcgtgtcccagagcagtgccaggtccctgacccctgccctctgcctaccccagatctgcgcctgcagctgctggacgtgaagaacaacccctacctgatcaaggccctctacggcctgctcatgctcctgccgcagagcagcgccttccagctgctctcgcaccggctccagtgcgtgcccaaccctgagctgctgcagaccgagtgagtgccggctggggactgctgcccccgccccctgagcagggacaggcccagaggagcctggtgaggaagggccttgccaggggctgctgaggcctccctcacttcagcatcccaccccttttgtcactgtgaccaccatcccccccgcagccacttgccccttggcctcttgtgtccacatcagagcaccgagcaagggattctgggagccctcacacggtggccgggagtagcaacacttccaggcaatcagggtccagctcagtgaggctatgcaaaatctaaaaactctgagggcatctggagttacccagacagaggaccctggagagaaacaccgggcagggggaggagttcctgccccagcttagagatgggggccccagtggctgtctgtgctgggcacctcccaggcctcacatagcccctccccaccctgtctgtggcagaggctcaaccctgggtcactgggagaccccatcattgcta

SEQ ID NO: 10256 - DNA, 1252 bp, Homo sapiens
ttaggctgaccaagggggtctttggcaaggcctctcatctgtgccgcacatggcattctctgctagaaagggctctgggctgaaatcacaagtggcccatgctgaggagttgaatgtacacgatgttcctaatgtactgtcatttgtggccaggattaggaaggaaatggtgattccagcttggaggaaatccctgtggcaagagagggcaggagcccagcagggacccaagggcttgggcacttctcagcacttcttggagttgattatcatggagacaacaggatttcctttagtgaccagtccctttgttttcatttgcactgaggattcagcatgcaagaaggtccctgcggccgtgccaaggcttcatggccgggggacaatggtctccaggcaggggccagaccggccgcactcttgcccctcctccccgcacccagctgtctcctcaccccggccttgccctcctcacactgcgtttttctccaacaccaagacactatctcagcagataccccatcggtccttcctgctatctcagcttcagagcctccagcacagggttacacgcctgtccccagccctcgccatctgacctgcatccagccgtattctggggtgtgtctatgtgggatagaaggcgcagcctcttttctaagacacaaacgcagacctcattgtgagtcaaacacctgctgagttccctcacagggactccttgcagaatgcgaaatgcttccgccagagccagacacccgccaagaaccctgataacacagttcagaacccacctgactctgaagccccttggcctgcagttccatgtgcatgcccagccccacggccaaagtaacccaggccaccttgtcccttcctggaagttaattttctgtcctacaagcattcatctcccccattgcctgtaggggcccagccctaggccttgtggtgtaagctgaaaaggaaccagggctcagggagggcccaggggccaagtaccaccttaggaaggaaattggtgggaactagcagcaggtgaggcaggagacaggggagggctgtcctgggaaagaacagggggcttgagtacctgtgaatggacacaggggacggggtggtcagactgaaaagacacatggaaaataaggccaaggcaggtgcggtggctcacgcctgtcatcccagcactttggaaggccaaagcggcagatcacctgaggtcaggagttcaagaccagcctggccaaca

SEQ ID NO: 10257 - DNA, 1144 bp, Homo sapiens
aggggccatcagcaagcagagctggaaacctgcaggtccgggtgggcccagcggtgccttgtaccttgatgggcagaatgacttctttgcttccaacaggaagattggccccctgtgggtcaaatctcacttcaaatatttccgtttcacaatgaggtagattctttacacgatctagctcagtactgaatcctggaccaagacaaaaaaaaatttcttcatggaaaagagaaacagcaaacaagagctgctctagagaaagcccccactgggtcagaatgactgctcagaggatcactgaatagcccaagaatccttttagctgatcccagaggcacaaaagctgctccaggaggacagtactgatgggttccttgagagaaatgaccaagtgcaataggaaagggtctccccagcctgggtacctgtctcatgaaggacacgcttgtctgcatggaatgacactggaaagtgactggtgttgatgatcttgatgatgtgggttcggacttcgccaaggatgatgtagccaaagtccaggatgtactctggtagctggattctgaaatggttaatagaccttactagtcactttcaaacctggaaggctacttttccaaaagtgagtgagtctgattttttttttctacctcctgtgcacagttttattctccagagtggagaacaacaaatggctacccaaatggagactagaaacaacgttaactcccccagagattcacaccactgttttggccattatctcagaacatgttcagcatgggcccttatggacctgaagtgaagcctgtccattagacatagctataatgttctcactctaagaggcagaaagctgcccagttggcttgatgctaggggatggcggataagtgaggagagtggatttcattgcgaggtgatcagccagtgtttccgggagtgtgctgcacgaggcagcactgcttgctctgctacactctgaaacaagcacagcacagaaaggcagtcactggaaaccactcacttggccagtttgcggcgactccgatggctgaagcaggggtcatccataggatcaggggtggttgttttctgatgttctaggacatagctttggactataagtctttctacctccatc

SEQ ID NO: 10258 - DNA, 2624 bp, Homo sapiens
caagtgctttttagaaaggacccatatgttatcaaactttgaaattgagttgctggaatgaagtagaggtgactctctctgtggtacacattgaatgtactatgtatgttcaagtattcaggcgccatgtcttatatactgaagaaagaaaaagtgaggcccaccttgctcttacaatgtttgcaattgttactgtattgaatacagtataatgactactatggcttcaatcttaaacctggaaacaaatatccctttttttccccttcatttcaccaagcctttacttaaaatcttcagtgtcttgtcaaatctagctctgtatcagatgctggaatattcctaacatttgacaaactggagttgaactaaaggctccacgggaaagtttctggtcttactagtgtgtatgagcaagatctgctaaaacttactccactgggtaaatggttgactgagtcaagaacaggataatatctcctgcatagttttcagtaatgtaagtgtggactagtgcatatttcagacaactgctctgcctgtgcaatgaaaaatagcctttaagggtttctttgcagactgatttcattggatggatacttaatgctgtgaaacatgataggattaacataatgttggtggatttcttgaatagaatttgtcttaacattcctctttgtgtagaggctttattttctctcttatatttgtagctaaccagctcaggtttttttatttgaactgggttgaatctctgaagaaatctgttcaagaccatgctataagacactgtcagctaatggagctgggaagggtctactctgctgacagagcatttccttgggtgatcatagtttcgaggtagagtttatgatcattcatagctttgtctagaaggagtaaaatatcatggccttaacacaaagggtgctgcgtagaatatgaattgattttggaatcagaacacaagcaccatactgaaggactagcagccaaataactgcctaggatactgatggttgtgaagactgtttcaaatgattggatctttgaaagcttcagcgtgccttagtttctaggatcagaattagttttcctctcacttggccttgcagctaaatggagaaatgtttcaatttctttgaatacttgcacatttcaataattcctttcccgagtataaccactcaagggggagcaaatttggatggatttacgacttcacaggcattgtgaggaaagagcattttccaaggctgttttgataaccctggggtgataagcagtgagccctcacacacttactttgacaatttcacatgcacttgtacttcattatttccctcttcaagagtcgtttctattctagtttctgccccatcccggggaatcctaaaggagaattaattcatctaagtaatctcaaaaaactgtaggaagggtgctctccctgagaagcttctcccacagtgctttggtgctgttaccttgaggtggtttggacagtcacggaagttttaggctgtgcatagtgatcatctgttaattttaaggtctttatcatttaaagaaacattcctcagtgtaacatttgggaggggattctttcctcttgctagtttaaaggtgtgatttgtactccttgtttgtcccattcatatatgaaaatagacttttaaaactgtccaacactaatggtttatataacatgcttcccattttttttatgtcgtagaaattggaagttagggagtactgctttcaaggttcaacttcattatcttctgcattggaaaatatttgggccatgagaactaggggaaaggagtttgaatgtgtctatttttttctagtgaatgtattttaaccacagtgtcctaaactgagaaaactagagaggaaaaagtgggtgttcatgaactttgtagttgggagagtggttttacatgtctgtgtattcatgactttgggagtgggtaggatcattggagagagaattgcacagaaagtcctgaagtttaaaacacttttgaccagctttggctcgggagagtggggctgcttgtagaactggaagtgaataactttttcaagcaatatcagtgagtgggtcccatcgacagggttccaggacctggaacactttaacagaaggaaatgccgaagcagcttgcacagttgctttacagacttccaagaggctgattctggcttcaagatggagccttggagttggtttttttttttttttttttcttccctcaaagaacctgcggttgcgctttgtgtgttttgtttttgttttccatttgggggccccatgggaaagagcttctgaactctttcctttatgaactcccactgtgttcctataaaggcccttttctttcttagtgttgtaagttacattttcattatgccccatcacatcttctttactgtaaaaatattaaaaagctgtttccaagtgggacagctaatgaagctctaattattgcagacatatttttgagatgtaaaaaaaaaaatttaaagttaaatgataagtcttagaggcgagtgaggaataaaatggatgtaaacatttacatgggatgcattagaattctgctgtgtgtactgtc

SEQ ID NO: 10259 - DNA, 1833 bp, Homo sapiens
ctgcatttgggatcatatctttccccttctctgtcccccattctctgaatgctgctttctctggcttgtttcctacagtgggggcctgtggggttgagtcttgaggaatcccctcaaatgagaaggccttgggagaaggcctcatctctggctgtttcatgagcaactcattcctagagttcattgtttgcatgggtttctcacaagcgtccttcctcataggaaggctcatcaactgaatttagtgacatgtacacagtagatgctcaagcagtgtctgcaaggacacaagctgagctttctccttatggggcaaacctatgtctaaccagatacagaccaattagtttagatcaaatcaccttccacttgggctacttgtgactttccaacctggtaacttccactgaattctggaaagagaaattcttgaggaccctggcaagttgggccctgacctttctgttgctgtctcttgctggtgaagcaataccagcagttcctgtaataccacaatatcgttccatgcatatataacatattaatacttgattttgctgagctgcaaaggtatctgtcataaaatatggtccccaggaaaagaatctctgtgctctaaatctcggtcagagctgtggcctcccccttgcctttaacctctagtttagtcttttcctccaggcatgaaaaatatgactaacctgtggtgtgtccattcttccttataggaatttcctgagtttgcaggagacatgagagcagtttttagcgagtattttagtgggaagttgccaactttttaagaatgagcagttgacaagggccagagcctgtcccttgtcagcagtaggacatttccagctcttaggaatagaaaggaggactgctgactgtctggcgctgtataaaaatgtgtataccaatttgggaataggggaacccagtcatggatggataataagccaagtcttgaatcattcctatcaagattagtatacatgaggaagaggtggcatggggggaaggggctctgggagttcagagctgagtacttgtacctgagggagggcccccagccaatctgggctggtccttctatattcttggtcccagttggtcataacaccaagggctttgccctgcgctgctttgccactgctgctgtccgctcactgtcctgcctgctgtcctctacagctccctatccttccatgtctttggccatgtagattaagtgtaggcgtccggttcattcttacctgtgttaggccatgttattttatagcgaagtcatgttcgatagggatggtatgaaatgctgctggtgggctggtaaatccaaagggataaggcttcagtgctgttgggagccctctggctccaaatgtctgactatcttgagggagaaacaagcaggtttctactagtggtgtcttctgttgtattaacttctttcctttgtggtatcttgtatcctgttttaaaaactaaatgaagggaaccacattagggcccatgccagcatcccagtgaagttcgtccagctccagttaggtggattctggagttcggagagggtttaaagtttggctgaaatagcacctcaagtggggtttagttttatttttacctgcgggcatcatgggcgatttagggggaagcacaggatggtggtgtggtttaaacctgcagcaagcaggcatgttgaagagttgagtgatcacgctggagatgaagggttggacatggattgactgggaaaaggcctgggtccattggagtaaagataacctagtcgattgaattggccatgggaagttaggtcacagtctt

SEQ ID NO: 10260 - DNA, 2152 bp, Homo sapiens
ggtgtggtggcatgcgcctgtaatcccagctactcaggaggctgaggcaggagaattgcctgaacccaggaggcagaggtgcagtgagctgagatcacgccaactgcactccagcctgggtgacagagggagactgtctcaaaaaaaaaaaaaaaagtttgtgaactaaggttttctcctgtgttttgatcattttatttttactgccaaaggggatctgagtcatttctctggtatttgtaacgttgtgctccttgccctaattaggtcctggacccaagccagaagcctctgcaaagcttccttccagacctgcagataactatgacaactttgtcctaccagagttgccatctgtgccagacacactaccaactgcatctgctggtgccagcacctcagcatctgaagacattgactttgatgatctttcccggaggtttgaagagctgaaaaagaaaacataggtctcttaaaccaggcaactttcacgttttgggagttgagactgagcaatttctccttgtaacaaagaatctccatgaaattctgtttcatctgttaaccgtcactcagcacaacactccctctgggctctcttcctgctcctccagattctgctgctttccagttctctgttgatcctgagactaacaattggagactgaggccagagcaactggctcctggcagctgtgcttgtccgtttcctgtcagagtgatcccaggtttcctcctggcccgtcccatggtccctccacaggagtgtgagaggatgggggaagcactgtgggaagaccaccaaagatggctggacagtgggagagagcacgttgtgaagcatcccagcctcgtgttgaggttccagacttagaaacagacccctctgtacagggggattgtggtgagtgagaatcaaggccaccttgtgtgttttctcactctcgaatgcaagtgggagagggaaaatgactcgggacgccattgtaacggttcctggaagctgggccctctcattggcatatacagtactcctcgctgcagggcactgtcccaccgggatccagttgcaaagtttgtcttgacagttgaaggcctcgcttagttgtactggattctcagggagccctctgtggccttttgctttgcgtgctgtttcccttgtaccagagggcggcaccgtggaaattctgttttccctgtagcatattgtgttggattgcattactggcagagaaaggacaaggtgccattcaagtcctagggtgggcttccagctgccttaatagaagtactcaagtcttttgggtagtgagctggaaagcctacaggaaaagaggggtacctgttttcatttgaaaactttgattcatggaacctttaaaactaatctcagaaaaatttttggtgcccatgcagctgtagttgttcactgctttcctggatggatgggactcttatgtcataacttctgttactcctttggcccatagctaaggtcatccttccccacaggggtggctttgggattggatgatacagcttttgcttctgtgtagtatacctgtacatacttgtttcaggcagcctttctttaatgttttcagttggtttgtattctgtagctcagtagctgctaataaagttaaagatcctgtgtcctgctttctctactgtttggtcagatgatgaagtataaatctggattttagtggagaatattttaaccaagtgatccatgtaaaccagcccttagtttcaggattcctggagcagtacagagctcattttgatctctgtatttagatagcccagatagcatctgtgaatttccttggtcttcctcagtggcagggctccgcatctgccatgcctcatccttggatgtttatttttagtaagttgcagtgagctcacttctgactgcttcatttcccgcagccatcctgggccatgggtggtgagttctgttacttgctgcttggcagcagagctagtttgtctcgtagtattcttgcattgttaatcctatcttgacagtgccaagatccataagaacttgggaccaaggggattttgattcctaacttacagaattaaaaacaaagtatattataattttaaagctatgccatgcaaagataagtagtaa

SEQ ID NO: 10261 - DNA, 1207 bp, Homo sapiens
agtcctatttgcatgatgtccgcctgagtggttttgaccctgctgggattgggaatactagtttaagaaaagagctgttgcctgtaacatagctgctctccttgagtgtgtggtcttcgttttattatgaaaattgatgataaaggagataatgggtaaatatgtataagagaccagcatttctaatagtattggtgatagagaaaggacagtgctatggaacaaagctagacaaaaaaatccaatgctgtccttgctcagtattaagttttatagctgatagaattgtaactattaaaaaaaatgattcactgtaaactcgcactagtattttttgaattcttgctggaaaataactgttactgtgggtttgaaattttctaggcagtaactatttttcccccttgggagaatggggataggtgagtttcaggagtccacggatcacattcgagcagtgcaggttgcacctgtgagtgagtgggcagcctgtcctttctctagggtgaagatgtgtataccttaggatgggatgcatgtttttaagcttcgtgtgactcttcatagatgagcgggatagaagtaggcacagcagcagatcagagcgagatggagggtcagagcgtagcagcagaagaaatgaacccgagagcccacgacatcgacctaaaggtagactcactgttttggtggcttgtgaggattcaagtgtataaaaggcagagtgagtgactctcgtcttcagtgagattgctgaggcattgagtcagaattcccgattctaccatgaacatcttgggatagttggttctgagtcaggtgggcacagctctgcacttggggtggatatggttcctgtaaggtgagaggctggtttgctgaatggccagttttccaaatggtaggaaagaatagggagctggaggtagaagaagtgtttattaaaaagaactacttatatccaagaagggtgtgtttgtagagataaagtaaatatcccttaaaatgttgtcataaacacagaatgcaaactggaccattggctaggtgcagtggctcatacctgtaatcccagtactttgggaggctgaggcaggcagattacttgaggtcaggagttcgagaccagcctggccaacatggtgaaaccccatccctactaaaaatacaaaaattagcctggggtggtggtgggtacctataatcc

SEQ ID NO: 10262 - DNA, 1181 bp, Homo sapiens
aagccggctggagggtggagggtgggtaggggactgggttggagaagatttcctggggaccatggggcaaatggggcagcctgcagctctgggactcggggacaaaggactctgctctgggtgaggttttgtttcattatttctttgaggctgaagtacagggcccagggaggcactgtgccctcttgtagaggcctcgcagtcaggcccatgtggaggtgtggtggccctcaaagtccatggctccattccagagcagtgcctgggccactgggctcccaggagatgcccggcctgcgcttctagtacctccctctgactgtgtccccactgctgttgcagaccccacaggaggattacgtggaggctgcagtgaagcagtccttgcaggtgcacctgtcgggggcccctggagacatccttatcttcatgcctggccaagaggacattgaggtgcgtgccttggtcacgactgtgatgagcgggtgtgtcttgcatatgagaggttagggttccagtgtctcacagctcctccctgggctctcaggtgacctcagaccagattgtggagcatctggaggaactggagaacgcgcctgccctggctgtgctgcccatctactctcagctgccttctgacctccaggccaaaatcttccagaaggtgtgtcagcaggaatgtccaggagtggctcttggagttctctaaaggaagcgagaggggatgtgactgtcctggcagggggtgggctaggaggtaggcttttccccctcgcggagcctttcctgtctcgagggactcatttttcccttcctgtatgtcctgctctaggctccagatggcgttcggaagtgcatcgttgccaccaatattgccgagacgtctctcactgttgacggcatcatgtttgttatcgattctggttattgcaaattaaaggtaagagaagacatgggaggcaaggcctgggtgttcaccagaagctaacttagctgcggggtgggaagccagggcctcgctcctggccctgggatgtggggagcgcgtggaagtggtggtggtggtgggaggctcacattgactcactgtgcttggtttgtttaacccttgtaatactcgatgaggtagataatttaacagtagagctcagagagctggtgtttgtggggaagacttcttc

SEQ ID NO: 10263 - DNA, 1107 bp, Homo sapiens
gctgtggcatgtattcatgccgcttcctatggcatttctcttccgatgtctgctttttctttgtttgttgttgactaggctgaatggtggggttttttttaagttaattataaacgaagttgaaatagcaaacaagccaacagcttgtcccccccaccaaaagaaaaattagccccacacaagcgccttctgctgcaacagatgcccagatcacccctggcacgggcaaacgggcaaacgattttggtggttttcagttttttctgtttgttgctgtatttgttgtttgttttccttgtttctttttgatttttcgaggagtccagaatcccggcctctgcttggaacggaacagtgtcatggcggagacgacggcctttgtcttgctgggtgtgaaaacatccgctgtgctggctccactgcggcagaatcaagtttaaaggaaaaaaagtgattaaagtcagctttgtgcctctgtggtgtggaagacccccaaaccccaagtagccgagtcccagggtccgaggaagggctcatagttggagcagcctaggctgtaatcctggcacttgcgccttcggttgctgcttgctgttcgctcctgggggtctggataatctcccttggctttaccgcactgtctggcccgcatacagggccccgtatcatatacccgctgctgctatcacacgaaactgtggcgttgcccctgaatggatggcacggtgccaactcttctgccatccgcccttgcagcttttttcttttctccctccctccccttcttcttctcctcctcccgtcgacttgacgttaattaacactcgggttaattgattttaaaagccgaagaattacagttaacttttcccacagggtacagacgccagccgcttggcacactctgcttttcgcactggtgcaggggaacagggaaagcccgcagcaaagctagcaactgctgagggagcgttgcctgcttattggagtagagccgatagaagtcgacgtggcattgcctcatcctttacaatatatgtatccattatatattttgttaaataatcaaaacaccaccctgtttttcttcttctccgttcctctttc

SEQ ID NO: 10264 - DNA, 1207 bp, Homo sapiens
tgggaagactgaccagggagagaacctggaaaagctcgagtgtgactcctgcggcaagttgttttccaacatcttgattttaaagagtcatcaagagcacgttcatcagaattactttcctttcaaacagctcgagaggtttgccaaacagtacagagaccactacgataaactgtacccactgaggccccagaccccagagccaccaccacctccccctccaccccctccacccccacttccggcagcgccgcctcagccggcgtccacaccagccatccccgcatcagccccacccatcacctcacctacaattgcaccggcccagccatcagtgccgctcacccagctctccatgccgatggagctgcccatcttctcgccgctgatgatgcagacgatgccgctgcagaccttgccggctcagctacccccgcagctgggacctgtggagcctctgcctgcggacctggcccaactctaccagcatcagctcaatccaaccctgctccagcagcagaacaagaggcctcgcaccaggatcacagatgatcagctccgagtcttgcggcaatattttgacattaacaactcccccagtgaagagcaaataaaagagatggcagacaagtccgggttgccccagaaagtgatcaagcactggttcaggaacactctcttcaaagagaggcagcgtaacaaggactccccttacaacttcagtaatcctcctatcaccagcctggaggagctcaagattgactcccggcccccttcgccggaacctccaaagcaggagtactggggaagcaagaggtcttcaagaacaaggtttacggactaccagctgagggtcttacaggacttcttcgatgccaatgcttacccaaaggatgatgaatttgagcaactctctaatttactgaaccttccaacccgagtgatagtggtgtggtttcagaatgcccgacagaaggccaggaagaattatgagaatcagggagagggcaaagatggagagcggcgtgagcttacaaatgatagatacattcgaacaagcaacttgaactaccagtgcaaaaaatgtagcctggtgtttcagcgcatctttgatctcatcaagcaccagaagaagctgtgttacaaggatgaggatgaggaggggcaggacgacagccaaaatgaggattccatggatgccatggaa

SEQ ID NO: 10265 - DNA, 1138 bp, Homo sapiens
aagaaaagtagctgaggagtgtctgaaaggtgttgttttacaagtggagggttaagaagtataggacaccagtgattgttggaaaactgaaaaagtcgtgcataggacaaacaaaccaaaaaaaggctcttggaggcagaggaggaaggtcaggaagtgagaggagatggtgttttccttccttccctctgcagtggtagaagtggaacagagaggatggaaaggtactgccttctgcaggtggcgtgggagcagctgcggggtgtagcatggcggtggccctgaagctggcagcctgtactcatggaagtcacctggtcctccatgggggctggcacccaaggcccaaggccgcattgcccagcaacccctcactctgaatcatgcccactctgggagttgactcaccatgtcccctcccagttgctggatccagaagtgacacttttcaccactagtaggacaggtcgccagtggtttctgtgttgctgactctgtcggctgtgtcctaattcgccggacctttcagccgcctttgccactcttgccctttgtctatctctgttggcttctcttctgtgacttcacgatgagtgttattatgcccccaggcttgtcccagagccccttcttttttctgtctgtaactctccctaagtatctcattcagtccagtggttttaaaccccatctactttctgatgacatctgaatctgtccctagcctaggcctcttcctgtatccagctccccacctggcatttgcattcgaatgtctgagaatgaactccgcaggcttagcatggtgcagaaaggactctgtgaccagaacccccaaatgcttatgggctcccccatctcggttagggccacctccagcatatcatttgcttaacccaaaaagctgggaactatctgtggggctccttgtcttttgctcccctacagccaaaccatcagcaagttctgtgggtgcttccttcaaaaatacatttgcaccaccaccctcccaggccagcccccatcgtctctctgtatttcaactctcccccgcctctactcttgccctttacaatcccctctccatacagggattttacgaagaggaaaatcaggtcatatcactctcttgcaaaga

SEQ ID NO: 10266 - DNA, 2399 bp, Homo sapiens
gtcctttttccagggacattgaacctccctcttctcagccctcccctgtgttcccctgacccacagacagtgcgcggagtcggggctgacttcgtgtgagctgtccataagtggtagggctgtggctgtgacctcgtagagggctggagagatgacgcgtccgttctccactgtggcccatcgaagctatgctggcaaagaatggaaattcccgctagtcttcaggggcagagcggtgacaattcgaagccgaagagggctgttcctggccttctttccccatatccctcgctcaggctgttgacccggccatgccacccctgtgtgctggaccgtgtggggcagtgtccccaggcccgccctccgccctgtgtctctgtgttgtggacagaagcctcttagagcgctccgtgcggtaggacctcagcctcggccctcctaacctctttcctttctctctctctttcccctctctccctcctccccccttgcctctgcccttcaggtccgagcctccgtactgggtgcaatgaaagctccacgcaggccttaccatggaaggctgtgactcgcccgtcgtctcggggaaggacaatgggtgcggtatccctcagcaccagcaatggactgaactcaacagcacccacctccctgacaaacccagtagcatggagcagtccacaggcgagagccacgggcccttggacagcctgagggcccccttcaatgagcgcctcgcggagagcaccgcgtcggccgggcccccctccgagcccgccagcaaggaggtcacctgcaacgaatgttcggcctcctttgccagcctccagacctacatggagcaccactgccccagcgcgcgccccccgccacccctgagagaggagagcgccagcgacaccggtgaggagggggacgaggagagtgacgtggagaacctggccggggagatcgtctaccagccggacggctccgcgtacattgtggagagcctgagccagctgacccagggcgggggcgcctgtgggagtggcagtggcagtgggcctctcccctcgcttttcctgaactctctccctggcgcggggggcaagcaaggggacccttcgtgtgctgcacccgtgtacccgcagatcatcaacactttccacatagcctcatccttcgggaaatggtttgagggcccagaccaggctttcccgaatacctcagccctggcggggctcagccccgtcctgcacagcttccgcgtgtttgacgtgcgacacaaaagcaacaaggattacctgaacagcgacggttctgccaaaagctcctgcgtatccaaagatgttcccaacaatgtggacctgtccaaattcgatggctttgtgctctatggcaagaggaagcccatcctgatgtgtttcttgtgcaaactctcctttgggtacgtccgttcgtttgtgacccacgcggtgcatgaccatcgaatgaccctgagcgaagacgagcggaaaattcttagcaataagaacatctccgctatcatccaagggatcggcaaagacaaggaaccccttgtaagttttctggaaccaaaaaacaaaaactttcaacaccctttagtttccacagctaacctcataggccccggacacagtttttatggtaaatttagtggcattcgaatggaaggggaggaagctctcccagcgggctccgccgctggccccgagcagccccaggctggtctcttgacccccagcaccctgttgaaccttggcgggctcaccagctcggtactgaagacccccattacctcagtccccctggggcctctggcttccagtcctaccaaatcctcagagggcaaggactctggggcggcagaaggagagaagcaggaagtgggcgacggggattgcttctctgagaaggtagagccagccgaagaggaggcggaggaggaagaggaggaggaagaggcggaggaggaggaggaagaagaggaggaggaagaagaggaggaggaagacgagggttgcaaaggactctttccaagcgagttggatgaggaactggaggacaggccccatgaggagcctggggccgcagcaggtagtagcagcaaaaaggaccttgctctctcaaaccaaagcatttctaactcccccttaatgcctaacgtgctccagaccctgtcgaggggcacagcttctactagttctaattctgcttcttcctttgttgtctttgatggtgcgaacaggaggaatcgtttaagctttaacagtgagggcgtcagggccaatgtggcagagggcggcaggaggctggacttcgctgacgaaagtgccaataaagacaatgccacagcaccagaaccaaatgaaagcacagagggtgacgatgggggc

SEQ ID NO: 10267 - DNA, 1152 bp, Homo sapiens
acttgaagcattatcctctccggggagcttaagagacatgcactgtctcctcctgccccatcagaatctgcattttcacaccatcctcagggaccatgcattaaacttaagacactctctgcttcactccatcttcaccaatacaggtaccaagcacagctcttctgtccttggtacctgtattgctaggtaaccagggaaggtcagtcttagattccctgtggtccctgggaggtgcagggatggagatggagaagagggggacgcgcgcacagaggtaaagaagtctccccaatccgccacatcctgtggctcaagggtctcagggcatctaccactcccccgcaacagccggctctctctcgctctgtttatcagccagtcaataagaaaaaggtagttcttacttaaggaggcagaagtcaactcggcaggtcgatcagcactctgtctgtaaacacggtttcccgtaaaatcaatgatcttcagttacagagggcagcctgggaacccagtgggtccccgcacttttccaagcagccctgccagcctgacacgcacacctctcttcaggctccctccacgttctgtgccccttcccagtacttccctagtgccagggctagctggtacaggttcacacccctcctcccttcctgcagcccgcttctctgctggtggcacccggaactccctctaaaaaatgtccaggtattctgctcacaacccccaatgttgcactcaacatatgggcttcaagaattcagttagattttaatagagcacatctctccagtgagaaagttaaagggaagataggaatgacctagctggctcactgtctgcttagcacttaaatctgccatctgaaaggtaatcttgtacagaagaattccagcaccttcatcaagtatcccccaactcctgctcatcttccaagctcccttggaaccacctgtaaagcccactgcatctttgcaaatgtcaatctttacttttcaaagattgtttaaaaggataaaactctaccctgttaccctgtatctccctattaatcaaaacgttcatctccctctttaaaaacatgtgctgatgacagttttatcctgttcccttgaggcagaactgggtaaaatgcaacagtttcaggga

SEQ ID NO: 10268 - DNA, 1120 bp, Homo sapiens
tgggtggtttctgaagacagacacagcacatcaggcagagtggagacttctggctgccagctcggtccttttatgaggtgtctagagtcagctcccctgagaggaggaggctgagatgaggtaacctggttctgcaggtcagcagggaggctctgccctgaggctgtgtgccgggctctctgataatgcagcattttcgctttaatgcatctgaaatgtggattatactattaattactgctggacaaagagggattagtgcagctggcccactttcccctttgcacttttacacttcccctttgctagggaatgggccaaaggccagcgggttttcctgtcatccgtcttttgttttagcggcagtggctgctgaacctctcgtggggatgaatggggaacggtgcagagtcttgaactccatttggcacacgggcgatgcaggtggcacagtttccttccccacagctgggcattctgtgccaggctcctagggtggctgctgggtggcttctccccagcagggcgagtagcagtgccctgcagcatcttcgctgttaaagggccttgctctgtggtgggagctgagtgccaccttcccatggggcgtgcctccgtgggtgttctgatgctaatggaagcccccaggtgctgtgtacctttatgagtttttttttttttttttttctttgagagggagtctcgctctgtaacccaggctggagtgcagtgatgcaatctcggctcactgcaacctctgcttcctgagttcaaatgattctcctgcctcagcctcctgaatagctgggattacaggcgtgcgccaccacaccctgctaatttttttatttttactagagacggggttttgccattttggtcaggcttgtctcgaactcctgacctcaagtgattcgcctgcgtcggcctctgaaagtgctggaattacaggtgtgagccaccatgactggcccctttgtgagtttcttaaatggtcaagtaaagtacaaaaggctggccctgccatctgctgctgggggatggaggttttggtagccagcaattagcccatgatattgtatttgagacattctgaatgcctaagtttggtactaacacc

SEQ ID NO: 10269 - DNA, 1495 bp, Homo sapiens
tattacagagatatcaaagacacgacggtgggcactctgtcccagcggatcacaaaccaggtccatggtttgaagggactgaactccaagcttctggatatcaggagctacctggaaaaagtcgccacaggcaagctgcccatcaaccaccagatcatctaccagctgcaggacgtcttcaacctgctgccagatgtcagcctgcaggagttcgtcaaggccttttacctgaagaccaatgaccagatggtggtagtgtacttggcctcgctgatccgttccgtggtcgccctgcacaacctcatcaacaacaagattgccaaccgggatgcagagaagaaagaagggcaggagaaagaagagagcaaaaaggataggaaagaggacaaggagaaagataaagataaggaaaagagtgatgtaaagaaagaggagaaaaaggagaaaaagtaaaacatgtattaaatagcttttttaatttgtaaattaaaatcttacaaactaaatcagtgtgctgctagagggttctttttcacttgacatgcttattagaaagctgacccaacaagagctctctgcctccggtcactcttgctgtggtgctacgtggaagtgaatggagactgatctcaaatctgaactgcagctttcgctgctgtgagttggggatatgatagtcagctcaggcttcagattgtatgagaaaaatgaagagaagtcaacaaatattttggtactcttcattcatttatctctaaaaccaggagttgaattttcctcatcttgaaagactcttggggtctgtttctggtattttacaaaattgctaagtggaatgcatgaattgcattatgttctctggtaacacgtagagttcagacccttctgaactctgttgataataccacaccatgttctggacccatagctctggcatcctcaggggttgtgatccagctccatatattgtttaccttcaaagatacaattaaatggcttgatttttaagctgtgttctagtcgtttttgacttcgggagtagtgatctgtagtttccagaagcagccaagacagtcttcgattggagctgccttaagttctcttgcacttggtatcatttatgaaagagcatctcattcccctaaatggaaacaggcagtctgctgtagtgaggagagttctctgagcccagaagacccgggttccagtttgtacctcagatccctcatttatgaggtggtaggttgcagtccgtcatctctgaagtccccagaacagtgtttcaaaagggacacatttaccacactgcagcaagttgtaagtacctcagaccacaggccaaacaggcatgttactaagaatggaacaatgtttcccccaagataagtgcacaggactcctagaggaacaaattaaataaggcactaaatcatttgacatacagtagtcacggatattaaatttcctctcttgaacagatagaacctctcaaatg

SEQ ID NO: 10270 - DNA, 2147 bp, Homo sapiens
cacctgggtgcatgttggacttccattgctgttgctgttgtccctagacaagcccgttagcaagaagcaccggcaggggagccatgcactccataggcttgggatcacccccgggaaagcgatcttccccgggctaccacccccagctgcagttctgtgttagtgcatccttcaaagctaggagaattctagggtgaccagtgagctaatgttgagtgagcaggtattgacttgaacacactgcaggcctttggctgtctcatgctgtccttactcttcttgggaacagtgagtcactcagctggccagggtggggatgcatcctggtgaagagacagctttccctgaagatgctacagaaagttactgtcagatttcatttgtttctgtttcctgagatcaactaacagaagaatctaatggtgagagtgtcttcattcatgttttacgttttatcaaggcacactggaaagggaattatgtggctgacttcccttggccttcccaagagaagattctgttcttatgtcagtgtggcttctggaagtgtctcctatcctcccatcctccaggcctgtggtgtgacttctgccccgaagttcctactatagtgagtcatctggggagaggccactgaaaagaggccttcccttcccatttcctcccctgcctccttagaacacactctaagtcagaacttaatctaagaagaaggaagctggaccaggaaccttggaagtcagccagccctagaacagtcagcctaaattttggccgtaatggcttttttggttttttgttttgtttctgagatggagtctcactccgttgccaggctggagtgctgtggcgctatctcagcttaccgaatcctccgactccctggttcaagcgattgtcctgcctcagcctccggagtagctgggattacaggcatgcaccaccacacccagctaatttttgtatttttagtagagacggggtttcaccgtgttgtccaggatggtctccatctcctgacctcatgatgtgcccacttcggccttccaaagtggccgcaaagtggcccacttcggccaaagtgcacttcggccttccaaagtgcattacaggcgtgagccaccacgcccggcctggccttttttttttttttcttttgagacacagtttcactcgttgcccaggctggagtgcagtggcgcaatctcggctcactgcaacttctgcctcctaggttcaagcagttctcctgcctcagcctcccaagtagttgggattacgggcatgcaccaccatgcctggataattttttcttatttttagtagagacaggatttcatcatgttggccacgctggtttcgaactcctgaccacatgtggtccacccaccttggcctcaattatgtgcattttggtatatttacttgtatttcaacatcttgtgagtttgaaaaacctgaaaggccagaatgcttccttttatttctcaccatttgggcagcacctaagtggttttgtaaaatgcagcatctggtgctgtgggtctctctcaggccttgagggacacttccttcctccccactcgcctcctctccactagactttggttcctagagggcgtggggccgggtctgaggttcttgcctgccttccctcccattggtctttggttgctcatccctctaactgcaccccttcttggtccttcctccacagacttcagataatagataagtcattagcaaaccagaccgaatctttagggtgaagagctccccaaagccatctggtgaggtcattgtggggaccagggactgattatttgtcacctggatcacaaagatgggactgtctgctcaggctggtggtgacaggatcctgacccgtggtcctctcccgctccctctgctccaccaggacacatgtataggacactgtgctgtgtgcagtggagaaatctccctgggccaggggaaagttcagacagtgcctctagattgtgttttgcctcctccaatgtagagttgacatctggaccccagagcccagcagggctttctgtcagacatgctagggtggtagaaatgggccctccaggtccccctgcagtgcactgggcagagacctccggaaagccggcagcggg

SEQ ID NO: 10271 - DNA, 1586 bp, Homo sapiens
aagctcctttgtgcctctacgtggagagggtgtggaaagttatcacattaaaagatggaggatttgctctgttttttttctttctgtccatttgctgcgtgtacccactctagtaggcattggctaaatgttgtattttggcgattcatcaacctttgcagaatatgggctttatagaagcaatattcttggccatcccgcctcattcctccagtgtggagatgacaagtctgggtgtgagagggaggggtccgggcatcatggttcagcgtggcactcctttggttgagtttggggcatgagatcacagtggctgcacaagagagcagtgtgtacagtaggagagacatttatgtaatatatattttattaacctgttagatgtccacaaagtattataaatcacgtgcctaaaactgtccatgtagaccaaggcctgccctcggcgccccccactcttgcctctgctctgcacagtccacgtgcactgcaggaccggagcgacacatgtcttccctgaagggtgttcagtacaaggcgtgtcagtttgtggatcagttgatccaagttactccttgtctaacctgactgacatatatttgaatactgtggttttctttcttttttttctatttgctgcccttcctggaggcagtgggttccagaagccaactgattgtccccctgccaagtcaccaagggaagctgctaagctgcttagtcccctcggtcctgcttgtagggtcttcctgattgtcaacagctgtctgggatgcttcagtctcctaaaactggaaacgcagggtgcgagcagcacacactgcctcccgccactgccagccggagtgagcggcccgagagtctctgcaggttcccctgggggctgggggccgctgaggcctaatatcaagagccaggaatgtcatgtacatggaggtgcctacggacgtgcctggtgtggtttgcaggtaggatggatgttcactgtttgaccgggtggggtatccttcctctctgcagtctccttcccagtatgcgtaaacacccttatagttctaattgtgttgatatttctgttctttctgaattgagagaaaatcccattcgttgtctgcagatttggaagtttgatgaggaatttggttcttgaaacatctgtctttttttttttttttgagacagagtatctctctgttgcccaggctgcagtgcagtggcgcgatctcagctccctgcaacctccacctcctgggttcaagcaattctctgcctcagcctcctgagtagctgggattccaggcacccgccaccacgcctggcttatttttgtatttttagtagagatggggtttcaccatcttggccaggctggtcttgaactcctgatctcatgatccacccgcctcagcttcccaaagtgctgggattacaggtgtgagccaccctgcctggccaaaacatttgtcatctttataaatggtcagaatagaaaagttagctctgccagtatcttcaattacttattacaagaatgtctttcatcatcttacttggagcattttccaatgactggctcttgagagccc

SEQ ID NO: 10272 - DNA, 1135 bp, Homo sapiens
ttatctcctgccctccctctccaaaagaaaagacataaattaaactaggaactgagagggataagttagacctagcactgccaccagcccagtgctctctcagagaatcacattgccttgtgtcattctaggtggccccagcagatggcttctctgatcttgccatgcaagtaatgacgtctccatctaagaactacattctctctgtgatcagtgggagcatctgtatattgttcctgattggcctgatgtgtggacggatcaccaagcgagtgacacgagagctcaaggacaggtagagccaccttgaccaccaaaggaactacctatccagtgcccagtttgtacagccctcttgtatagcatccccactcacctcgctcttctcagaagtgacaccaaccccgtgttagagcattagcagatgtccactgcgttgtcccatccagcctccactcgtgtccatggtgtcctcctcctcctcaccgtgcagcagcagcagctggtcgctggggttactgcctttgtttggcaaacttgggtttacctgcctgtagacaagtctctctcataccaacagaacttccggtacttccagaaccaactcacctgacctgcaactcaaaggcttttttaagaaaaccaccaaaaaaaaaaatttttttaaagaaaaaaatgtatatagtaacgcatctcctccaggcttgatttgggcaatggggttatgtctttcatatgactgtgtaaaacaaagacaggacttggaggggaagcacaccacccagtgtgccatgactgaggtgtctcgttcatctctcagaagcaccttggggcctcgccagggccgtggtcttcaccgaggcgtgggtgggcagccgttccccaggctgtgtggggtcctgctttcttctgctgagacagtgacgctttccagtttccaccctaatcagccactgctggtcacagccccacagccatgggtatttctgtggtctcctcgcttcattgaagcaaagcatgagccttcctagacaagggcagctggggaggggaagggaccggaagtttgtgaagttgaacagtccatccatctgcactgagaggctggatcctgagtcccggggcagcaggatcc

SEQ ID NO: 10273 - DNA, 1193 bp, Homo sapiens
aaaaaagaaaagaaaagaaaggaaaatatttgaaaactaacagggtattacatgatagtaaagcttttaaaataattgcttagtggtgtgataatggtattaagtccttatattttaaagaaacatgctgaaatatttacaaatgaaatgatggagtatctgggattttgctttaaaatatcagcaaagaggcctagagttaaaacagacttggccacagattgataaagttatggggagggaaggtggctgttacattattctctacttctttgtgtgttggaaagttttcataaccagttaaaaatacagcagctgcacactgcccttgtgcatgcatagtcttcagtgctgagtggctctgaagttgatcgaaggtataaccactgtcaggttcagttaatttgagtgattcttagaaaaataaatctgattgccctaagaaaataactaaaagccgccttctacagaccagggaaatactatattgacatagagttctgaacacttctctcttgttacaattttacacatttaatggctaggatcttgtcgtgcctgatggaacatttatacacagagaagatggtagaagactgtgaacaccgtctcttagagctgcagtatttcatctcccgggattggaagtgagtattttgaagccaaagtaaatgtattgcctcagcctcttctcctgtgtagtcataattacctgtatttattaaaataatcagtaggaaactctttttgttcagttctgggacagctaacacactccaatcccctgaaaaactattctttatcactttcagaacattatctaaaagcagagtcagcccactaccagcctgtaccacacatccttgttcaccacgactttggaagtcagggtcaaaatgtttctgatactacaaagatctgtctagtaagaagtatggcacctgtgggggtggcaaaagcgccttcagatatgtctctaagaagataatagtgcagttgtatttttattgatttgcagtggatatggtaattggcttttatttatttattcagagttactgaattaagtctgtcttaaggggtttttgtcaataagtgacaacttgattatctaatttccctctcattctgttaacaaaaagcggtgggggtgggaggatgaactaggagaaggatccgtattacagccagaa

SEQ ID NO: 10274 - DNA, 1223 bp, Homo sapiens
tagctgaagaaatgtttctcatttcctttttcttgtatcatttgaacaatcttattcaaatcttattattcagatgatatagaataattgaataattgtattttaaagcattgaacagaatatcccaaatgttatgttagttgccagtttgatgctagtgaaatttatgttcggggtattgttaaagtggaaaagaatgctgtgtgtcaagttaacatattgggatctgtgagatatttacatgttttggatagctgctattgcagcaacaactagcaagtgactacagaatttctaggttccccacccacttacccctgtctcatgccacactagtttagctcaattgtgaacattttaaccaaacttaaagatagatatgttggtaataactgcagttgttgacatgtacttggctgagtcgctgtgctcatcttagtggtacacgtcaacagtaaagttacatgagtggtctcacggctgttgctgtactctttcctcagtgtcgagaagcacttacaacccgccaaaagctgattgcccaggattataaagtcagttattcattggccaaatcctgtaaaagtgacttgaagaaataccggtgcaatgtggaaaaccttccgcgatcgcgtgaagccaggctctcctacttgttaatgtgcctggagtcagctgtacacagaggtagcattcatattttttttttaattatcatttctgttcctttttggattcacactctaaagctttatatatataaacgttagtttcctcccatatttgcttctttgagtatttttcttttttttttttttttcttgagacggagtctctcgctctgtcgcccaggctggagggcagtggcgcaatctcggctcactgcaagctccgccttccgtgttcacgccattctcctgcctcagcctcccaagtagctgggattacaggcgagtgccactgcgcctggctaattcttgtatttttagtagagatggggtttcaccatgttggtcaggctggtctcgaactcccaaacttaggtgatccgcccaccttggcctctcaaagtgcttggattataggtgtgagccaccgcacctagcaatttttttttttttttaatagagatgaggttttgccacgttggcatcccgggtctcaaaactcctgccctcacgtgatcctcccaccttagctcccagagtgctaggattacaggc

SEQ ID NO: 10275 - DNA, 1114 bp, Homo sapiens
tattcaatgctgtctctctctttggctaagaaagacttctgaggcagatggaaggaaggaaggaaggagggagcgatacaaggagaggctttccgattccgtaatacacctggttgtgcaaagttcacctctacatataaagtttttgttttccaagtcattgaaccggcgacatattctaccggccattttggttgtggcaaccccaattcccttgatttttttttttgtgacagcaaatggaattagagtaggccgccctgcccgggctttttaagaaaccccagcaacccccccgggtaaggagcgccgctctcccgcccgccggtccagggtgtgtgcggtttccagcacggcctcctccttcgccccactctgggttcgcgggtcggcgccggcggggcggggctcggcagggccacgctgccacgcccagcgtctccaccccctcatttaaatacgcggcgccggcgagtgcgtcgagctcgccgcggactcaagatggcggcgtgtggacgtgtacggaggatgttccgcttgtcggcggcgctgcatctgctgctgctattcgcggccggggccgagaaactccccggccagggcgtccacagccagggccagggtcccggggccaactttgtgtccttcgtagggcaggccggaggcggcggcccggcgggtcagcagctgccccagctgcctcagtcatcgcagcttcagcagcaacagcagcagcagcaacagcaacagcagcctcagccgccgcagccgcctttcccggcgggtgggcctccggcccggcggggaggagcgggggctggtgggggctggaagctggcggaggaagagtcctgcagggaggacgtgacccgcgtgtgccctaagcacacctggagcaacaacctggcggtgctcgagtgcctgcaggatgtgagggaggtgaggaggtgggacgaagccgggagggccaggcctggtgcgggcccgagggtgttgccggccttggaagccgctgacgccggtcggctgctttccttgcttcctctgtgctgcactcgctccttccctctttgctcctcactcccaggcgctttcagggaaaaggataccactc

SEQ ID NO: 10276 - DNA, 1230 bp, Homo sapiens
ggaaatttagaaaacctaaaacagtcctgtttctgaattaaaatgtagctgcttttagctgtattttaattgtggggtctgtcaactacaacttgggatctttattttgttatgtatataagctttgtttcttttctgacttttcttatgtggctaaacccatttccagaagcttcacatcagtcaagcttcatagtaattgtgatcttgtatcccttaaatttcctagttctttttttccttttcttttagagcatctggtatctcacctgaaattagttgcagaatattatatgtatgtccttttgtttctacagagagggttgataatttttatcagatatcagaggatagtgactaaaggcgtttaacctcctctgcagaggtgggaatgtgcttgaggtctggtagtggggtctggagccgtccgagttttggagtgtgagatacagtttccttactttcctttcagatgcccactggtctccctgtcatacatgcccagagctgcctcagctgcatttccatatggtggggtgctggctggaaccttggaggatgcttcattctgggaacagaaaatggacttttctcattggcctcatgtgctgcccttggagccagggggctgcatagactttcagacagagaacagctcccggcactgtcttgtgacctacaggcctggtaagtagtgctggggtctcccatagcttatttgggagcacagtggtagagaaaagggaaggagggtttgatcctaccctttgggtggctgtggtaccgctcacaggctaacgaggtgtgttgtagctcttgctactacagggagtatggtggctccaagctcccccacagagcctgcctccctgctccttacgtgtgaggactggagcatattctgccaggtactcctggaagtgaattagccacttaggagcccctacagtttagaacagtagtggaacaagggggccagctctaggtcattgagccaccttgagatcactttcgtatcttctgcctgcctcttacttcccctgagagaaaggcccagattagggcagccatgtagtagcccggctggcatactgaaatggacaacagtggctgtgtgtgcccagccagctgaacatctctgcctctggaatcagaggtggaacgcataacagcagactgtgcttcattcacaggttctttctaggctaagcggcatgaatctaaattcct

SEQ ID NO: 10277 - DNA, 1214 bp, Homo sapiens
aaccccgtctctactaaaaatacaaacttagctgggcgtggtggcaggtgcctgtaattccagctactcgggaggctgaggcaggacacttgaatccgggctgtgaaggttgcagtgagccaagattgcaccattgcactcgagcctgggtgacaagagtgaaactctgtctcaaaaagaaaaaataaaaataaaaaaaacagaaaatgaaaaccactggtctaagagaatctgctagagtcttgagaggaagacttccttcttcctggcaagccccagtttcctttttcagaactaaactcatgctgcctcttgttttgcccgtccctgcccatttccagagttcggcgtgtactgcagccactgccggagtgaggtccgtggcacgcagtgtgccatctgcaaaggcttcacgttccagtgtgccatctgtcacgtggctgtgcggggatcgtccaatttctgcctgacctgtgggcacggtggccacaccagccacatgatggagtggtttcggacccaggaggtgtgtcccaccgggtgtgggtgccactgcctgcttgaaagcactttctgaacctacagaagttgggtattgtctgaaatcccagaggacccataagtgccggtgacaagctgtctgtcaggggagaggctccagaacctgggttcgtccccagtgagaccggaggatgatcccccaaggactgcgcagcatcagctcttggtgggcctctgccttctcttctgtttggccacctggtgtggatgtcactgtgtgaagataaggacagaagtgcagagctgcgctttgtgtgttgtctatgtcggctgagctaccaaggtggaagttttcatggagaaaagcacctggctccagggccagtgttacagtgttaccctgtaaggtgttagccttaaaccaccgagcagcgttctcttgatgccagtgcagagaccagagtcagatgcccgaggacagtgggtaggaatttcatcaacaaatggacctatggcatcatggctttagaagctggtacatttactgagctgatggacagtggccttctaaaatatgacacttaaattgtaaatatgcactgtacttaaggattcttaagatgtatttttttgttatttctcctccagctgctatcccttggctaataaaattctagtaatttgaaaaaaaaaaaaaagagagaaagttaaac

SEQ ID NO: 10278 - DNA, 1233 bp, Homo sapiens
agctacccagtagtttgggttttgccaagtaaaacatgtcagtcctgaagcgagcaagttttcctttgagcagttgcagtgccgggggggcgggaaggtgatgcttcatgtggatggcgtttttctggtgcatttccacgtggcaagaattaggtctgctgctccagggattttccctgtcagccctgcatgctcattctgggaaagcactcagtatctcttgagtggtaactcatggagagtagctaggatgtgaaacagtgtgtttcattgcatagcaatcagtaccatttgcttattttagaattttcaaagttcttcaagcgcttgcctcagcctgagttttcacttgctttggtcccttccataagcaaagagaaaagtagacgcgatgtgcagcctatggtgtttgggaaaaatttctccagatgagttggggccttccattatctaatttattttacttaggaagaattccaggtttggaaactcaagactcagctgattctccctgaaataatctaatcacctgcttttcccttccctgccttagcctttcagcaatggattggtgactgtgatggttccccagctgcggagggaaaacagccttctcctgtggaatgtctttgacttgaacaccccagtccacaccttcgtggggcatgatgatgtggtcctggagttccagtggaggaagcagaaggaaggtgagtgggagaggcctgctgcccactttccttctgagctctggtgacagcggtgccagtcagtgttgccatggagtccagtaaagaagacatagagagagctgggctttaggaaccagagagccagggctgttgccacctttcgtcataggtgagtaaagggactatataaggctgctgttactcttccaaattctgtcctcttccacaattgtcagcgtagtctctcttgcttggaagagatatgctccagtaagagacggaagatagagatttgctgttggattgtttctgggactgaaagactctgggctcagaagtccagggcatttgccccttgccactctgttgatgagggagacccaaggtggtctttagtactgcctactacataccctcagttgtcttcacaagcatgtagtgctctgtctcaaaaaagaaaaaaaaaaagaaaacagatgatgtgatttcctcagtccagtggggaggggttgaccggtagttttggatggaaataaagttt

SEQ ID NO: 10279 - DNA, 1202 bp, Homo sapiens
gttttgatgtatgtatgcaggaggcctagctttctcttacccaccaattcaacacaccactaaagccaagaaaaacagcatcaccatgctgctgtagagaaaagtgaggctcaaagatgttcattcctttgcccagctaatcagtgagctagagctaggacttgaacccatgcttgtgtaaaccggtattctttcttctgcccttaaagtcttgttagaaaattgcaacatcttcctgccacccagcctctaatatactttctcattgataagctgttgccttccttttattttcaccatccttgtttagaccaaatgtgagtggtttggattgtactggaagagtcatgggtggtcactctcggcaccatttactgtaacttagtttatccctgggggatgggactgtgcaggggaggagtttttcctactggattctactgacaaacactgttttcatcttctaggtacattgaacggaaagccttccttgaccgagtggatcacaggcagtttgaaattgagcgagatctcaggctgagcaaaatgaaaccttgatgttacgggctaaatcaagagcagcttaatcctgtttacaatgtgagctttttgtgcgtctgtgaaatgttttacagtgtttctcatcatctgtttcccagcaaggtcttttttttttctacattgaagttctgtctatgtatcttaatcacaaatggtttcattcactttacttttaaaaatttgtccttaaatgaataaataaaataaaagttggtcctgtgagaggataatgaagatgacgacctcgctcaccttccctttattctgccgcaaagtcccacccagttcaagacagcacattccaggtctgtccaggctggcagaggtcttgccaggcatggtgaagatagctgaccaacctgggtgtgaattttccggggccaagaggctctttctgcagccagccttgccccgaagacctagaggaggcggctcactagagtgactggaatgccaggccccttcgcagcttgttctcatttccactcgggcttctcttctgatctctctttctcctgaatggattcctactgatggcatgtaaggctgaaaataaggatatattattgctgaattagctgttttttcccttcagcctttttcctcttcccaaagaaaagttaaattcagatatgctccca

SEQ ID NO: 10280 - DNA, 1233 bp, Homo sapiens
attgcaccttgacgctgtgccaagtgctgttttagccctttacgtgtaagatacaccacagcctgtgagtaagcatttgctttgtagattaggaaaccaaggaacatgcagtaaataactggcctagagtcacacagttaagctggaagttggaccttggcatgtgactccaaagccctgcctgaagcgctgctcctcccctccttgcaagcagagacctgccacacagagcccacagaggtctgaagaaggcaggatttcctgttcgtagctcaggagagcagacagtggtgttaagcaggaaaagcacattagaattccagtttacttacagtgctctccacaccaggaaggaaatgccccaaatatgaacatggcttccactaagataaatggccccaatctaggggattcccatttgcatcagaaaaactgttaatatagagatcagagtttttacctgctacatctttcatattttctttccttaggttaaaaagatcaagtggcatgagcagccttttggggaaaattggtgccaagaagcagaaaatgagcacccttgagaagtccaaactggactgggagagcttcaaggaggaagaggggattggtgaagaactggccatccataatcgagggaaagaggggtaagaaggagtaggttttatgccttggaaaatcctcagaaccctgaaatcaaatgatttattggagacaaactgcccactgtaagcaagcaggagcttttcatgatggaactaaaaatgtgagcactttggtttgtcagtaagtctctgttccagtgtggggcagggcctgtcactgggaaggccactgcgggtggagggaaggcggggcatgtgaggagtactctcaggggccagtcacatctgccaagctgaatttgctgaattacagctccagtgaactgtaagttgcctagtggttggatctggcctgtggtagcagccttggccttatctgaatcatttgtccttctgagaaaccaaactagttcagatccgtcaaaaactgagccaatggaatgcctagatgttgcattattgtgaatttttttttgtctgtgtcattatggcctggggtggggctttacccttggctatagcctgtgtgataggccaggccctcagacagcaccccaggccatcacttgcacctctttctcttcgctgtggaatacaaagagaatgttcataacctacgtattca

SEQ ID NO: 10281 - DNA, 1198 bp, Homo sapiens
tgagactctattactacccctaggcctgaaagggcaagagtgggagcagttaatggcaggggaagaaagggttaggtggaatggacctcctgacaggagctgagaccttctgttaagtgatggacttcccccagagggaagccaagggaataaatacccagatctgtttcttctctctctgcagcctcttagggtactccattgccctctgaggcttattaaagaatattctgacacttgttaaaactgtgagaacactttatccaaaactattgcagtgggtctcaagactatctctggggagagagagagtgctcaactccgaatacagcaaagacagctggggatttttagcagaatcgggaggcaggtggtcagtggatagaaaattactaagaggagacatcaaggagagggtgattcttgctcaaggcagggtagtgtgatcagatatcaagggtaggggattctctctacactgacttagcacagaattctttccaaaactgcgctgtgcaggccagcaagggcaggggccaatttcaagccttagttgagaagagggctcagtggagtctgactaaagtttggtttaaggagagtcttcatcaggctgtcctcacagagcagctcctagagcagagagccatgtgggaaagggtatagagggaatctaggggccaaccaggagctaccttgggagctatacaagtgaaatatttttcagtaaagaatgctgactcccttataaacagggtaaagtgaaatttgaccaaaatcagtttctttgaaagccctgatggaacataacacattacaaggatatgtctgccaagtgcctgagtaaaagtccttagagttgtacgtgaaaatgtacgtgtttaattatgatactgtgaaccttggatttctgagtagatccagaatgactttcaaggttggtatgctcatttttatgaaatgcatctcaaaaagctttacagttacaattgtgcttgggaaaagacgggtccaagaggaattcagctgatctggggtatctgagtgggcacattttatccgtgcaaatattagtatctgtcagcagactccatttgcagagtatagaaagtcttttcaagggaaggatctataggaataatctaatattttaaaagaaaattaacacagtcaagtttttttcccacagacttttttc

SEQ ID NO: 10282 - DNA, 1139 bp, Homo sapiens
cagctcactgcagcctccgtttcctgggttcaagtgattgtcctgccttggccgctgagtagctaggattactggcacccgccacaaggcccagctaatttttgtatttttagtagagacagggtttgattatgttggacaggctggtctcaaactcctgacttcaagtgatccacccgcctcggcctcccaacgtgatgggactatagacatgagccatcatgcttggccttcttgattcttgaatacggggttttgaggtgaaagcatttcatgaaaacttaagttcatacacaagagcatcatgaatattctaaaagaggtatctgtgctttttttgtgaccacaaaatattacttcttatgaaatgtttacactaggtgaggaaaagttcattaattacctttaaaccgttccttattttttttaagattttaaattgtattttggcttttgcctccagtatcctttctggttgctctggtttgaattaagttcctattatgctgcagcacatatcaaccttccctaagtaaccatttcctggaatgtgaagcatcggtgccattagcagaccatatgcagaaatgtcgtgtacttgcatttcttttttgtgcactctataaggctggttgtgactcagatcagcttaactttttatattatgttatttcactaactgctacagtcaaaatgatcaaatctttgtacaatagaaaattatttaaattttatttttctactgacatttctaattctagtgtaaatgtttatcaataaaaaattactttcaattctgagttggaattatatttctttttggtggctaatgagtttaatcttttgtaataaaattgacttcagttttcattttttaaataacttaatatctagcatgtgtaactttttttatgttctacttcttactaatttatgataaaattcttgttcaaagttgtgattaaaccgtacttaacatgtgaacttgaaattcttattaactctacttgctgggccatatattcccatcaagaaacttttgtttgattctgtgcaggaataggtgagtattgatacagtgtgtgaaaatgtattattttaatagtaagtccacatgaagagaagcttcgtcgtgtttg

SEQ ID NO: 10283 - DNA, 1216 bp, Homo sapiens
aattagaccacttatggctgggcgcagtggctcacacctataatcccagcactttgggaggtcgatgtgggaggattgcttgagcccaagagttcaagactggcctgggcaacatagtgagaccttgtctctactacaaaataaaaaaaaattagctgggcgtggcctcagctacccaagaggctaaagtgggaggatcacttgtgcctgggaggttcaggctgctgtgagccgagaccacgccactgaactccagcttaggccacagggcaagaccctgtcttaaaataatattactaattttggtaattaacttatcaaaactatagtgacatatacacgggcagaaacttataagtagagttgtaatgcagccaaatattcttacaaattccctaacaagaagctcaaatctttctcacaggcaaattgtaaaaattctagttttttgtttaaagagctgtgattttcaaaagtatcccttcagtttaagaaatctggggaattggtaacttttcttatgggaaatgattgccatcatctctactgaaggatgcctcttactgaaaaatgtcttttgaaggagttcttgcctaaagcattctttggatgtaatttcatacactaaacatatagaccagtagttagtgggcccctcctcttaaacagtaacttttgaagtactgatacatgattaaaatgttagatatttttcactggagctaagacttaaaattagggcattttgaaaggtgtatttgtttctgtttcttgtttgatatattttggttatctactcttttaaaaaactaaacgtataaaaggtatcttcaaattactgagtgtttcatccatcccagtaggtgaagtattctccagtgaataaatctatatatatatatagattttaaatagcttgagcggtgtagcttgaaatgttttcagggaaagactatttgaatcataaggaatagctttgattttcttttttatgtctcaaatatagaattatttgggggtggtcactcagatggaagaatattggcaattgtgttgaacattttaccttatatagttttgagaatttttgccaaaaactgatttcttagaaatatcctcccccagctgtgctttggttttttggtttttttgttttgagacggagtcttgctctgtcgcccaggctggagtgcagtggcatgatctcggctcactg

SEQ ID NO: 10284 - DNA, 1733 bp, Homo sapiens
gaaagattccaaagttgtccccagcagaaacacatgtgggagcctttgattggaaattgctacagcactgtatctccacataaatgactatgtctgctctttatacaggggggaagatcatttcctgttcgtatttctttctgagccattcttctaagtcagaatcatccatatttattttttaataatcttttattattcctttcatcttaagagtatttgaaatattcttgccatatcctgtctggcctaaaccttagtttactttgacttataccatgtggtccccaactctttaactgtctgtccttatcagccaggattctgggcgatggtaaagttcgcctgggtgcagtatgtcagcatcctgcttatcttcctctgggtgtttgaaagaatcaagatcttcgtgtttcagaatcaggtggtgaccaccatccctgtgacagtgatgccccagggagaagtgtgtaaggagcacttatcctagaaaggccgtttctgaagactcagcaggaccatggctgcctcattgtcatcttctgggaacgtcttaggaccttttgaaagagcccagcggacacctgcgggcttgtgtgcttttccctcagagacaacggttctttccagttttgctctacacagttccgtatcttcagagctcctgcagaattgtcagggactagtttgtggaaaggtctgagagttcctggaggctataattagctttttgggtttttcttctttgccttagcgttgaatttcaggagaaaattgcagtcagttcagacatcttggaaagagtcccatctctggtcaagcagagacttttcctctgttgaactgaggaacacactgtgcatttcttccttctgttgtgagccactcttactcttttcagggctctcttgtgacaaacatgccaatcactagcactttgcacccctgggcttctccatttcccattcacagctttgatttccagagctgaggcctttaactggagacctggaggggcagggcccaagggcaagggccgcattagcacaggcaatcagggagggccgctgaaggacacttggaccgtccacctgccccagcccaacagtcagtcatctgtcatcagctcagctgagcagccctggatccctgcccgactgtggctggctctttgcccggtttttccctctgtctgtgcccctggatggcaggctgaagtcagaggggctgtttcattctcagccccctcagcagcactgggggaagaaagcattgtcacaacaggttctttctggccctcacccaacagcctgggcacttggccctcctcctccttgacagccctcccccttcctgcaaaggacaggggcgacaggggttggtgttgggattggctcccgctgcctgacaaccacaagtttatttggaaggctagcgggaagcccagcggctggcgtttcccttgactaaggaaaagggtgcccatcagagtggggcgggcagctttgggaaggacacaagaagcagtgagggtgtaaagaggatgctggcctgggcaggccagtccagcctggccactagcagaataccaagcagtccagtggattatcctcgtggctaagcaagtgtctgcaggagcagagatggctggaaggggcctctgcacacggaagatggcttgttcagccgattcacctcctgaggatgcgtgcagtctcctccaagaacacatg

SEQ ID NO: 10285 - DNA, 1171 bp, Homo sapiens
cctgaaacctggactccaattttcaatgacgtttttgtttttctctttcaagcctaactatgggacagctttacgagaaggaaaaagatgaagatggattcttatatgtggcctacagcggagagaacacttttggcttctgagggccattgctgggctaggtgcaccgtaactgcttgtgtatcttgtaaatagccagccattttcagttattataccagaacctcttcacatagacctattagtgcatttgtaactggatttatttcttaatatattggaaggttttgtttccttagactagtaaattatcatacagagttttattttgagtttttctttttgtgcattgtcctcatgcctgtattctccaggaaacttgtccttctggaaatcatattgaatgatatttctatatcgaagtgaggtaggtgcggtattaaagtgaaagggaaggtgatgcatttattctgggttatgcttgaagtgttagatggctaagtattaaaattatccaaattaaatccttagcagtcagaacacttgcttcactagaatatgccaactgccaatcatgttggactgagctaatttgttcctctttctgaaactattaaggtaaataattaacaataaaaattctcttataaaggcattgtactgtggccatgtcctttattcacccgcatttggatgggccagagaagtggctcctacatctgccagaccaggaagagggcttgtggaggtcatggccgcacatcctgggtcgggaagccatggccagggtcatgaggagagacattgttttgaataactaatatgttcacatgtttgaggtatcgggacaatacaaaaaggtatacactgagaaggcttgctcctgccagcttcctaaccacctctgccctttatgggaaattacttttactggcttcttgtttcttttcaatattttaaaagtaaataggataatttaaaggacagtataatggcacagtaaaaaggataattaaatatgaatacatatccttattttctttcttcttttttttttttttgagaccggagttttgctcttgtcacccaggctggagtgtgatggtgcaatctcagttcactgcagcctccgcctcccgggttcaaggagttctcccgccttgcctcctga

SEQ ID NO: 10286 - DNA, 1882 bp, Homo sapiens
aagcgtgacgcttgccttgaaaatacacttgccaagcaagaacattattttcttagattgtacatgtattaaggtggcttagggctgggaggtaggtagagatgaatggagaagacagaacccccacaggctgcctgcagcaggtgttgacagggctgttttcaggaaatgggagaaagactcttgtaattgtcacagtctctgagaattaacctgtttggagtcccagagccccaagcagcagaagggttttctttcagagaaatttgtatgtgttctgaggtcgatttcatcagtcctgacctccaggtctttgaaagaaacggctgcatcttggagttactaggaaatgaattcccagcaagtcctgagtgtcaggagcatctctggaatgatggtactcccacctcggagcctggtaacatgttcactcacacactgagatatcttagaagaaggtcaccttttggttctctttcctcttctaggccaaggctgcaggtgatgatgaggccatgttcatagatgaaaacttctgtactgccctggaatatgggctgccccccacagctggctggggcatgggcattgatcgagtcgccatgtttctcacggactccaacaacatcaaggtacgtagcaaccctccacagagcacacttcctgaggaagctgcattgtgttggagccagggcatggtgggcctggaggataaaattaaggaagggctttgggctgggaagaggagcaggcagaggagttccatgccactcacaggagggccagagcctctgaccttaaaggatttgggttttttcctaccaggggcagaaggaatactaattgtttgcatttcttgaggatccagggaagtctccgtgcattatttcagctaattaagtcagccttatgaggtgtagaaactgttgtttcccatttttatagatgaggaaatcaaattttcatagaaatgcgtctattcatccttttgacatagtgccctaggcagtgctatgcatttgttctttgtcatctgtaacttgagagggtctgagttgaaataaaagaacacatgagccttttcagctggaatatactaatctctggattttggtggtaacaacagaggcaagaggaatgggtagatagctgtgaaaaaatgttgagagtgcttctcagcttcaaggtacattcttatctcccacaggaagtacttctgtttcctgccatgaaacccgaagacaagaaggagaatgtagcaaccactgatacactggaaagcacaacagttggcacttctgtctagaaaataataattgcaagttgtataactcaggcgtctttgcatttctgcgaaagatcaaggtctgcaagggaattcttgtgtgctgctttccatttgacaccgcagttctgttcagccatcagaagagagacaaggaattaaaaatttctttttaatcctgttaccaaataagccatttgtctcttctctttacttttagaatatcaacttttttccccagacttctggcctaatgaatgtttaggattttaccatcttattcatttaacaaatttgtattaatgtctgccctgtgccaggcattattctaagagattggggacacagcagggaacaaaagccaagttcctgcttttgtggaaattgtattctttctttggggtagggagaagaagtagacaaacaaaaaaacaagtaaatacatgttctttctggtggtggtatatactaagaagaaaaatggagcagggtaaggggacagaggtgctattttagaggtggaaggaacagtgctactttatggtggtcaggaagacctctgctgggcatttcagtagaggtctggagactgagctg

SEQ ID NO: 10287 - DNA, 1116 bp, Homo sapiens
catggaaatcacggagaagatggtttcaggtgactcctgctctctctcatactcatcgggtggttggtatgctgctttcagaggagggctgcctggatttcattcccgctaaataacaggtttctctcccagggatggtgaagcatattacaggcagttacaaggtcacctaccacccagatggcccagagggccaagcctacgatgttgacttcaccccacccttccggcgaatcaacatggtagaagagcttgagaaagccctggggatgaagctgccagaaacgaacctctttgaaactgaaggtaaagtgacaacactcactcctccgttgtaaggccctccttcctgttcagctctgaatttgattgggtcagagctagaatttcccacactattctctttatgtacatttttacttggctagtgtgatgtctcctgccctaacttttgcatttgtgtcccagaaactcgcaaaattcttgatgatatctgtgtggcaaaagctgttgaatgccctccacctcggaccacagccaggctccttgacaaggtgagaaggccctgccttcttgtacatgtcctcatctggtgctgaatggttccctcttccctgggaaaatgaaccccactggggagagttcatttctgcagcttcacaggaaaaccctagagagagaacaagagaattaacagacttttaactgtcatactaagctctgtgccaaataatttatgtgtgtgatctcagttaatcccgtccagcttttaaaaagctatagggtagggtgggcatggtggctcacacctgtaatcccagcacttcaggaggccgaggcagatgaatcacctgaggtcaggagttcgaaaccagcctggccaacatggtgaaaccctgtctctacaaaaaatccaaaaatgagctgggtatggtggcgggcacctgtaatccccgctattcaggaggctgaggcacgagaatcactggaaccaggatgcggaggttgcagcaagccgagatcatgccactgcactccagcctgggcgacagagcgagactccatctcaataataataataataataataataaataaataaaaagctataggata

SEQ ID NO: 10288 - DNA, 1212 bp, Homo sapiens
gagtgggacatggttggggaaggctgagaagaggataatgtggccacctggtcacctgtaaagtaatgactactctcaagttatatgacagtaaagtaaaggatagtccttttttaatagtggcccctgaatctgacgtccttcttgggctcacattaactaggtattaacagttgagtgagggttccagaggagaccagtggtcagtgttcatttgaattgttgttactgaattacatttctttttcactcagaaattataaatcagaagaagaatttattcatattaataacaaactgcgtcggggagacataattggagttcaggggaatcctggtaaaaccaagaagggtgagctgagcatcattccgtatgagatcacactgctgtctccctgtttgcatatgttacctcatcttcactttggcctcaaagacaaggtaagcgttcttggcctcctagctgtggcctcctagctttctgtttgttttatcatacctttggatcagacataccagtgatttctaactgctgcttttggtttaggaaacaaggtatcgccagagatacttggacttgatcctgaatgactttgtgaggcagaaatttatcatccgctctaagatcatcacatatataagaagtttcttagatgagctgggattcctagaggtaaggagagttccttgcctgacgtgatgagctgccttgcaatgcttgcctcctcctctcccttgccttccttttccaaagcgtatcctgtgtcaggatccttcatgcctaatgagaatgtccccttttcttgccatcgtctctgttctaccttgtcctgattaggaaggcaggacctgacttccaagataatggacaaggtatagggccatccacatgctaatgatgtcacattcaatatgtattcacgtcattttgcttttttgtagcattaagaaatattttttgattatatgagaaaggcaaacacacgtaccataaaacaaattcaaacaataaattaaatagaagcaaaactgaaagtgctctttcactccttctgactaacttccctacccaaacttgagtttgatatgtatccttccacaccatttactgggcatatatacgtatgtacatatgcatgttgcagatggagtgcacatatgtaaacattttggaggagttttatttttggtttaaatatgaatgaagtcaca

SEQ ID NO: 10289 - DNA, 1514 bp, Homo sapiens
ttttaacctaaaaatcttgatatatactgtaactaccacaatgacatgtagtgtgcaagattttagaatttaataaagcatgttcaaaaatcggtgctaatgcaggaccacaaaagtattcctaaaattatgctacattgagtaatatgattttttgtttgtatcatatcaatcagaacaagtactttatgagtttgaacatatggggagaatttagcaaatgaactttttatcttaaaagttaatagattctccacatgtagcaatgcattagtgaagctattatctcggaaagattaaaaaataaagacacaaatggagggaatttctgcaagagagaggggaaaagaaagggagagaggagaggaagaagtcttaatagaaaatgtgcacattggccgttctctctttccgtacctggccgagcaggagacgccatcatgggagctgacatctgccacaacaaggaccgaaaggttcggcgcaaggagcccaagagccaggatatctacctgaggctgttggtcaagctgtgcagttttctggccagacgaaccgactccacattcaaccaggttgtgctgaagaggttgtttatgagtcgtaccaaccggccacctctgtccctttcccagatgatccagaagagtgaagcttcctgtccgggaaaacaaaacggccgtgattgtggggagcataacagatgacgtgcgggttcaggaggtgcccaaactgaaggtgtgtgtgctgagtgtgaccaacctggcccgcagccgcgtcctcagggcagggggcaagatcctcacttttcgaccagctggccgtggactcccgcaagggctgcagcaccgtcctgctctccggtcctctcaagggccgaaaggtgtacgggcattttggcaaggccccgggaaccccgcacagccacaccaaaccctacgtccactccaagggccggaagttcgagcgcgccagaggctgacgggccagctgaggctacaaaaactaaccctggatcctactctcttattaaaatgattttggatgcaaaaaaaaagaaaagaaaagaaaatgtgcacattgacattacagtggggggtgagaaaaagtctcttaagtagcattttacatgaggttcctcattgttggtttactccaaatgttgtcaaacttcacggtacatgagaattggctggagggcttaataaaacgcagatttctgggtctcacccccagattctgatttgtagttgggtaggaccccagaattcaaattttaagttcccagctgatctcatcctgctggtctggcgaacctcacttggagaaccactggtctagtttgtaacagattgacagactactgcttcattctacatgtcggtaaggaaatctaaaaatgttttcatgaatactacataggaatgatacaattcgttttcccagattttacctattattgttaagaataagctgttaaagtttgttacacatataaacaattattccatatc

SEQ ID NO: 10290 - DNA, 1715 bp, Homo sapiens
gagactccgtctcaaaagaaaaaaaattctcccttggccgggcttggtggcttatgcctgtaatcccagcactttggaaggccgaggcgggtgggtcacctgaggtcaggagtttgagaccagcctggccagcatggcgaaacctcgtctctactaaaaatacaaaaattgtccgggtgtggtggcgggcgcctgtagtcccagctactggggaggctgaggcaggggaattgcttgaacccgggaggcagaggttatcgtgagctgacattgcgccactgcactccagcgcggaagacagagtgagcaaaaaaaaaaaaaaaaaaagaaaaaacaaaaagaaaaaaatctcccaaggcagtcatgcatttgtatgccactagcatttttttgttatagaaatattcaaagtgtaccaacgtagagaaaatagctttaaacaaagcccatgtgtacctatcagtatgctttaactgttgtcacctttctgccccacttttatctatctcgaacacccctttctgcacactctttaaaccactgtattaacaaacacattagactgcatcctgccagacctacccatacagacatcaaagtaatgattattgcttattgcctgacctaggatgtgagctccatgagaacagagactgtttacctctcgctcccctgcacctaaaacaatgcctgcttggtgtaaagtaagtgctcagtaattttttaatgtgtgaccaatgaaataacttcaagagcagagagctcttttagattagaggcacatactaagtgccagcattcaacaaaagacagacggaaataagacagatgcaaatagatctcatttattaactgtgtaatgcagctgccactgcaattaaaaaaaaaattttagtatcaacctttcaaattcctcaaaattaaagttatgactaacttcaccagcaaaggaaaaattgaaggatgtatcaagttgccatttctagcccatcaaatcggctttataaagggaagcatagtatctggtattgacgaccttgtagagaaacaggccttttcctgcctcagggaagagagctgactcaaagtaaaggctttgctagaggcagtcggcagagtatttttagcatctaaaatgctcttccacttcggcagtgaccatgcgatgtaatcaaaggagaatacgtaagtgtatggaccaggaatggtcactggagtgttgatgtaggcacaacacaagaagtagtcacagaaattgctaagtctaggtttatgtgtgcatgctgtggagtgtctctgtggtggatttctttttaagaggcagaaaaaaattctaatttaaatgtattaaattataagttctaatttaaatgtattaaaattaaattataagttgataggattattattgacacacaaggagctccaaaagagatcgtatttttattagagacaagccagttgggattgaaacaaaaatggaggggggtatagccctgtgtatgttgcacagaaaaagtatctgaatgataaaggcctaagtgataactctggacaaggaatttggattttgggagtagtgcagaggtagaggcatttttgtgatttattgttctattttttcttctagaaaaatgtaagtagtcatatataattttaaaatataaaggagaagaggcaaaatgttgaatggcacctgaggatcctatattcat

SEQ ID NO: 10291 - DNA, 1086 bp, Homo sapiens
gactgtctcttgttattacagcgagggtataactctttaggatcccgacccaaggtttggtgtgtttaccgtggccctttcctggtgggtcctgagctcaaatttatgtctttttccttgttataaaattgccaaaagctcagcccatcttctcaggcttccaaccactatgtttggaaatgaaatatgccttgaaggaaaaaagctgccaaatgctggccttgcagtttttgcagatcttggcccccaaaattcttagtcatagtgcccttctgatgccttcaaacagatatgggtgtgtatgcacgtgtgttattttgtccatcttttctaattgttctcagtaggaaatggggctaagaaacctaggtaacactggtagaagcagaggtgctggcgacacttaccatagagtagagcataaagtccttatcgtgggcacaggatctggtcattattgatggttaaatggctggacatgccgtgaactcttctatgtcccagtcttcatctttgaaatcactgcatccctaggacaagttttctcaccatcacagtgttgacagtccgggccagatggttctatgttgtcaggggctgccctgttcatggtaagatgttttgtaatgcctggtgtttacccactagatgccagtaggactctaccccacaactgtggccactgaaaatgtctccagacatttgcttctgtcccctggggatcaaaatcacccctggttgagaacttggggtaatttaagtggtgctccggtaaaggccattcaacatgactcactgtgttgatgttatgttttctaacattgactttcctttaaaccatagggttcgaaaccgccaagtcttttgccctccatggtgcacatgtgatcttggcctgcaggaacatggcaagggcgagtgaagcagtgtcacgcattttagaagaatgggtaagtgcttgactgttgttgttttttttaattgtcaaatacacatgccgggctaaccatatggagatttcagtggagtgtgtaaagtttattgctcttggaatcatgtctttatttttaaagtcatcttcacttt

SEQ ID NO: 10292 - DNA, 1114 bp, Homo sapiens
tttccatctcattgatacctgccttgcgttctgttacctggaagcacaggtcaaggtagtcttcttgttccactgatttgatgggggtcaggatgctttcagaaaggaagtgagaagagtggcttagaacagggaaaatgtggccgggcgcagtggctcacgcctgtaatctcagcactttgggaggcctaggtgcgcagattacaaggtcaggagattgaggccaggctggccaatgtgatgtgagaccccatgtctactaaaaatacaaaaaattagccgggagtggtggtgttcgcctgtagtcccagttactcaggaggctgagccaggagaatcgcttgaacctcggaggtggaggttgcagtgagccgagatcgtgccgttgcactccagcctgagtgacaagagcaacactccatctcaaaaaaaaaaaaaaaaaaaaaaggacagggaaaatgtccaggaaggatgtggcttagctgaagatcagcttcagcttgatcccacgggaagctctggagggtgaattgtacagcagagttggtcctgactgagaccagggcctggctgacctatggcagtcagcgatgagccagtgtctgctggggaagagggcggcgtggacatagcctctcaagtggggcaggaaggggtagctgtgagatactagctaattcttacagcttctgggttcaccagcccggcaggagaatctgggttgaggaggcaacatgacaacgtgcctaccttcaccagagagactgctgtcaaaaatcactccatccatgcaaggaggaacgatgcagacacagaaattctctgctgtgagggccagcactgtagtatttactgacctgctccccactccacacctccaagtgcaggtgtacagactgacatcaaacctttcatcccgccctcggcctcatacctgctttccactctgtgacctatttacttcgatggagtcattttcaaataacttttgtttagtgaaactcaaggcttttcaggatgctgtgctaatgtcttccttttttaattgagtaaatatattatacacagctgggtaggttgtttccttgctggccttactgctacaatttgaaaa

SEQ ID NO: 10293 - DNA, 1108 bp, Homo sapiens
ggctggtctcaaactcctgacctcaggtgatccacctgccttggccttccaaagtgtggtgggattccaggcatgagccactgtgcctggcctgtagtttctttttcttttttcttttcttttcttttttttgagatgaagtcttgctctgtcacctaggctggaatgcagtggtgcaatcttggctcactgcagcctccgcctcccaggttcaagcgattctcctgtgtcagcctcctgagtagctgagattacaggtgtgcaccaccacgcacggctgatgtttgtatttttagtagagacgggatttcaacatgttggccaagctcgtctcaaacctgcctcagcctcccaaagtgctgggattacagatgtgagccactgcacccagcctgtagtttcttatttaatgtctgtccccccttctcttgacagtggtgtttttgccttcacactactgtatccctggtccataccgtaaatgttctgtaaatgtttgtaaatgaatacatgaaagatgaccaggtgctgaatcagtgagagtccttaatgtacttcttatcatttatccctctgaggtaggcaagggattatagtttagaatgtgtaaatacgtaaaagataaggcaaggagacctgctgagagtcacacagcaagcccccaaggtcccccaggctcatggtcaaatgacatgtaagggacgtatccagcggtgtgggtatgtttggagggaatgaatgtaaggagagagaggtgaggcacaggagagacaggatgagctttagaggtagacagctctcgggtccagccctagctctctcccattctaactcttgggcaaggttcaaaacctgattaagattcatgcataaaactgagatgttagaactacctcatgggcttgtcttgagaattaaagacgttatgaacttaaggcctctacagtgtgctagatgcttaagaaatgttaactactattgttattggcttgcagtagaaattaaagattatgaatgttcagcattcagaatatactagatactcaataaccattattgctgtcattattaacattattttccccagctttactgaggtatgagtgac

SEQ ID NO: 10294 - DNA, 1192 bp, Homo sapiens
ctttagaattatgggctggagcagtttttaatactctatttattttaggggaggaaaatgtttttctttaaccacaacattcatgcaataccaactgctggcagtttccccagcatttaaggaaatattgttgtaagacttttatgttctgtacttcaatcagctagagccagcagtatcccaatggaaggaccctcaacagaccattttcagcattttgctacaattaaactcctctggttttagccctcaggcaatttagtacctttttacatatgcacattatgaacttttgaccagggtctagcagtcatatattagaatgctgctcttgaaggcaggcttaacaagttcctctgagtattacagttggagtcagttgtggaaaaggtaatttaagcaacttgcagcgaggccattcagaatctcagcgatgatcctaaatatctttctctcttgctcacgctcttttttttttttcttgtttcctctggaagctggtagcaggagctttcaaagtctgtgattgatcttttattcagtagctaacgagggctgtgattctattagcgcactacaaggcaagagaacagtgatttaatgaagtgtctagtgagccggccatagatttatcctgttgtcgctaatttgcagcgcacttgccagcataaaggaaactgcactcacactgctattaagcaggtatttccttagtaaattgttgtaaggtcaggtacagttatctgagcaaaagcaatgccttacctcttcagtgtctgcaaatgacagccgccgtgctgagcgctcactgaagtggaaccgggagatcagaggtccgtctccaagtcgcccttagcggaggcaggagcagatgaactgccaagtaggagtaatagagtcataattggtgattagaactggaaaggtgcaataacatcttaatacaaactggcgtatgttatagttactgtcagttgttgtaaactcgtcctgccgcctggactagttacgcttcccttgattagctctgagaaacgaggcagcgggcactggggcagccacatagacaacatctaaatttttgttgctttcctgggtcttgccctgtccttactgtttcccttgggcacgctgttcaccccttaggacatactacagtaaccttttcccaccaccgtgggaggactgtgat

SEQ ID NO: 10295 - DNA, 1128 bp, Homo sapiens
gctctgagtcaagcagacctggaattttctttatgggccattaggaactgtgtgacgctggggcatctgacttcacctttctgagtcttagtttccttacctgttgaataggtctaatgatatcattatggcagatcagtgggacgattgagtcaaataacatgcccaatgcctgtttctcagagtaggctttcagtgggccacatctgttgtcactattattttgttctttctgccatttgggatgtgctttctgataatggcactaggctgccttgttgcctcctgcatgtagaacacagaacttcgcagtctctgcagagtgtctaaatcctgctctgggccagccctttcagaaacacttcaggagatcaatagttatctgcttacctttctagctgagatgagattttatgcttgttactagcagatcaatagtgaaagcaggttctgttaagttttttataggagtcattaatctccctcagcctcagtttccctatctgtgaagtgagtctaaccaggatgataatgaagagttaggtcaagtgaggttggcagccagacacccaccaccagctgtaacataagaacagatgttctctccagacccccaggtcagctgaggtcgctctgcttggaataatgaactgccacattgaggatttttttcctctctttacttggccaaatatccgagtgtggaagctctcactgtgaacctgctaacatacatttcagtgtctacaaaatgtcttttgagagaaaacagcagggacattcgtgagctcttttttttttctaaccactttcccagtgagacttcagttttcattctccccttagcagctttcaaatatgtacgtaacacaaatgttacatgtttgagcatttaaactgaatttggacagggcttctatttccagaaccttctaactctatttctttgtgacctgatagtcttgctctccagggtaaaagaagaggatggaaatggctgtggggcgcctgagctgggccctggcatgatggcaagatgccgttctgggttcactgggatggctcaaggggagtttggaaaccctcctaacatgtcatctgaaatctgggaccacagttccggctgga

SEQ ID NO: 10296 - DNA, 1164 bp, Homo sapiens
ctaccgcacagatccacacaggagggattgcgtaatgcacccagcagagttgtgctcaactgtgattttataaaagacacagaaacacatattaaatagacaattcttctatcagccctctaaactggcataaccttgaatcataattcaatgaatgcatttctgtgagaagtgaaggtaataagctccaagtgctttcgtttcctttctttctttcttaatgcagggaaaattgagatgggattctcagttaaaacccaaacgacgggcctgggggttgtcacaatgtgatccctgaggatgttagccccaatgtctttctgtagccagaaccaatagaaaaatgagaggaggagagtagaagcagaatagcaaacaatttttcctttcatggtctacctgtgtgactgtgtatatgtccagaaggggatgtggttggggaagggcatagtacacatatttgagcagagtacatgtgtttcatttcttgctcatacgacatgtccagtgtgggctggcatgttcttctgcacagtccctgagggacccggacttatagagtctgtgatctcacagctgctacatctggcacagatggccttcttgatctccagttagggcgagtcacaacagcaattaaatggtttggtctgaagtgtcacgagtcgtttcctcttggctgcctactggctaggccagtcacgtggccctgaagagggtgggaatgtctcatccccctgtgggcttagaagaaaaccagaggtctgtgcacactatggatttttactacaatgatgccctttcacatacagcgagaaggattaagaggtactgtattgttggttgataaagtcaaacttgtgaacagagcaaaagggcattgcttggtcattgcagcttccacccatgcaccttacacagaagtttgggccctaacatggaaacttttcaacactggccaaattctgtttgaagcactgtattgagcataccatatgctgaaagacttggaatgcaaaaacctaaggccaagggcacttctcaatattaaaccctcagttgtaatggaggcatcaagactataagacccaagaccttaacttttgtgctccttgtcttgtggagggaacatccatcctcaaaacagaaacctgtgagatccct

SEQ ID NO: 10297 - DNA, 1149 bp, Homo sapiens
gcccttctagtgatgtaccgggaacctcctatgggaaccagagctctgctaattttggggacaagaaatgatgaaaagaagtgccttgttcttggggcatcacagtctcatgacagagtgcatgttgtcaaatgcgcgtttaatcttcttaagctcaacttcatgcaagagacctaggaattcacagagtgaagatgatttctccattcccttctccgagcagagctcttgaagaagatgggagttaggagaagtgaatcttttgttttcgaagcctttgtccttgtgagtctcttaattggggtgtcttgtaatgcaaagtctttaaagatgtgtgttcctgaaactcaggaggctgctctatcccatggttcaaccaaagaaccagggccaaagcagtgctgaaggaacaactgattctcttggccctccttagagtgagggtacaactggctccaaaggaaatgttggcacttccagagtaattctgacagtactcagatttgcttcatgtacccattctagaaccttacctactcaagtgtaagatgagatgccactgtggtatcttcaaaggaatttagaatcatgtcttaatggctccattaagaagaattctttttctcttttctctgaaaagcatcccaggtcataaaatgtaatgtgggattgtaggttttgtgggaagatgcacttggcagcaattccttgagaggaggccttgaaatgtcagggtcccccattcatcttcccaagctgggattgacccagtgataacataatgataatgcagctgctttcaatgtcaagccatcaggcagcgggttgggggggttgcttggcccaggaacccgtgccctgatgtggagttggtaatctagagggttttgagttaagtgcttttgacatggaaaatcaggagccaagggcgaagctgccttttaaatgctctttctgaaagagtccactgcagatgtaattgagcctctcaggtgaagagctttattcgagcaaagctggttagtgttgcatacctgtttgggggaatattttaggcatcctcacaaaactgctatgtgacattgctgaaggtccccagcctccttgctcccaaacacttcaagaaggaaaatgctgttgcagaaatgt

SEQ ID NO: 10298 - DNA, 1308 bp, Homo sapiens
tgtcctaactgagcattactgtaacatagaacagctgaaacactcctcaaagctgagaggagggtttgggagagaagcaggctgtggttgtgaacaggtgcctcctccaaaaaaattctcttccttggatttcaaaatgacccccgttgacaacaaagcctttcacgctgtgtttattttttttcaggtctaagtttcccccaggagattttttttttctaaaggaaaaggcagagaagcccccagaccggagccacaatcaaatgcaaatatgacaataggacccatcctggagagaaaaagccttctttttaattagaagcctggaaggacataccctttaattgctgcacttgtagtgtcagggttatcaatatccgtggctctttcattaataaactggcgagtcagaaagcagcaggagtgggaacctctccccacccaatcccctctcacgccccaagctctatttaatcaactgcagactcaatcaaatggggaaaagaacatgtaaatcagctcattcattctgctggccctaaataggtagaaggaagggaaacatgaaagggagccttcatctgttttcctgcagatgcccggctcgtggttaacccaagcaagaggtagttaaacggccccgcagattgccagtgactccgggaatgcctaggtttatgtatggattaacacagtgatagaccctgagtagcaaaagacgaagactaattacctgacagagctcccctccactcgcctgggtcattgaaattaatttctgctttcaagcttggcagaaagcagctgcagaatttcagttcaatacttaaattaacggggagccgaaattatttctgtgcacaggcagtattagaggagtggcttaccaaatagatcttgatcgcagacacggaaaaaaggattattcctccccttttatcaagagccgtaagtccttggaaaatgcaaagagggggaaaaagaagaaaaacagcaacgagtttattggagagttaacacttaaatactccagtacattgagtgtgacatgcctgtgtaggagactgtctgtcccccaaataattgacaatttctctccatctaacaagaaaatatatggcacttttatatatacttgaattggaatccctaatccagagataatttgtgaatatccattctatagcatcccatgttgtcaagaaggtgttgacttactgcaaggttaaggaaatgggtggagaatgtagggaggaggtggaggataaaggataggactaggaatcagagttgggatttgaacccagg

SEQ ID NO: 10299 - DNA, 1458 bp, Homo sapiens
taaaatggtatcaaagatgggctggcatgaggccagagtctatccttgatgctcacctgaggtctagggctaaactcttgcctttacctgttccatgcttagccgttcctgctttttgcctagaacctcagtgctattgctcacacagacccagctcatgtccccaggccatgaccactgcctccccttctcccacctgtgcaggtgttaagcatcagtacataactgaggagtaggagggcagcagcccaaatctttgatgaagaacctctttcgtatcaacttatgctttggaacgagacactgttggatgggaatctggcttctaacaaactgattggttggactcatgccttattctttcggagccttagttttgtcatgtgtagaatggggagtattgctagctattcccatagggagtgagagagagtgtaagtaaaatgcaatggcaggcacagggatggttgccattatcagttacattattatgaggattattttctacctagatcaggtataaggtggatgtattattggcattcctaggactgttttaaaggaagtacctatgaggcctcatgataagccagatgtccagaagccagcttgagaccagggctcctggtcacttaaaagatgtttggggctgggcgtggtggctcacacctgtaatcccagcactttgggaggctgaggtgggcagatcacgaggtcaagagatcgagaccatcctggccaatatggtgaaacctgtcactactaaaaatccaaaaattagctgggcgtggtggtgagcacctgtaatcccagctactcgggagcctgaggcaggagaatcacttgaacccgggaggtggaggttgcagcgagtcaaggtcacgccagtgtactccagcctgggtgacagagcgagactccgtctcaaaaaaaaaaaaaaaaaaaaaaagaaaaagaaaaaggtgtttggaagccatgtcccatgaattccaaatacaattgaggactctataaaggactataaaaaaagttgtaataaattatgcagacccctcagcagttgactcacctctctggtgctccaggtatttctcagcgtgttcggggtctccctgtgttacctggacagctcctgccatcattagcacacagccaagattcctcgaccacccatgactctggatttatcatcctcaagaattgggggctgtggaaaagatgccaaatttgttcttttcagatttaggttcttctgtgataaaaatagacttggtaaagaagcagatatttctttaatacgtgtatatattagactgtgaatttattcatcttccttattcatcatataagtaaattatatgattggacccaggcataaaacgtgatttgactcccccttgcccatcacagttctggagttcacatatcatttgttactttgaaaaatgaacttttgtt

SEQ ID NO: 10300 - DNA, 1135 bp, Homo sapiens
ttgatttgatcacttagagacaacagcttacaaaatgctaccgagcagtgcctgtcctttctgagaacttgatataataacgttggcttgatctcctcagcctgtgtcttgagggaacaagtaaattaaacaagtaattagatccataatgtttttagaagttagaagatttaaatatatgaatctcatctgagtgtgcagccttttgtctgctgtgtttcctgccaaaagatctcttgacaggaaataaacattaaaataatctttaatcccttgtttggtctattaccattaacaattgatgcactttaattttgtggggttttaactacaaaatggaacggctaagtagtgataattgggtttggaattatacggtcatttatatcaacagagatgcaaggggctgggagggagggtgattaattatttactatttcctggctgtggttcctattatagaattttctgatatgttcttctgtgaacaattatcaccaaatgaaagtaaacaaatctgtgatttgaagccttatttagaagttagtctatatttaggtgatgtgggcttgattttcacagaccctgtgggctgtctgtgtgtgttccttttctcagtaccccagctctgtattcgagcgtggttatctttgtgcatcttaaaatccacaatgcacagcctggggagaagccttggttttgccagggggaaaaaaagagaaacacaacattgagtgaggtctagggtgaataccaaaggtctgttttgaaatgggggtgtgggttattcttctctctttctgatttgcttcagtacagtatgggatggggaagaatcaaaattattatgtcaacatgaggatgaaagttatgctctgttgtttctcataacatttgtgtgtgtgtgggtgggtgggtgtgtgtgaaaggtaggatcacctctctgtgcctcagtctccccatcatccttcggtggtagatcaatgctatctgatgaggccttttttgggatcacccactccaacatgcatgtcctttctctgtcccctcctggtgcctgtattagtctgttctcacattgatgtaaaggactacctgaggctggctaatgtataaagaaaagaggtttaattgg

SEQ ID NO: 10301 - DNA, 1142 bp, Homo sapiens
tggggtgacctgtgtgccatgcatcacacacagactactgtttaaccacctacatcataggtagatcctgcattttacaaatgaggaaacagagctcgagagaagttcaatcctcttccctacagagaggaaaggggaaaaaaatggactttcaagacagctgaaattcaaaacaaaacaatgttttaaaattgaatacagccttttgcattaaaattaccattttaataatagtttaaaagagagaaagagagagacccaaaatagtcaaactgaggttttgggttctggtgatagaatattaaatcataatgaagcatttaatgttttgttgttgttacaattgttgttttaccctagggctatgcaaagtagtttaaggatgtatttatttcagtggggaaaaaaagtggaggatatacatttggaggataaggaagcatgaattagggtggaggaagtgttttctggtctagctaaggaggaaaaattatagacctcaaaataggtgtcatttaatatatatctgtgaaaatgggccaaatagattgcctccgttaaagccgtattggatgttcaaatctcgagttacctgaaatgcaactgtacttcctatatttaaccaggctttttataaactgttcctcttaacacctcaagctgacaaccacatcctgggtggttatttaataccaagtttgactttcttcactttgagggtcctcaaaatagaaggtcagagagtagacttttaaaagtcttgcactgtttacaagtcagatgctttttggcagagtgactctcagctccccccaacaatcccttcttgtcgttcagtagtagatagactctatcagggaaaaataggagaaataaaataagacagcatatggaaggcattgctgaaagtctttttcacaccttaaaaacaaggaagaagagaaatgaaaataaaatagtgagcaacacctcggtgaaagtagaggtgtttgtacagttcagctgctgccttattcaaaaacaggaagaaaaacccactgcccaggtcagctggtgggtgatctccactgaactcctattcagaggctcagtttctctgcaggacagaaatgagaggcacaaaatttcatagctgtcttgcc

SEQ ID NO: 10302 - DNA, 1117 bp, Homo sapiens
ccttaagggccactgatgagcaatcagtgagtttcaggaagaaggcattcaggctgatttcagacagcctaaggtcagtgtgcaagttagtatgtacctgtgtcttattattgaactggtgaatgaatgaatgactaggtcattatgaatttgtagatcagggttttgaagagtttggcaccggatttgaaagccaatgttctcttagtacctaccgctttcttttcctcaccttcctggatttcctgctcttaaggttttttgtttttgtttttctctccaaataaatggtatttattaaataaaaattcattttctcatttatcaaccagttgcagtctttggatgttttaattatataaaaaaagcatggaaactgggcattttaattagcaagtacagccttgacacaaataaaggcatggctttggttatgcagtgcatttatttggttttcttgaaataagaaaaaaagatttcttctccatcaccagagttgctgagtttgacagtgtgaatgagatgacctctaaggcctctacttatagatctgcacggttgggcctgggagctgtactacctcagctggtgggtgataacttactcacagtctgtgctgtgtcctgcactgtccattatctgcaggggtggtactgctgtccccagggaagagaatgctgtccacaaagagccagccatttatactattaaaagaatacacaggagttgaacaatgagaacacgtggacaacgggaggggggaacatcacacaccggggcctgtctgggggtagggggaaaggggagggagagcattaggacacatatctaatgcatgcggggcttaaaacctagatgacgggttgataggtgcagcaaaccaccatggcacatgtacacctatgtaacaaggctgcatgttctgcacatgtatcccagaacttaaagtgaaaggaaaaaaaaaagtttcatcaaaaaaaaaaaaagaaaaagaaaacaccggaaaaaagagactctcttccttgaaggatttaattccaggaattggagaatgtcttgtacatttcgagaaggcaatatagaaaatgcagtgggtagcccaggactcctggtccag

SEQ ID NO: 10303 - DNA, 1140 bp, Homo sapiens
acttagtgatgagcatatggtaaataagaatttaatagattttagtgaaagcaaaataaaaggtcctatcattgtccttaaggagcttacgaaaacagagctatacgcacatccgtagacagttaccacactcaggaatagtggaaaactgacaagaccctggagatgctgtgtggggagggataatgggaacgcaggtcagcatgctctaggaatggtaagagaaactcccaatctgaacggtagtcaaagaaggtcttcttctctttggagactgaaaggctgagagggtacctgccctgctaaggaaatgaacaggacggaagaatgatggagggagaatgggaagtcctcagcacataaaagtttgagctggaaatgaaatatacaactctgcatagtcagcagattttgctgggctgggccagttcagctcagcaaggattgctgggcatgtgcttgaaggagaaaggtgaggatacaaaggcaatgagtacatgatccttgaccttgagaaacctatagtctaatagaggaggcacatataaaagtaattaggtaaaatatagtgcagaatatgcagtcatggagtcatctacagatctgcctggaatacagagggacaagtgtttagtattttccaactgttcacagaggacaagacacttgggcagaagtttgaaggcaattccaggttagcagtacccacttgatatggtttagctgtgtctccacccaagtctcatcttgaactttagctcccataatccccacgccacatgggagggatttgaatcgtgggaggtaattggatcatgggggtgggtctttcccatgctgttgttatgatagtgaataagtcccatgagatctgatggttttataaagggcagttcccctgcacaaactctcttgcctgctgccatttaagacatgtgtttgctccacattggccttctgccgtgattgtgagactttcccagccatgtggaactgtgagtccgttaaacctctttcctttataaattactcagtctcaggtatgtctttattagcagcatgagaacaaactaatacaccacttgaattgctggtacgtctgaggggcttgactcccagtccttcgaacatggaggggta

SEQ ID NO: 10304 - DNA, 1232 bp, Homo sapiens
tttggtgccaattttttcattagaatataatgctcttatattgttggagagcaggttaatcttttttcgaagtaattgcgtttgaagtataatttcaaaatgtattgaatttgtgaataagccttaccattaggatcagtaaatttttcaactttgcaactacataagtagtttaagatctccccgtaaattctcactgtgtggcagttgatggagtttgtgaacagagccttaagcttgttgcaaaaaaatttaaaaagggtaatacgggttgtttcctccatgcaacgtaagccatgctgatggactgaatgcagtctgtaattcatggctaatccgaagagtttgattgagttgatggcggcagggaccagatagacaccttggtgattgtctttggccataagaatagaccaaggataggttttccagagacaccttcatactgtaaacatggtttagacacggtcatagggaaggctgctggtccatcatttgttctgaacaaatggcatttcctgctcctgaccctggcagttggccccagattccttgtcgatgacttggaaacgtccattctgggtaaggtcagcactccctgagagatgttaacaaagtttacctatgagtcttactgtgtagacaatctgaagtcaattttagttacacaatcagcattcccatgtgtcctcagtgtcttatcaatgaactatgtgtatcaagccatactaaactggagtttagcaggacaaaggcaaactaaatgtagaacataacatatcagctgaatatgtctatccaggactgtttttctagaacataaatcatggagctccttgacagtgtatccactgtttttggggtttaataaaaccaactagaatttagacttaaaaagaaattattattccttttggttgtccacataaagtagtccagggctatcatatggctaaaatcaagttatttggttcatctctggtatgtatttataaagtcaacttatcagccattaagatggagatttgctttaaatttttgcagtgtgtgtggcagtcagaaaaacccatatctagttttcaacttcacctctggtgtttttatggcttaaccttatatcattgatccaacatctagcctgatgctggagctcttatttctagcctgatgctggagctcttatatctagcctgatgctggagctcttgaagctgactcttggaagtttggag

SEQ ID NO: 10305 - DNA, 1055 bp, Homo sapiens
ttccaccccagggccccctctctgtctatgggatcctttctcccctctctctaccattttcccgtaccttcccccataagtcactcccaagagcctgggcaggtctttgaggaattgcggctcattttggcagccccgtcctgcaattacctttgggtttgaaagaatagctgtgggtgggcaattgaggacacctctttagtcagggacctttctagcaatccactccctcccatcctgttagccatgcagtggaactctccttccctctctgccccaaccccggtgatggctcactctcagcatcttatgggaccatctgagttaacaaccctgttccaagaagactttgtgcagaacttttgttagggtggtcataccttctcaccaccatttggaagacacagcctaatgctgatgtacttaatgtgccccttccggcatagaaataatgtctgggtaacagccatcaaaatcactaagaatgacattggatagctatgagaaagtagtagagaattgatttaaaatatcattcttgtttggtatagattaaactaggaaatgttctctctgaagcatgaaaatgtttttcccatgtgaagtttagtacaaggatggaaaaataataatcacagtagactttgaacaatgcaactgtatctctgaatatccacatttaaaaatagccttcactgaatgctgaattgcatttcccattaatttttggttttaaaaattttgtaaactttttttttatttggaatttagtcacatccattaaattttccaatctagtttctgtggaaattttttaacagagagaaacaaatagaaacatcttcaaatcttcctaagtgaatatttaaaatgcagaattgcttatcttctgtttttctgtattcagacacttatatctgttgtatatattagtttagacactctcactaatatacacagtatttaagactctaaatgagatttcttaagtattttattttattctctgtaaatggttttgtataatctttaaacatctacactttgcctttgta

SEQ ID NO: 10306 - DNA, 1201 bp, Homo sapiens
gcacctgcaggccgtgcggggtatgagctggaggaaagatgagcaaggatgtataataattaaattgagtcatctagagatggcttacatccctcacttgggctgtgcatggattttttccacatcttgtaaagggctaaataagcaaatgccagaacaagatttgcagagatttaccaaggattgagtgactccaggccaggcttccagatctgcagccagtgaccacactgcctccttattagcactcttctgccttctccggggatggtgctggagggctttggctatgataagtgtttttctccttgctctggactcttgcttgtactcaggggaggctccctgcacaggcagaagcagattccctggcctctaccctcagggggtcaggcctctggctgtcttgcagtctgaaagccccaggcttacaggatagacacttaacatccctgcaaattcatctctgccggcagatcatgaaagaagtccggcgagcgctctgcaacgcagccacagacgacagcaaactgctgctcctcagcgcagtggggagcgtgttctgcagcggcctggattattcctacctaattggccggttgtccagcgaccggcgaaaggagagcactcggattgcagaagccatcaggtgagctgtgctccttttcacacaccctggggtcctgcgtaggattaccaagtaaaaatacaggctgctcagttaaattcgaatttcaaacaaccaggaattttatttttagcataagtatatcctgtgcaatactcgaggtctgcttacatttttaaaatgttggttatttatctgaaattcaaattttaattgggcatcctatattttcatctctaaccatggtcctgccaaaattagggatgctttgccctctaggttagatcccactttcattcttttgatcggaaagattttttatttgctatcaaggcctgagtctggtagtggccatgtgttgtccacactactcccgccccttgcctgatggggagagtctctggttgtctggttgtttgtatgtcccagcactgccgtagctcagcagtggggaggttgatggaggggttccctgggcagctgtgtgtttgcagacccaacggggtacagagtatttccccctttctaattgcccctgggcaaaagttgggatcctggcggtgacatccagtc

SEQ ID NO: 10307 - DNA, 1125 bp, Homo sapiens
ataaaccagccttcttgaaccctcctgccagtgttggcttctggcattgaatggctcgtggctcaccccctggctagggtagatgcctctatcccaaaggctttatggtgttcttgttgcctcgaactgagttttttcctccctctctctctgttttctgaccctctcatcttgtatcgcaggttgaaaggattgtagacaagaggaagaacaagaaaggaaaatgggagtatcttatccgatggaaaggctacgggagcaccgaggacacgtgggagccggagcaccacctcttgcactgtgaggagtttattgatgaattcaatgggttgcacatgtccaaggacaagaggatcaagtcagggaagcagtccagtacctccaagctgctgcgtgacagtcgaggcccgtcggttgagaaactgtcccacagaccttcagatcctggaaagagcaaggggacctcccataaacggaagcgaattaaccctcccctggccaagccaaaaaaagggtattcaggcaagccctcttcaggaggtgacagggccaccaagacggtgtcttacaggactacccccagtggtttgcaaataatgcccctgaaaaagtctcagaacgggatggaaaatggggacgccggctctgagaaggatgagaggcactttggaaatgggtcccatcagcctggcttggatttgaatgatcatgttggagagcaagatatgggtgaatgtgacgtgaatcacgctacactggcggagaacgggctcggtttgtagcttttctttctcttgggtttggctctggccatggcgaaaggggagctctgcctgtagcctagggacatacataagacccccacctccatccccgtctcttagctagccagcaattcccccttcatctctctcacctagagctttgtggactcggtcgtaggcccatgttggttacagaccctcatgcatgtggggaggctaagcctctgatgctccagccaaggtctggaatgggtccaaagttccagactcttatttcaagacacccaaggccatggtaacccctctagacccacttccctgagggcagctcaagtcctcacccccaggacccaagacacgt

SEQ ID NO: 10308 - DNA, 1131 bp, Homo sapiens
ttctccttctgctctgcttgtggaaatcctccttgccctctaagggccaactcccgagtcttctcttctatggggactgaatcctccagccaagaataattttccctcctgtgaactcaaccctttgtatgttggaagcttagggcaccaggtatgctcatgagtagggccgtagtctgtctcctggcatggattataaaattgaagagtgcatggactgtggttaatccatccttgaattccagctcctagccctgtacaaagaaggagcacagtatcttggagagtcagtgtggtgttttgaaaagggcctggttttcggatgtctgtcagtttcttcctctgtaaccttgggcaactttgactttttggatcctcagttttctaatctgtaaaataggcctaagaaaactaggcttagttatgttctgacaattacagatacaatatacatgcagcttgtgtgcccattccgttgttgatgactttgccgttgttggctcgataaggtgtctcatccagaggagctgggaagtgtttgggagatcagggtgagttcctgggtaaattctcaggactcagcagtgtgtttgctttcattgactctaagacactacagattataagatgctctgttattttatgtacctctgaataatagaatcacctagtgagctttcacatgtcttggtgcccagccctgctccagatcaataacatcagtaatctggggggtggacattggttttttcattcacttatttattcattttattcattttcttcttttttttaaatcagtatttaaaaacctctttgggtgattctattttgcagccaatattaagaatcattgtacttttaaaagaaacacctctattatatgactcaatgcttccttatcactgggaatttttattttaatttgtttatagagcccttttagacattctctcagctcctgaggggtccataaccacttcttcctcaaagaagggtctcctgagaattttgtaacagctaacagacaccagaactgggtagtggctaggacctcttcgtcgctgtgcctggaatacagtccctgaatttgcagcccagcaggttcagtgagtttggggagaggtggac

SEQ ID NO: 10309 - DNA, 1083 bp, Homo sapiens
tgcgaaagaatggatttatcttgtctgggttgaacatgacctctgctatagatgggggaaatggcatttgtaagtgaggatagagtgtcatggtcgaagaaagttgtattttaaggttttctttttgctctgtcattgttttcagggacccacctagtaagaaaaggaaaatggaaaactgtgcacaaaaccagaagttatccaacaagaccattgaatcattgaacaaccaaccaatccctagaccagacactcaagaactagaagcttcagaaataaagctagaaccatcttttgaagactcttgtggctctaacactgacaagcagactcttacaacaccaccgagatatcctcagaagttgcttttaccaaagcccaaagtggctttggttaaactacccgtgatgcagttttctgtcatgcctgtctttgtgcctacagccgactcctcagcccagcctgtggtgttaggtgttgatcagggctctgccacaggggctgtgcacttaatgcccttgtcagtaggaaccctgatcctcggcctagattcagaggcttgctctcttaaggagagcctacctcttttcaaaattgctaatcctattgctggtgagccaataagtactggtgttcaagtgaactttggtaaaagtccatctaatcctttacaagaactagggaacacgtgtcaaaagaatagcatttcttcaatcaacgtgcagacagatctgtcttatgcctcacaaaactttataccttctgcacagtgggccactgctgattcctctgtgtcgtcttgttctcaaactgatttgtcgtttgattctcaagtgtctcttcccattagtgttcacactcagacatttttgcccagctctaaggtaacttcatctatagctgctcagactgatgcatttatggacacctgtttccagtcaggtggggtctccagagaaactcaaaccagtgggatagaaagtccaacggatgaccatgtacagatggaccaagctggaatgtgcggagacatttttgagagtgttcattcatcatataatgttgctacaggtaacattataa

SEQ ID NO: 10310 - DNA, 2855 bp, Homo sapiens
gttcagttgaacagtacagaaacacagaccatgagttctgggtttgaaaccctggggagcttgttcttcaccagcaacgaaactcagacagcaatggatgactttcttctggctgatctggcctggaacacgatggagtctcagttcagctctgtagaaacccagacttctgcggaaccacacacagtctccaacttctaaaactaacggtggagtccatgtgtgaaatggcatctaccatttcctctggattaaaactacggactggggacaacagtattaattcgattgaatgtggctgatgatgcagttgcttagcttctttgtgtttctttgccttttgtacttgtaaacagaaatttgcgtataaatgtgagtgtattataaagtttgagatgttgatctaaattgtttttgtgttgcctacatttgccttttcacagctagtcttttcatgttaaaaaaaaaaatgtatttcatatctataaaacctatatagccatttagctgaagcccagcttaccaggttcaagggtacaaacttctcaaatcttcaaaacattttagtcaaagtgtaatatacttaaactgcacctaaaatatctttggcactgcttgttagaaattcctgattcctgttactaatcactaaagaaaccggatgctgccaccgtaggatttaagcagtagtgcttccatgctcttaagactcctgctgcctggaccttcgtcagctttgacacctcttttctgatttaaagacaccaaggaaaactacaactgtctttagctttgaagcagttttcatgtaatcattgccacctcttcgctacatgaactactattgataccagcatacaagtgtacagcactttacacacaagaggtttattgatgtaaaattatcggctagggaagcagcagcgggccaggtgtggtggcttacccctgtaatcccagcactttgggaggccaaagcaggacgatcacttgagcccaggagttcaacaccagcttgggcaacgtaagaagaccgtgtctctggaatttttttttttttttaattagccaggcacagtggcatgcgcctgtgatcccagctacttggaaggctgaggtgagaggatcactcgaggagattggggctgccatgagccatggtcttggcactgtactccaacctgggtaacagggcaagaccctatctcaaaaaaaaaaaaagtcgccagcaacaagcacgtagtgtagtgttcctgctaaatgagcgtaggttatccaaaccttgggaacagggagttatggaaacatgcctatgacttcatcttggggtgtgtcctatgaagatcctttctggtctccacagtaggccagagttgggggctctggagctgtttccccaagtgcatccacaagctggatctgagttttgtcactctaaaattaaacaagaaaaaaagtgggaaaagggcatcccccattaggtttcaatactttgcacttctactaagcttgatagggcaggagtgcaatctacaattattttaaagtgaatttccttccattcaccattctttatcttttctttgaataagaaaaagtatctagcaaggatattacttgtgccttgaggctagcaattataggatagattcatctaaaatatggtattctgcattttggttttttttcttaagtgaataataccagtcttcaaagaaaacaaggtgaagacctattgcttcaataatcaagaatgctttgtgtgttttgaggtaggagcatgatcaagtatgctttggggattttctgtatttaggagatcctggattcttaattgttggctaagttccagtcaagtaggaatcagtgcagcctgtaagttctccacattgacacacacacacacacacacacacacacacgacatgctcctttctgtggcacatgcctgtattactgaaagctaaatcctcaaaacctagtaaggggactaatgattcattaaagtaaattgatggttttgctactaattcctatcccatacatttgacacaaaagaagtgttggtaatggataaataacatatcccgggcagatgagctcaacctagtaggtaagagtttggtttggtcacagttgcctatgagtgtgggtttcaaaagaaacataaagccttaacttagaatttcattatgttttagaatcatcactgccttaatattcaagcatctatttaagtcctaataaaggagaaatgcatgtttatggcttttttgtaaatataaatgcagtgatctatggcttaaaaaatttgtttctgtgacaatgtttgtaaatctagccaatagagtcatttacagaagaaaaatgagcatgtaataatacaagaactgtttccccctcaaaacctgaacctgaattatttgtaaaaactgaaatttaatgattaaagagaagccagaattgtacccttttttgtgaattcttgaacgtactcataaatatgacttattgtattgccttaagttttcactcattgtcttttgaaagccatatgataaaatgattttatttaataatacccagttattttcattgttttttcttttgttcatgaaaatatgctaacagacaattttcctagaaaagacactccaggtaataccagccagatggctgactagaggtccctaatgcttgttgcccccacagaaaaggaccaaaacaacaaatagaatacattttgactagagtatctaaaagaaaatgaggcctggcatggtggctcgtgcctgtaatcccagcactttgggaggctgaggcgggtggatcacctgaggtcagaagttcgagac

SEQ ID NO: 10311 - DNA, 1248 bp, Homo sapiens
cttctgcactccacacgtggtcgcctccatcctccctagtgtctgtcagcttgcctggtcaccaagtcaggaggaagaagatgaggaggctcaccagttgtaggcaagactcttcctctcgggagatcttgtaataatggcccagtttcagggcacagttgtacacattctacttaaatggaggagttcagtgatgccgtggccaaaagagttatgcccatttctaaaagcctggcatatttggtataacttaagcaccaggtaaaatctggtgcttaagttgtaccaagtatagccaagtttaactgtcgttgtgtattaataagatttaatttttatgcttgtgcttttcagagtaaagggcttgctttcaatagtagaatgacaaagcttctcctccaatgacaatctgttagcaccctgttgacttagctcaggacatgagactgacttagctcaggacatgagacatttcctggaagtgatttccatgagaacaaaggcttattcctttaacttaaaccccaaactttgttattttaattattttcaggcaatcatctttatatactttccttacaaacccagtggttgagagcataggccttggtggcaggtgcatctgggcttgggggcttctgccacacttactactctgtgacttgggaagctcttaaggctcccaaggctccgtttcttatgtggaagaagaatagcaggaggactcacctctgcgggttgttgtgaggattaactgggtgatgactgtaagcagctgggagagtgccttgtgtgcagtgaccactgttgctgccaccatgattatgtcacctctcaacatggggtggtgggaggccctgtggatgaggccaaggctgcctgcactgagtgtcccaggccttatagctttccacattctcacgtctgctgccacatgatatacaagtaaatgtattagaagttggtgttcataaaatacttttttttttttttttttttgagatggagtctcgctccgtcacccaggctggagtgcagtggcgccatctcccaggctcaagggatcctcctgcctcggcctgccaagtagctgggactacaagtgcacaccagtatgcccagctaattttttgtatttttagaacaggtgtggtttcaccatattgcccaggctggtctcgagctcctgagctcaggcaatccgcctgcctcaacctcccaaagtgctgggattacaggtgtgagcat

SEQ ID NO: 10312 - DNA, 1242 bp, Homo sapiens
ccgtgggagtatcagagccaccaggccagttctgtttgaacatttccctgaatgtcttggaggatgggatggggagggatgaggagggccttctttggggtcctcctgtctgctgcacccttgaccttgtctggtgtctgacagcagcagcaggtaaagagcaggcctcagtgatctcctgcatttcctctggccctcactgggagctcttgccttgcctgacagttcaccaagtactgtgtactatcttgtgcagaaatcatgagcaggaggaagaacaaaccacttcctctacaaccttcagatttatcagacacaacttttgacagtttcagtttaaagagaatttcaaaagaagatgttgaaagcaatagggaaataaagcggcccctggcctcagctctctgctgcttccacatttgagacaaaggcgccgcagggatgctgggagagagccccagcggttcaagaggtgccccatccaggcgccccgtccaggcagcttgggtccagagccttctttgcacgtgcagcctgctggctgtggtggctggggttctgggcatctgcagggtgcttttcatgtcctgggagtagtggcgtttgcacagaggccgggtcacagagacagatgtttcagaagtttgacctcaaaacagctttcttttcccttgggttgtctggagaaagtgctaaaaataaggctggatctgagcaggcgctgctgacaggccacctggaggttcgagtccaccacgaaggtggagtcttggggttatactggctggagccataggaaattgagatttaaaaaagctattaaaaagattataaatgagatcttgctgtgtttcccaggctggtcttgagctcttgagctcaagggatcctcccaccttggtctcccatactgctgggattacgagcatgagccactgtgcccagccaaaattgggattttgtaagtagaaaatgattaaatattggttccatatagtttgtaagtaaacacaattcttgacttcctcatgtgatctcttcgctgtagccctgaaactcctgagatcagtacaaaaagaaatcctttcttgggaaagaaaagggagtgttatgattggtgtacatacacataggcacacacatatgcatacacacatgcacacaggcacaaacgtgcatacacacatgcacacaggcacacatgtgcgcacaaacatgtgcatacacacatgcacacaggca

SEQ ID NO: 10313 - DNA, 1318 bp, Homo sapiens
cttggacgcttgtgttggaatggggtgatctcaaatctcactcatgattttcgacccctgtaggacttgggcctgcctttgggggacgcggggacgcagggacgcattgagcagaagctgcaagcggatgacccatgggccaagtcaagtctgctgacgtgttttacttggcccacacagtggttttttttttttttttttttcttaaagcttcagtaagttgtctgcctttaaagttgggagcattcccctaaaaagttccggatatccattttctaataataacaacagaagcaaacatttctatgtgacttaccacaggcctggctcagctctagacgactcccatccctttgctcctgggatccccagacagttccgaggtggtgcttcctgtgatcatccccattctacagctaaagaagcagaggcaggcctttaaccgggcactcctggctgtgcccatgttcctgtgtggccaccccttcaggctgggcacggcctctccactcccccagcctcctagcccactgtactcaggttcccccctgctcagagcttgtgggcgtggactttgtaccccccgggcttggagagggcaaggtgactgtgggagtccagctgctgctccttaagttgagttgtctgtcactgacttaccctccctccctctctccctactgtctccattcttctctttcccccttctttctcctgcaccctctttttccattcctcccttcccccttcctttctccgctctctctttccttcactcccttcctcccattcatctggtgcttaccgggggccaccaggtaggcacgtcgcacactacttctgcttcatgtgaggggttcatggtggcttctccctaccttcagaccacacctctggtgggaggtgctgcgtgaggatcccaggggtgaactgagtcaggtcagaggagcagggagccccagcccctggtgtcttcttactgtgtggtctcttccgtgtcaccgcacttctgtggaaggggaatgatgggggaagtggaggaaccactgtccgcctgcggaggggcctcagtgttggccgtgctcatggcgccctcctcctggggctccctctcctctggtcctgcctctcctgcacgcccttcctgcctccttggtgccaggggagccagcccaggacagtctctgtgcctaggccctgccagcctggctgccctgcctccagccatggggggcgggcggggagggagtcgaccagtgcttgtctttgcagaactgctggtggactgaatgtggttctgggggtggccaggcctgag

SEQ ID NO: 10314 - DNA, 1156 bp, Homo sapiens
gactcagtagcttggggctcccctctgctcaggcagacctagggctctgatggctcccatttatgagaacagctgtcacttggaaggacctgctacctgtcctccgagatgtgtttttcataccttgtattggtcctctccaccaataacccctcatggatgagtgattgttactgtgtaggaagaacttggggctcagtgaggttgagccacttttccaagaggccacttagagctggagctcataataagtaggggtctctaggaactgtttctaaacaacccccgaacccagctggtggctcccagaagggtctctggaagcaaggcgactgtctcattgtttcattagtttgagccctacggggccttaggacacagccagcttggagaagtcactctaataacccatcttgccggtgatgcccaggcctcggcagactggctctccgagggtgtctgggcctgggcagccgaggtcttgttaaccccaaatcccacaggactcgcatagagtgcagaatcccggttttctgaattggtgctaaaggctcagtggcctggccctgctgtgaagccacagggcttgtgctctgggagccttggccgacacaggtgccccgccgcctcctctgctgctgcagcctcaagggctacaaagaaagctccttctgcccgtgcagcgtgggctcctgggtcccctgcaggccaccatggctgctgctccagctgtggtccccccagaggcttctccaggcagtgcctgccgactctccggtgcttcccttattttattcctcttccgggcactaagtttcggtttccttttcattgttctttgttggtctgttcattcattcatgcatgcatgtgttggttcattcattcattctcagagtaccatggtggctctgaggacagaggtcagacccagctgggttggaacctgctgctccctagcagtgggcctctgggcagatgttttaaccatagaactcggcttccttgtctgaaaacgtggctccttctaggacagtcaagaaggttcaatgaaatgatggatgtggagccccaggacgtgacctgaggatggtgcttgtcatgttggggtctgtgtccctcccttgggcacattctctccttccttcctttccag

SEQ ID NO: 10315 - DNA, 1159 bp, Homo sapiens
ccccaacacggaagcctgtaagcacactccagggaccagggtggagtgagctgcccctggctacagagctgggaggtggaggtcctaggtttgcaccatgtgcctgggtcaccgagccttcccttgcactcccctgtccctggccagggcttcctcaactctacataagggccagccttgggctttgggacattcaagacacccccacccccaccttctgggtaaaggtctttcctgagcctcagaaatgacgcattacagtggcttcccaaactgcgaaggaagaagtggcgtttgtgggttgtcatcgtttctttgggcaaggaaggggggacccgagcgttcgtgtgtcatccagcgcaggctttgatgaggctgatgagtcatggagccatacaaggaagtttttcatgtaaacggtttgtgggtgaacttgttttttgccctttaaggcagaattttgtttttctttttctcgccctttaaagacaagtttttaaaacgtaaatgagaggcagcgtcttgatgagcaagatcttttgttctgcaggcgtctgcagtgtgtctctttcacagccagtggtgggcagtggaggcccctgagctgggttgctgatctgcacttggggcacaccttggccaggtgtccagcctggaagagggaggtggcctgccattcttttgttggcctccagggctcccacctgctggcctgttggctcggagatgaggccaaacagagactttaaaaagagcagtgcttgtccccacagaggaattaggcccttgcttcaccgagggatcatcagaaaatacccagcgggacagccggctaactctggaagggaaggtgtttgggagagaggataattgaccgggagatgatgcagaacgactagggccctgagggctgttgcccacattctgctcgccggagcaccctggtgcactttcagaaccaacagactgttttgcagaaagccttgagagggacagagaccccctttcagagaaactgaggccactcctaatggagcttgctggcacgtggcagcagaaggccagggtggtttgtttccagcgggggctggcacatgcttggaccattccctttggaaaactgggctgaacctgacctctgtccaggagtacaaggacc

SEQ ID NO: 10316 - DNA, 1199 bp, Homo sapiens
ggattggagggcagttagactgcaggaagctactaaaagcaaaacagtagatcccattggcttatcaagaaagtggccagtggcattttggtggaggagaatgccaagagccttatggctgtcacgtgaagatcagcatccactcagtcggtcagcaaatattttttgagcacctgttatgtgctggggtgatagcatgggctgtagagacaggcaacctgggttgggctgccatccccacctcttcctgtctagaccttgggcaagccgtgcacccaggctgagcctcagtttcctcatttgtagcacaggaatgatgatagtattacattttggcctcatcctgggattcagggaggcctttagtctgatgggtcatggtgcatcatgaacggtgcctgtactcatgtgccctctcccgcctcttcccccagccgcgacaattccccaagcctgaaggaaatccggaacggctgccagcagccgtgcgaccggaagcccactttacctctgcgccttctgcaccccagcccggacctggtgtctcaggaagccacgctgtctgaggcccggctcaagtcggtggtcgtggcctccagtgagatccacgtggaggtggaacgcaccagcactgccaagccggcgctgacggccagcgcaggcaacgacagcgagcccaacctcatcgactgcctcatggtcagccccgcctgcagcaccatgagcatcgagctgggcccccaggccgaccgcacgctcggctgctacgtggaaatcctcaagctgctgtgagtgccccccccgcgtgcccgcccccggggccggtgggaggagactgggctttgctgctgggtgcggctgtgtttgttggttcgagctacgcagggccgggcatggtagagtggcttgtgtgtgagtgcacacgagctggtgtgtgcaagagtgtgcataagcacaagtgtggctgtgagtacaggcatacagggtgcatatgtacaagtgggtgaggcacatgtggctctggttgtgtatctgtgagcatatggtgtgtgtatatacacacgtggggtgcatgcatggctttgtacctgtatgcttgagtgcctgggcacatgtgcaaggtgcatgcccaagcatacatgtgtacatatgtctacatgagtttgtgtgtgtgtgtgaggatctggatacatctgcca

SEQ ID NO: 10317 - DNA, 1471 bp, Homo sapiens
cccaggccaagcttcccaatttgaaggaagtggacgtccgctacaccgaagcctggtgaagctcccagctcaaggcaggaagacgtttgcaaccgcgacaaaataactcttgactaacagccgcagagcagccggtcctggggtcccaccctggtgccctggctgtgagatagatggggagtctttctgggggcggaggggggagggggtggggagggggcccacaagcacgcccagcccccgccgaattcttttagcttcgtaattggaacctttgacctgatctaaagtggactttgtagcaacaagaggagcatcagcgggtcggggaggggtttgggggtgggctggggggtgggggaccctttgtggattttctttgcctttgtgtttgatgccgtcgtgtgggaaaagtcaactccgatgccaccattgcgggccggacgaaggatgctttcttcctagaggctccgagctgagctgcgaactcgccccccgcccttgggacaagaagacccagtcacatcactgcacccgtcctgtgtcctcaccattgctatgcaaagtgattcttgttgtacataagatttaaataatgcacctatttaagacatgttgacaaattgcgggtctgggacccgcctcttatttatgaagtctttgaccgtcccccccgcccgaccccaccgccctcccgcccccacctggcgtgtagtactgtataaaccagtcagctgtcgggttagtggtagtattattgttatttttttaaaggaaacaaacagacaacaaaaagaagaaaaaaaaaaagaacctccttggaaaaattaattgctttttcgtaatggattctctatgctaatgctctctcgtctgtctgtctgtctgcccactcccccacccaccactgtgcgtttctgatttccaaatgtctccaactccctcacgaggtggggctcaggctggaggaggagggattaagatccccttgctccactaaggcccaagctctttctctcggcaccttttagacttgaatgggaggctgctaacccgccctctccagtccaccccggtaaaagagctgttccccacccccagggagctcctgtccctgtcagcctttgctgtcccctgtccccaacggagactctgtcacccctgggctccccctgccatcgtgtgcttcacgtggccccatgcatgcccgcctctctgcatggtctcttgggaaaagagagatgtgtcgcctccgccagtccgactgccctccccaccccacccccgccaccccccacatgtgaccactgcaacgaagacactccttctgtccccacctgctccgaagacaaaccaacctccgtttcttttataaacagtcggctttttcttaataagccctcactgtacagaacagcccgttgatggtttatttggggtccccctctccccccagcccttttttctgttg

SEQ ID NO: 10318 - DNA, 1236 bp, Homo sapiens
tggaaggctgatgtaactactatgcccccaggctgcttcatactaacaaacgtaaagagctatcatagggcaggagctggcaaaccatgacctatggaccaaatatagctgaccacttgtttttataaacaaaatattgttggaatacaaccatgcccatttgcctacggatcatctgtggctgcttttgcaacacaacagcggagttgagtggttgcgacagacaccgtatggctcagagagcccaaaatatttacctctggctctctgcagagaacatttgctgacccctggcagagggccatgtgcagaatgaggcctcaacatgtggtggtcgattgcaagtgaattcggaattggttgatgtttcagtcttcgattgcgactggatggaccctgggaaatgaagaattttatcagttctcactttgctgatctctcgttctctttgtcattttaaggagcattgggctcaggatctgaacaaagtccgtgagcggatgacaaagttcattgatgacaccatgcgtgaaactgctgagcctttcttgtttgtggatgaggtgagtaggctgggcttgttgtcgcttgggggtgactttttgattgatgtctgtgctttctgaggtttattttctgtttgtctttccttggagaactttgctgtatgatgttgcctcgactgactggttagctgggattgtttcttttcttttcttttcttttttctcccaggttctagattactgtaactgtaactgcccagtgggttcattttgcctgctgcctagacagaaccgattgatcaaggcaggggaattgcaatagggaaagagcttaactcacttagagccagctgaatgggagactggagttttattattactcaaatcatcctccctttcagaggctggagtttcgtttttttatgtttttgtttgtttgcttgtgtgtttgtttttgagatggagtctcagtctgtcacccagcctggagtgcagtggtgggatctcacctcactgcaacctccgcctcccaggttcaagtgattctcgtgcctcagcctcccgagtagctgggattataggcgctgtccaccatgtctggctaattttttttgtatttttagtagacagggtttcactatgttggccaggctggtgtcgacttcctgacccttgtgatcagcccgcctcagcttcccaaagtactgggattataggtgtgagccaccgc

SEQ ID NO: 10319 - DNA, 1116 bp, Homo sapiens
ccaggtgctttaaccagtgaggttcaagatgctttcctgctctctaaagtgcctgattggccttagatggaggccggtgctctggcttggtcccatgctttcctgttgccctctcctccagctgtggtcatctttcccgctgtttatttctgcagcccccagggcctcatggctctcagacttcccatagaacagaatggagggctttgctgggaaccgttcactgcatgtctcaggatgccaggaggccaccataaatgagggctctcaggagtgggaggcaggcagaggagggtagcaggtgctgttttcccataccccttcgggtggggaccagctgaggctggcctctctatgttatctggtaccctgggtcagggtgagacagaaggacctgtctagtgatgctggggtttggtccaaggctttcagaaacccctcctctctttgcggcccaggatataccccctacagaactacattttggggagaaatggttccacaagaaggtggagaagaggacgagtgccgagaagttgctgcaggaatactgcatggagacggggggcaaggatggcaccttcctggttcgggagagcgagaccttccccaatgactacaccctgtccttctggtaatgcccccgacccagggaacgcctaccttcttctccatgccaaccgatgaggcagggtggcgagtggttctagctcaggcaggaattgggcaggctgggacctgaatcccaggcttcatttgtctagctcttctaggccgggacaagggtgaggtgggtatgactcacttcggcactgtaacccagattaatgagatttcagggcaatcttttaaaaaatcaaaagtaatgcaaaaaagtctgtgatgaacaaaatatgaacattttaaacaaagacaagatctgaccctactcttagatgatgtggtctcactcactttccccgatcccagccctggagtgggtcatgtggctctggatgattcagccaaccttctagcatctctgtctcctccataaaacgaggactctagggctgtccttttgaagccgtcataggctgtgatgagcttgtgcattcattcatccacccacttatc

SEQ ID NO: 10320 - DNA, 1168 bp, Homo sapiens
atcctaatagtagccaccaacgagaaactgtgctgcctcccttactcacattattctcattgaatcttcatgtcagcctgcagagtagctcttactctgttttaccattgaggagatttaacctctctgagtctcaacgtcttaccaggaacttggagtctgcctctctgacactcagccctataccatccagctatgaatgactggcaaatgtacagaaagagaaatgttacagagttcagcacgcagcccatttctcatggcccactgctgatggtgaaatctgttttatttcaggttaagagagaagagagtcagcaacagcaagttttactcatagaagctggggtatgtgtgtaagggtattgtgtgtgtgcgcatgtgtgtttgcatgtaggagaacgtgccctattcacactctgggaagacgctaatctgtgacatcttttcttcaagcctgccatcaaggacatttcttaagacccaactggcatgagttggggtaatttcctattattttcatcttggacaactttcttaacttatattctttatagaggattccccaaaatgtgctcctcatttttggcctctcatgttccaaacctcattgaataaaagcaatgaaaaccttgatcaattaagccttctgttgcacgacctgtgcagtgaacaggatttcttttctggccaagaagattctacctctaatgatccaggtaactgatgtccatggaggatgagctggaaatgtaagaaactattcatgagattctgaaaaggattttaactcaaaggcaaatgattccataagggcccaaagagaagccctacccacaggcagcctgctcagttcaatgtactttaactaccaccggctgcctgctgcagtccacaagaaaatggctgagtgatgggatctgttcattaagacaatttctaattaatggtgacagcttgttttgtgactagagttactgggatggagggtaggaatcttggggcctctttgttttaaaaagcccatcagagagaccagagccgtgctgcaggggcaggttctcacttgcccctggctctgccagctgctgggaggctctggccccactagtccctcatggccctactgaactggctgggaggctgctggaatggcccttggtccaca

SEQ ID NO: 10321 - DNA, 2128 bp, Homo sapiens
ccacattttaagtcactgtgaaatacagatttgggatgttgaagacagactctaaaatttgcttttatcttcacagtaggtggggttcattcactgtgtgagtaaatcacataactgctttctatgggttatgtcatcgttattcttatccagagataatttggaaaaatgtcctaccagtctcagatgcttctgtgggtctctttttatattatgtggcaatcaaaactgccatcaactgactgattatcttaccacaagaatttcaggatggtagactggctagtgatgggggtcattcaaagaaaagagtgggagtaggaaactgactctgaaacttttaaagatatttccagttaaatctattgctaaaatattgccagaagaaaataagtttaactcagtaggagagtggaaagggatttgtagttgataggtctatatgtcatttttacttgtgctcatataatgaaaaacatgttgatgatttttccttcttcaacaggttgctaataatttatactggaatctggcatttttccaagccaagagaagatcgaatggctttttgcagctaactactatgtgtagacaggttttatattataaagtatgcattcttatcacctagtatatagttagtttgtagagtgatttccccccagtttcttgaacatggtatcttcacatcttggaccttggtcagttgtgctattcattattaaacactaaaactttggcggttcttgcataacattgtcagattttttagtgtatttctgtgaagtcattttttttcttgtcattccttttgtagtagttgctgtttggataaaagttgatgtgtgattttttattaaacaaatagtaaacccttcaattatagttagtcttggtgaagtaagatgtttgtagactttagagttctttaattcttggcacaacgtgactgttgagctaacaccaaatagtgtgttggcaatacttttcaaatggctgaaaacacctaaaaattgttcattcagaaatatctgtcactgctctgttgccaaaactcagaatagaacttagacgtatgtctgagtccctgagatcacatgctaaagtcgatgaaaagtaaccactgccactgtcttgtgtcagaacttttacagtacagaaaataacagaatagccttctgtaatgaggcgtttgttagagttttgcatgagattctaatacttcagtaggaccctacctacgtggttcatctacaatggttaccataaaaaatctggcaggattttaaaactcaatcagtctttcctttgagctagtgacttgaaaagaaagagagaaggaaaagagaccatattaagtccatgccagttgcttggctagaatatgatcaacgacttgtagtagactcaagtttttaaaaaacactattttacttaaactgtttcttatctaaattcttgcagagtgtcaatgttatcattgattatagaagacagggataatacctttatctctggccactcaaaaatgcagtgccaggagtgctaaacctagaggccaatactgatgacctggaaggtgatccatatgattgtcaccacaaagtgcttttacacaaaaacttgaaaatttgaaaaacatgatttttttaagtttctcatctcaccagtcttggtgtttatattgcaaatctatcaaagtaagaaataatttgtgctgtatacaaattacatggggaacataaaggagtgagatccttctgtgataaaatgaattcaccactctggttacccaactacagaacctcctttgatcaggccagtaggttgtgatgcaggctggagcccccgaatgccccacacacactgcagcattgaccagaccatccgaaacctgcgtccctggtgatgttctcaagcctcggaagtggcaaatggaaatgatatggccggttgcggttgtaggagagttgtgacttaggcaggagtcgacctcctcaagtaatggaacgatttcaaaggcaggctgccctgaccaaaaatatctgccatgaataaaggtgcctgaaatcctgctatgaagcttcctttgtgtcaaaaatctgtttggttttcagatggaaatgca

SEQ ID NO: 10322 - DNA, 1161 bp, Homo sapiens
aattgcttgaacccgggaggcagaagttgcagtgagccaagatcgcgccactgcactccagcctgggtgacagagcgagaccccatctcaaaaaaaaaaaaaatagtgctggtgaatcagtccccgtgggaactggttacagtgaaaggtctgactccactacagtgcagagtaggtgggacatcctgcattgcaaacaagctcctgcaggacccaaacagctcctgtgaatagcaaggtcttagcgcacaggtgtcaacattgggcctgggaggctttaaaaatgctgaaatcagagtgggcctcacagcagctgattcagtcaccctggggtgtggcccgggctgaggaggttttgaaagctctccaggcgatggtgttggaaggggcggaaagctgccttcgagcctcagcctggcaagcagcacctgccagccagaccttgaggaaaggggagcagctctgtcccacggattcagatgtcactggaaaggcagaacgaggaggcacctggtcttgtaggttcaggccagccttggagctgccctccacccatccctgcctaatgcagccggaacttcgtctgcggctgcttttctgaactcttggcgtcctgtttctcctcctgcaccccaaaattaacgcagtcctgcccgtggctggcattgtcaccaggccttgcaaacacctctgtcggactttgcccaacctccctggaaacacaccaggggttttggaaggactgcagtggtaaaggttgtggcgctccctgggacactgattcggagtgtggttgtgtgcagctgagcgtttggcggtgggtgaagccacgtggactgatgactgtggacctacacctgcagggatggccgtgggcctgcgtgtgtgtgtcagcgtggctgggagcaggctggtggtactggcagccgcttccacgtgggtgaggggagggcctctgtctgcaacatccctcatcagttccccctggatcccagcccggggagggggagagggaaggggggctcagcttcccaggaccctaagctgctcctgggagaagagaaggatcccagtatccggtcagaggctgcaggaagcgcttgcctctccctggcccagggctgactccgcctctcttttctgcagattttccgccgtgcg

SEQ ID NO: 10323 - DNA, 1176 bp, Homo sapiens
tttgtggtacaaatcaacaaggccaagagcaggccgaagcggaggaagcccagggtgaagcgcccgcagctcatgcagcaggttcacccgccaaagaccccttcggtgtgaccggcagcctggctgaccgtgagggccagagagagccttcacggacggcgctggtgggtgagccgagctgtggtggcggctggtttaaaagggatccagtttccagctgcaggtttgttagagtctgttctacatgggcctgccctcctgtgatgggcagaggctcctggtacatcgagaagattcctgtggatcccgtcaggagggacttagtggctctgccgccagtgagacttcccgccggcagctgtgcgcaccaaagactcgggagaactggaaaggctgtctggggtcttctgactgcaggggaaggatgtactttccaaacaaatgatacaaccctgaccaagctaaaagacgcttgttaaaggctattttctatatttattgttgggaaaagtcactttaaagacttgtgctatttggaagcaaagctattttttttgtcagtggaatgcagtttttttactattccatcatgaggaacaacatagattccatgatctttttaatgacagtacagactgagatttgaaggaaacatgcacaaatctgtaaaacatagaccttcgctttatttttgtaagtatcacctgccaccatgttttgtaatttgaggtcttgatttcaccattgtcggtgaagaaaattttcaataaatatgtattacccgtctgaagcttaaagatactgtgtaacggactctttccacttgtcccatttctctttgatgacggtctggaatgggttctgaatcaacctgctaattttgtgttcactgagacgtaattcacataacattctccactttatagtgtagagcgcagtggtttttggtgtattcacaaggctgtgcaggttccggaacatttccatcaccctagagcaaaaccccactcccaccagcagtcacccgcgttcatcacctgcccctaggctgctggcggccgggctgctctgtggatcggcctgttctggacatgtcctttcaatgggatcgcacagtacgagtgggtccttggcgtccaactcttttcactcagtgtcgtcttttcagggttcatt

SEQ ID NO: 10324 - DNA, 1126 bp, Homo sapiens
aaatatgtggacatacttttaaaaattagttacatttgtcctagcttttcataataaaacgtgaaacctgggtattagtatatatgactgtattcatagagaaacctgtgtgtttagcaagatctgctggctgccctttgtgtaggtgtctgaaaacataggcctttcaggataataagaggggacacaatttaggttttttttttaagatagaggcagcacctttgcaattgtaaatattatgtactgccatggcaagtaaaaatgaaagtggatagatacggaaatacacacaaagtgaattttgctaaaacaaatcaatggcacttaagacatttctattctaaaaggcttattcttaaggcttttctattctaaaaatttgcaatgttttaattgaatattagattttgtaaatgtggtttatttgtcacgtggatgaaatatcaggaaataactcactgctcagtggaaactctcatggctgttgttttttgttgtgttgtttcaggattggaggttttaaagcaggaaacagcagttgttgaaaacgtccccattttgggactttatcagattccagctgagggtggaggccggattgtactgtatggggactccaattgcttggatgacagtcaccgacagaagggtaggaaaaacgcagatggactttgtgacttcggcactcagatcctttcttccctttgtctctggaaaggcgcccgtgagatgctggcagatcagccgacatctgttcacttgagccaggctcagctggagatgttgcagtcactttgattgcttggaatattttgataggtgtctgagtgtgcacacatttaataagcaaaacaaagctacttgttggggccatgatgcctcttctccatcttcaccttcctgaggccagcggaggcgggactcccgcgttgtggtggagagtcccttccctgacttccttggggcctgcccctcccaggcttcctacgccgtgctgcctggactttgtgggcactgccacgagggggcgcccttctctggtctgactcactcttttactggagggctggctcttggctgtccttccagacctggaattcgggcttttcttagcctttatcag

SEQ ID NO: 10325 - DNA, 1104 bp, Homo sapiens
aattaatttacttatatttatagtaattaatttactcaaagggaataatgtccttccctttattgggatcaaggactcccaatgtattataaacataatcacctttatgttttgaatcggtttctttagaatctgtgactgaacatttctatgcttctttctcatctccttctccttcactgaaccttgctgggtctaggctaagcagttatctctggtgcatttcggtaaagtactgattttcatttcataaaataaattttgctttaattaattctacacatcagccgaagcacttaaatttgcagttttacccaaacccagacagttggtttcagttgaagccttagtgtggaaggactggattgtggcaggagaaattgagttttgtcacagagactaaataactgtgtatggagtgtcttcattccctgttccctgtgtgtctgttaccactttcccaggcagtggtggatgccggataccggaggagctaacatcccagctctgaatgagctgctgtctgtgtggaacatggggttcagcgatggcctgtatgaaggggagttcaccctggccaaccatgacagtaaggctctgtttcctgagggcgtggtcttaggtgtgagagcagaagctctacacctctgaagtctagatttcttgagaaagagaatggtgatccctcagttagctggagtctgtggaaagaactcaccagtattttcaaaagtacatctgtgaggctctagttttgtccagattttttttaaatgaaaatattttatgtagccattcctaattttagtgccacctattagagtctttatgtagtagtcccaaataggaactacctcacagcttcttaattatttacaaagtgctattcatgaaataactttgtgtttcccgtgtaggaagttcccccacaggtaaggttttggtagctggttttgagaacaacgtcgtaagcattcttactacccattctgcaggtctggacagcttgttttgagcctttcactgctctgagttataacatctattcagaaacctaatgttaatagtatttttctttgattataaaatgtattcagaaacctg

SEQ ID NO: 10326 - DNA, 1134 bp, Homo sapiens
taaggaacataggagcacttgaacatcagaagactaatactgtgaaataactgttactgctgccatttgtccttcagtctgtttaggaatgaagaaggttagatagataagttgaactattccaaaatgcttaacttaatagaagtgccttgggataagtccttttgtaggagaggggcggttgggagcttgggtgttatctaggaaggcattctttgtgtagagagctgtgcatttcacctagagagataggccacctgcagaacacagctgcctcttccttaggttcagctccaaggacttagaacttctacgtgttgtattttactctccagagcattatgcatgctcaggattcatttctggttttaagtaaaaaaaaattaagagaactacttgtaattttaaaagagccttagaaataaaaactgtcctagcactttaaaacttgattgaaacactaagcagactgttataatatttaactaggtatcttacacatcttggtttttggacgccttcaactatgccattttaaagaagatcgacgtgttaaacctcagcatcggcggcccggacttcatggatcatccgtttgttgacaaggtttgtggagtcactgcacacggggtttgggtgacagctcctgctctttcgcagcccaactttgcatcatatctagtgtgttggtggcttttcatccaggtggtgacagctttgtgagaacagatggctaatgacgtgagcttcagtgatttgcatgtcataaattgagtgggttagaggcctcagagtaggtgttgataaggagcacatggtgccttgctgattttttttttttttttttttttgagatggagttttattcttgttggccaggctggagtacaatggcacagtcttggctcactgcaacctccgcctcccaggttcaagcggttctcctgcctcagcctcccaagtagccgggattacaggtgcacaccaccatgcccggctaattttgctatttttagtagagacggggtttcaccgaattggccaggctggtctccaactcctgacctcaggtgatccacccacctcagcctttcaaagtgctgggattacaggcgtgagccaccatgccctgcc

SEQ ID NO: 10327 - DNA, 1146 bp, Homo sapiens
gtgaaattctagcagataagaatattgagaatattgagcaatatacagttgttttaagtcctgttgatatttgatggcttttgcctgcccaagaaatctagtgaaacttatagtaaaaataaaactcaatgaatgcttagggtcattttctttaacttttcccccttctggttcagtgagaacaagttgctgatgaaaatcaggtttttctttatttttattatcacaattagctttttaaaattattattatttaatttaatcagtctttctttgccttaccttggttagaaaatttcaagtagagaactatttgggagtaatatgacagctaaataacgtcctataattataattgcattgagactgtccttccagaaaaagaagataatcccactttccttcaaacagagtggcaaatggtaatcctccctgtgtttaggatagttttgcctggcgggtatcgtgtagttcgttttgctcttctgttctgatctttctctcccttgcctgtagctgaccccacagtaccctgcaatgaaacccggtggagccagaagtggcaatcatcacgtcccctgcgaagagccagcctctccctgggctctggcttctggcatgctacgggaaggcattcgagcagacggctgctgagagccatcccgcgccaggttgcccagacactgcaggcagatgtgctctggcagatgggatatacaggtgtgtgctattacccagggaaggtgcttatgggatatacaggtgtgtgctattacccagggaaggcgcggaaagtccagacatgcaggaattccatgttcgggactgcctagtgctaaagccctgcagccttccacatctaaccttcttactatttgtttagctggaggtagccaagtactcctcatctttgactcctgtgatgccaggcatctgtttctgtggctttcctaattgtcaccatttgtgtcttatttttgttaccatttctgaggttagaagggaaggctgtggagcacttctctcctattgacacatacacaaacgagcacagcgctgccggccactggcgctgaccgacaggcctgcagaagtctgtcacttcttggggaaagatggtccctgatctgggcaattccacggaaa

SEQ ID NO: 10328 - DNA, 1208 bp, Homo sapiens
aaaggatcatcctgatgccttcttctctttggctgctagaatgctcaggtccagtgtgcttaatatttttggtgttattttgttgtccttacttttttccatttttctcattgattttattgttttatttttgaagatgcctaaaaaaaattttcccgtgaaagcagtgagtaataagtaaataaaaatgaaataatatgtttcatggttgtatggcacattaatttgtcttaaaaccaggatatctcttttaccctcttatttattttattattttattattttagacatagggtctcactttgttgctcaggctggactcagactcctgggctcaagtgatcttcccacctcagcctcccaagcagctgatctacaggcacctgccaccttgcctggctgacccacttgcttaaattataaatacaactaaatcatacctggctatgtcagtttgctactaatgtctgtgtgcactgttttttgtttcatagattggctcacagtggttgattgatcaaccccattggacgttggttctgtggtacaaatggagtacaggactcagtcgtcacggcctgagtgagagaagccttatttccaagatggagaagaagcggagaaagaaatgaaagcctctcttcaggctgaaccacaaaaggccatgggatttaacttttatttatgttgggcaagactgtaagatggctgattagtaatgttgcagcttttagctgaaacaaaaattcacttttaatcaagaagaaaaaagtgtgatttgaatatatgcaattttatgatcatattcgcttgtgaccatgaagcttgtcaacatctggctgcttctgctcgtggttttgctctgtgggaagaaacatctgggcgacagactggaaaagaaatcttttgaaaaggccccatgccctggctgttcccacctgactttgaaggtggaattctcatcaacagttgtggaatatggtaatgatgttgtcttaagtattaggaactcccatcctatttttttaaagcttacttaatataaaattagctattgctgaataacatgttcctcttttctacagtaaatttctttcttttttttttttttgagacagagtctcactctgtcacccaggctggagtgcagtggcatgatctcggctcactgtaacctccacctcctggattcaagcaattctcatgcc

SEQ ID NO: 10329 - DNA, 1068 bp, Homo sapiens
tattatttttaatttggggaagaactgattaccttagagagtttttttcatttatttattttttttttttgagacagagtctcgctgtcacccaggcgggactgctgcagtgtcccaatctcagctcactgcaacctctgcctcctgggttcaaacgattatcctgcctcaccctccggagtagttgggattacaggcatgcaccacaatgcccaactaatttttgtatttttttttttgggtcggttggttggtttttagtagatatggggtttcaccatgttggccaggctggtctctaactcctggcctcaagtgatccgccggcctcagcctcctaaagtggaatcacacccaggattacaggtgtgagccaccgcgcctggcctttttttcatttgaaaaccgccaaatcctttcttttcatttcttttaaaggcaagtacctgcctaagttgtaagagaacatcagccatctcttctgcatgggctgtgttaaaatttcttacctaagagtctttacctttgagtgaattattttagaacaggttgaattaaagttgatttaacccagttaggtctaagattttctcagtactattacttaattatatttgtgttatatggagcccacatgtgtcatagattctttagcttgaggcagaaaagttttaagaggcttttttgtttgtttgtttgttttttaagtggagagagagtctcactgtgtcacccaggctggaatgtagtggtgcactcttggcccactgcaaccctccaggctaaagcaatcttcctgagtagctgggactataggcgcgccaccatgcctagctaatttttaatgttttttttgtagagatgaggtttctccacgttgcccaggctggtctcaaacctctgggctcaaatgattgttccttcctttttaacaacaacaacaaaaagcctgccttgagtgagaaacgcatttaataaatatcttttaaatatatattcatttactgtgatatgagaactgttattactggcttttatcttcttcggccagtagtctttaattaagct

SEQ ID NO: 10330 - DNA, 1967 bp, Homo sapiens
ttgagaagttttgccaactcctgggaacctcgatattctgacatttggaaaaacacatttaatttatctcctgtgtttcattgctgattattcagcatactgttgattcgtcatttgcaaaacacacataataccgtcagagtgctgtgaaaaaccttaagggtgtgtggatggcacaggatcaataatgcctgaggctgattgacgacatctacatttcagtgctttttccctaagctgtttgaaagttacgcttttctgttgttctagagccacagcagtctaatattgaaatataatatgatttgtcaggtcttataatttcagatgttgttttttaagggaaattgaccatttcactagaggagttgtgctggtttttaaatgtgcatcaagaaagactactgaaaagtattattttgtaactaagattgctggtactattaggaaaaatctgtgtgtattgtatagctctagctgtttgactatctgtaatgaaaatgctgcacttcaactggtatttcattagagaaccgtgtgtgtgcgtgtgtgtggtgcctttgagcaactttatttatggttaccatatttttaaaaagattttttgtcagggtgacttaacatggactcttatagggtattaaaacaatctagattattccttttcatcctaaataagcctaccaaatttcatgctgttggtttgccatgaatgatattacttcctacattatatttgtgttttttcaaatctgctatggaatgaacttattcctagatttggatatgtaagagaaacctgcagtcatcttttgatttataaggcaattcttgtggataaatagtgatttctcagcctctgacccattttataactgaaatttagccctttagagcttgttatatctggttttcctacgtttttctatgtaatattattccattccagtagcattattgatagaaatagtaagtatttatggaatagtaaaatatggacaaattacgtgtgtgacatatctgtcaatataagttagaagcttattcttggtttgtgtaatgaatttatgtattgtagtgaatacctttactggtgtgaagataattatgcacaaaccctcacaatacgcgttaacattgaaacctgtgaaatgtccttagtttgggtcatataaagccaaccatttttgaggaccatgtacctagtgctttgaaaactctaagtcactatatgaatatgacaatatgtgcacatttaaaattcagagctcggcattgtgatactgatgcagaagctagtagattggttaaaagtctggacttctgtggcatttttttcgtgacgtgataatctatcataagcagacctaagcacagttttatgaacacaattttgcccatgacattgcctacaggatttccagatgtgacttgcactcagaagatcagtggtcaacttcagaagctcttccacgcttagatcatgtcttcagaacttagatgtgaaaatctacacactgggagatgctgtgagccccaaggttttgatggagtttgcttggaatcctcttgacttcatgccacattgacgtgaactttgatgtataataagcagcagcaacttcatgtgaaaatatggtcaggtagttatatgtaaggttacgtggtccagtaatgtcttagattgataaattaggtatggaatccatcagtgttacgtgatgagaataggtgaacacaccttgtcagtgatgatgtaaacttctctccttggcaggacatgggcaaacatgctgattggtgcaaatgtggtgccgagctgtccatagctgcagtgaaagatgaagagcaagaccttctctaggttttctagctttcattaaatgtatttttttccccagagctaatttgaaagttgattggaccactgtggatggggtgtcattaagaatgtgggaaataggggc

SEQ ID NO: 10331 - DNA, 1204 bp, Homo sapiens
aggggaacgtgtcctgcttacccagtacctggggcactccagccccaaatgcctcccccctactcttcatctcgtctgtacccaggtgagtggcacacaacaccgccccgccccacctctgctctgtctcagatggtcactagaggctgctgcttaccagcggctctgctgggcccagacaaccacccagcaaaccaaactcaaccctggatgaatctgtggcccaaacacgcagtggatcccacagtcggtgctaacaggcaggtggggaagctctcccagggcctccccttagtagagcttcgaggtgcagccaggggtggagcaggggaggaggggcctcggggtggggcttccgtgcagagctggagagtttctgctgtgcaggaggcgggggctctgaggaagcaggtctgtcctccacccgccctcccggggacattcgtaggcgtgcctcgagcacaggctcccgggtcaggagagtgggggtggctgcgagaaggccaggcaggtttctgctggcaaggctcccccacacctcttctgagcacccctttcccacttgttctgtctgtccaccggactgtcggtcagaattggtgaaggaagcggcacctgttcagggctggcaggtgaagtctgagaggcacgtggaggctgatgggagatgctgctgcccctcagggctctgcactcacctggagagccacatggggcctggagggccactacacagctcagctcccaagttcggccacatcccccttccttctcgggccccagttctctctctacctagtggacgagcgccttcccctggtgccgatgctgaagtggaaccatggcctcccctccccgctcctgctggcccgactgctgcctccgccccggcccagctgcgtgcagcccctgctcctcggaggccagggtgggcagctgcagctgctgcacctggcaggtgagggtccaggccagggtgggcggcgtgtgggagatggggcggtcggggcctggacagggcctcagctgtctgtccttcctcaggagaaggggcgtcggtgccccgcctggcaggccccccccagtctcttccttccaggatcgactccctccctgcatttcctctgctggagcctaagatccagtggcggctgcaggagcgcctgaaagcaccgaccataggtgtgctgggtgggggagtgag

SEQ ID NO: 10332 - DNA, 1769 bp, Homo sapiens
ccagacggagtaaccccagcccccgccacaccaccccttgccaaagtcatctgcctgctccccgggggagaggaccgccggcctcagctactagcccaccagcccaccagggagaaaagaagccatgagaggcagcgcccgccaccctgtgtccacagcccccaccttcccgcttcccttagaaccctgccgtgtcctatctcatgacgctcatggaacctctttctttgatcttctttttcttttctccccctcttttttgttctaaagaaaagtcattttgatgcaaggtcctgcctgccatcagatccgaggtgcctcctgcagtgaccccttttcctggcatttctcttccacgcgacgaggtctgcctagtgagatctgcatgacctcacgttgctttccagagcccgggcctattttgccatctcagttttcctggaccctgcttcctgtgtaccactgaggggcagctgggccaggagctgtgcccggtgcctgcagccttcataagcacacacgtccattccctactaaggcccagacctcctggtatctgccccgggctccctcatcccacctccatccggagttgcctaagatgcatgtccagcataggcaggattgctcggtggtgagaaggttaggtccggctcagactgaataagaagagataaaatttgccttaaaacttacctggcagtggctttgctgcacggtctgaaaccacctgttcccaccctcttgaccgaaatttccttgtgacacagagaagggcaaaggtctgagcccagagttgacggagggagtatttcagggttcacttcaggggctcccaaagcgacaagatcgttagggagagaggcccagggtggggactgggaatttaaggagagctgggaacggatcccttaggttcaggaagcttctgtgtaagctgcgaggatggcttgggccgaagggttgctctgcccgccgcgctagctgtgagctgagcaaagccctgggctcacagcaccccaaaagcctgtggcttcagtcctgcgtctgcaccacacattcaaaaggatcgttttgttttgtttttaaagaaaggtgagattggcttggttcttcatgagcacatttgatatagctctttttctgtttttccttgctcatttcgttttggggaagaaatctgtactgtattgggattgtaaagaacatctctgcactcagacagtttacagaaataaatgttttttttgtttttcagaaaacagtttggtttctgatttgtcctacaaagttctttttttttttttgctgtaataacagaggcagtcatcatcgccttcagatttaataggtgtttgcggagctgctgaggcggggcacattcacattcaattgcttatttaattcttagcaaccataagaaacaggtgctgcttttgtccccatttcctgaaatctgaggctcagagggattcattcacccgaggtcacccagatagaaagtggcagagctgggattttttttttttttttttttggtgacagagtctcactctgtggcccaggctggagtgcagtggggagatctcagctcactgcaacctccatctcccagattcaagagattctcctgcttcagcctccatagtagctgggattacaggtacccgtcaccatgcctggctaattattgtatttttagtagagatggagtttcgccatgttggccaggctggtctcgagctcctgacctcaggtgatctgcccgt

SEQ ID NO: 10333 - DNA, 1334 bp, Homo sapiens
taattactggtacttagagtttgtagaactgggttcttaactaatagttttctttctaaacaggacaagaatatcagagaattgagtttggtgtcgatgaagtcattgaacccagtgacactttgccgagaacccccagctacagtatttcaagcacactgaaccctcaggcccctgaatttattctcggttgtacagcttccaaaataacccctgatggtatcactaaagaagcaagctatggctccatcgactgccagtacccaggctctgccctcgctttggatggaagttctaatgtggaggcggaagttttggaaaatgatggtgtctcaggtggtcttggacaaagggagcgtaaaaagaagaaaaagcggccacctggatattacagctatttgaaagatggtggcgatgatagtatctccacagaagccctggtcaatggccatgccaattcagcagtcccgaacagtgtcagtgcagaggatgcagaatttatgggtgacatgcccccgtcagttacgcccaggacttgtaacagcccccagaactccacagactctgtcagtgacattgtgcctgacagtcctttccccggagcactcggcagtgacaccaggactgcagggcagccagaggggggccccggggctgattttggtcagtcctgcttccctgcagaggctggcagagacaccctgtcaaggacagctggggctcagccctgcgttggtaccgatactactgaaaaccttggagttgctaatggacaaatacttgaatcctcgggtgagggcacagctaccaacggggtggagttgcacaccacggaaagcatagacttggacccaaccaaacccgagagtgcatcacctcctgctgacggcacgggctctgcatcaggcacccttcctgtcagccagcccaagtcctgggccagcctctttcatgattctaagccctcttcctcctcgccggtggcctatgtggaaactaagtattcccctcccgccatatctcccctggtttctgaaaagcaggttgaagtcaaagaagggcttgttccggtttcagaggatcctgtagccataaagattgcaggtatagttgaaaagatacaaatctagagtgaagatgggagcagacctcatcaactgggcttatagactgtggtgttacccataacaatggcagattacctgtgtgttaatagcaacgtctgaaggatgcctatgtcttaaatgttctctaaaagtaagataatatagaaacaaatgggaggagagggttgtcgtaactttatgttaagtgaaagatccatgtctgttagc

SEQ ID NO: 10334 - DNA, 1874 bp, Homo sapiens
gacatcataatctctgtccaagattcagataatctcttcaggacagtctagaagtagagtcagccacatccaagggcatgagccaggtctgtaggcctgtacagctgatggctgtgtaggagtgtctgtgtgaggcgtgggacattttaaatatgtggttaatatgcgtacatgcacacatgtacctatctgacttacccttaccttgcagttatagaaaagtttttattatggattgcttgcgtgtttgagttgaaatagcattggtttgtgtgatgacatctctctgtcccacctgctttggagaggggttttacacataggatgcatccctggagggaagtcggcggagacctgtaatgattcgtgtgcagtgctgttctcactctgctgcctgctgggctctcttccagtggtctaccatcacggcaacagtgcgacgggcggccattacactacagacgtcttccagatcggtctgaatggctggctgcgcatcgatgaccagacagtcaaggtgatcaaccagtaccaggtggtgaaaccaactgctgaacgcacagcctacctcctgtattaccgccgagtggacctgctgtaaaccctgtgtgcgctgtgtgtgcgcccagtgcccgcttcgtaggacaccacctcacactcacttcccgcctctctttagtggctctttagagagaaactctttctccctttgcaaaaatgggctagaatgaaaaggagatgccttggggttcgtgcacaacacagcttctgttgactctaacttccaaatcaaaatcatttggttgaaacagactgttgcttgattttagaaaatacacaaaaacccatatttctgaaataatgctgattcctgagataagaaagtggatttgatccccagtctcattgcttagtagaataaatcctgcaccagcaacaacacttgtaaatttgtgaaaatgaattttatctttccttaaaaaagaaattttttaatccatcacacttttcttccctaccctttagtttttgataaatgataaaaatgagccagttatcaaagaagaactagttcttacttcaaaagaaaaataaacataaaaaataagttgctggttcctaacaggaaaaattttaataattgtactgagagaaactgcttacgtacacattgcagatcaaatatttggagttaaaatgttagtctacatagatgggtgattgtaactttattgccattaaaagatttcaaattgcattcatgcttctgtgtacacataatgaaaaatgggcaaataatgaagatctctccttcagtctgctctgtttaattctgctgtctgctcttctctaatgctgcgtccctaattgtacacagtttagtgatatctaggagtataaagttgtcgcccatcaataaaaatcacaaagttggtttaaaggtgtgtgcgtgtttctttgaatgcgaatgccttttcgggtaactgaaattcatgggggcatgagtttgcctgcagaattaaaatctgcccttcgatcagctcgacgtgtttgtggaagctgaaccaccactcaggttatgcttgtttagtattttcaaatggattagtgatttgggtacacgaagtttttgactcttcgattggcagaaaggaggaggttttctccccttcccctcctcatcccttgtttctatagcccaccgttttcagtatcaccaaaatagttgctgtaggtcaaggctaaatgctcttcagttgagtgccactggggcggctgagcggtgcctccagacgccaccctcagtagtgggaaggaagccttctgagacggaagacatggagagagggatgtcacgtgcaagggtgcccgtg

SEQ ID NO: 10335 - DNA, 1914 bp, Homo sapiens
ttgcagcaagcagagttttatatatttatagtcacagatggcagaggaagaggctctcagtccccacctgtacaacaacggaaaggtgtgtggccacacgaagaagccaaacgccgtggcctcctgcagagctggggcttctgtggagaatacttcgggttattacatgggttattcaaatcctgggtcctgagctgctgtttccaatcatgaagaaaaacagtgaatccagtgaacagggattctccaagcagtcatttcagggggctcctgctgaccccgccactcagcagtgcactccccggatcacagcagggcgtttacatagaaagacgttttggtctcgattagctccgatgctttgcactgaagttgcaaaagatctgtgcactgaacagtgaaggtggcttccggcacactccccgctgccccggaagagacatcctttgaccctctcagcaagtctgtgtgtgtgcgtgtctgtgcgtgtgcgcgcgtgtgtgcatgtgtgtcaaaattgccagtgttgtttaggcaatgtaacatttaccggctgtgtacagcaaacaagctattttttagaaaccgacgtttcagggaagaggggagagagccgcggggtcctgcccgtggttactatgaatgtattgctgttggaggacatctcgatccaaagaacagccgttcctgtgcggcccttcgttgccctcctgctttcattttttaaagaaatcttgagtgcttgagggccttggaactgattttttttttttgttccagccaaattagcagtgtataaatggcacctaggtaagagcagagctgcggctcggtgacttgatacttggggcagcccgatgctgtgtgtggggcaggggaggcatccttactggagaggcagggcccagccattgggcacctctgggaaggggaggggaccatgaggcagccagcccctggcaggggcgactgtgccaccgcaggcagcgctccagtcgggaatggccaggatggcgccctcttgttggagtttttggttagcttttacgttttcttctccacccacggcacaggtgataaaataggatccttggtgcggagcttaaaattatgccagaaagccaacagctcccctcgtggggccttgccttaaacttgcctggtttgtacattttttgccggacgcatcaagaagcaatctgtgacaaagtctgagggtcttcctttatgcttgccctccacactaagagaagttggcgtctccctcctgggaattgttttgcctttctgttcatctgtgaactgttttttgtttttaattactctgtaccccatccgaatcagggcttctaccactgctgatgcaaaaccacaaagggacctacctgagccaccgtcctagccaagcgagcaaacctgcagggggtttggaagtggacttggtcaccgcagaagcgtgtgcgccgttgggggaagagctgcgtcacagccagagggacaaagtgtgggtgatcctggagacgccagtttccgagattgttctgcatattcatttgcacattgttgtctgggttggacatgcgtgtgggcttcagtgtgaggcttttaatatgtatatcctgttatcaataaaacaattatccaagtggttgaatcctgtgagacttggcaagtgtgtgcaaatcaagtatacttgacttttcaacctcttctttcaatgtaacttttatatgaaataaagtaatcaattaacagttctcaaatggcttccaaagcgcccgttcttcctggatggtggtgttttcagggggtgcctttccgtgcttcgtgggcccagccccaggctgttaaggtcactcccaaacagtttccagaaactctaaatgcttttgtgcccatgacaagtgacctggg

SEQ ID NO: 10336 - DNA, 1723 bp, Homo sapiens
gttaagagagcagggctttgcccgtgggagaggcgatgctttgctgtgtagcaggagacctcggtggcactgtggtctggcctgggtccgtggagaagctctgcccatccttgtcagaggtcagaggggcctgtagtcatgtcatggaccaccccacgtcagggcagcccagcctgctcgccagccttggaagggcctgggcgcttgaccactctgtgctggtctggctgagccgagggaggtggcaggcggcgccctggaaccccaagctgtcggcacctagcagcctccggcatcaaggggctttggggctagcagcaggcatggtcttcatccccagccattttgtcacgttccccacgctcaggcaggtgtgtgtacctggctgagacacacctgtcgacagggctgggtcttccccttggttcatttgctgctcacagccccgtcttctctgcacaggatggacgactcctactgcctgtctgccctgaggtccccgttctaccccatccccacccccggctccctgcccccactgcacccatcagcgatgcacctgcacctctctggggtccgctaccctcccgagctctcccactcatccctggcagcgctgcactcggagcgcatgtctggcctcagcgcggagaggtaagtgcgtctcgagccgaggagcccctctgccctccctgtcccttgatggcagctgggcagaaagcctgggctggaacctgactggactccttggccatgcctgtcctcacagtttgtccacctgccaaatgggacaatgatcgttcaggctctgctctgaaatagcgcctgtctcggtagccgtggtctcctgcagtaaacctgcaggccgaggagctctcgggcgtgcttgggcattttgtaagccgctttgattgtatggaccttaagttcttcctgcaccagtgaaacccggctcacctcccgtcactgttcagattagcgccctggctcgttcctggttatgctttttaagggcctgccccaggtccgtctcttgttcctggtgcagcagagcccccaactctttccatgtgctgcaggctgcagatggacgaggagctaaggcgggagagggagcgcgagcgcgagcgcgagcgtgagcgtgaggctgaccgcgagcgggagaaggaacgtgagcgcgaacgcgagaaggagcgcgagcaagagaaggagcgtgagcgtgagaaggagcgcgagcgcgagctggagcgccagcgggagcagcgggcccgggagaaggagctgctggccgccaaggccctggagcccagcttcctgcccgtggccgagctgcatgggctgcgtggccatgccactgaggagcggggcaagccctcggagcagctgaccccaacccgagcaggtacctgggcgtgggtgggctgtgctgggcaaggtctcagccacccgcggggaggagccctgaatcgcagcacctgccggttgccgtggtgtaaatgttccccagctgagttcgccctaaaagcgtggtgtggctgaacatggagtagggagcagaggcacgttggcacacgatgtagacacagtggatatagctgaccccaggaggacagttgtgaaatgtagccggggcattaggaagggatgttttgagtgcttcgttgattttatttctctgtaagtttacgaaacaattgtccagtaataacaaccagcttttgca

SEQ ID NO: 10337 - DNA, 1387 bp, Homo sapiens
agcgattctcctgcctcagcctcccgagtagctaggattacaggtatacgacaccatgcctggctaatttttttgtttagtagatggggtttccccatgttggccaggctggtctcgaactcctgacgacaggtgatctgcccgcctcgacctccaaaagtgctgggattacaggcgtgagccaccacgcccggccgggacattttcaaatgtaggtttacccttccatccagcatgtttgtactctacatgcttgtccttacagaggaaacgggttggttttgacacaaatttccctctctccaggagttgaggagccagaaacagaagatggtctcagaaagggagcggctccaggcagaactggaccacttacgaaagtgccttgccttgcctgcaatgcactggcctaggggctacctgaagggatatcccaggtgacggtttcccttgcactaggccgaacctatagtatagaaatattatctattttattaccttgaatatttaatatttttcactgggaggtttgaagcttacaaaatgagaatgtgccatgcatgaagcaaaggattccaggctccagaaaaaatgaatgaactcaccttgacgtcaatgcaattgaatcaccgttgtcattcagcgagcaaccaatgtaggattgcccacagtttttctttttaaaggtggttttcgcccttcctctcccacattatttcttaatctgaacatgaaggctccattagcaacactaaaacttgatcattaacagccccctgtgcatatgagtggatcaaaccggttctgttctttcttgtgttgccatgttactatgcctcaagcccagtttgcttttgccgcagcgatggggccagtctcattcctccccaggagtgaaacttgcttcagctgaaaaggttgggtgcattgtcagtaaaaagggcttatttgtttcattttactttcctgcaaaattttcttcaaagcaacaagtcctaggagcacacaaagcaacccaaaggcttttccctggaaaagctctttcttacctaaagataaaaccaattcacaaactgaaggtagctttttattactccgtggggagcatgtacagagctctgtgtatacacagcttcacacccaccagattgttactacagtgggttgggttttcatacagacgtaaattttgagagaaaagtcaaaggtgcttcagccttgtactgtgtatatatattaaaaaaaaaacaaagttttgtatgtttttattactttaactattgttataaaaagcctgccatttttaatatgtggtttgggggatttttgtttgtttttcctgtttgggggttttgtttgttgttttggttttttttgggcaaaaaaa

SEQ ID NO: 10338 - DNA, 1572 bp, Homo sapiens
caggcctcctcctccatcacagatgtctggatgcttttggaaatggccttggctaaagtaaaagggaaaagtagatccgataacttaaaaacgtagctcatcccttaccatccaaggggcactcccttggttggattttctatgacagcacaggggacaggtggcacaccatgagaggtctgcccagggtgggagcagtgtcactgtgctagcaatagttggcttctcccctgtcagtggaaaccccacttctgcccggcccttgagcttcttgcccactgtctccccatccttccacctacttgtggcgatctgagtactctactcttgctcaagaagtaatacgacaatcagaatacaaaccagtaaggcaacacgaataaactaagaaaaaggtaagaactgtctcaaaaacgaaagcacaccacccaagacacagtacccagtcatggtttccccatccaactattagtttcatactttgaaaacttactttcagattattctcaaagaacacagtagcacctaaatctgttttcaattgggcttaaaaattgacatgcaatctcttaagttttttgttcagctacttcacactgagtacctcaaatctgctctggagtcgattatgccacctgtgtgtcaggatgcacctgaaagccctcggctcggtccttagaccatcttcctacattacctggaagggagctgccatctgtccctctgcagagggataccttccaatagtaaattatctggttcctcactgaaacaagttatttttgcttcatatagtcagagtcagactgacatgataaaatatcatgttcctaatctgttgtctcagataagtgaccaagacgggactttccacattttagtctacattctaatcttaaaggaataaagcactgaattgggactaacattctgataggttgcacccttaagagtattcagagagcatcaaaaggagcccacaccttcagcagtgaaggattctaacacagggaatctgcagtttgtagcagaatggtattttcctcaagtagctcataatactgccaaatctcaaaagttaagctgaatttcacaccagatcctacccctttccctgagccacatgtttcacacaagtgtagaaaatgccagggatccaccacaagatggagatggtcagcacaaaccgattctgttcctctttaaagtgtatattagccacttagcaatctctatattctttcaagtaaccaagctgttgactttcttactacttgcagtagcctgtccccaacttttccatccagtgcttaacctaaaaaactccttaactctgccttgacctgaggaagaccatgctaactggtgttattttgtatgtaccctgtgcttaattctataacagtaaaccccatacgcaggtgggagggaggaacaccggtgcctcggtcactctgggggcagtttagatgctgtgaaattaaacctgttctaagtgtacttgtttgaattaattgtattgtaatattatttgttgaatgtagtaattaggtatttatgaatatattgctg

SEQ ID NO: 10339 - DNA, 1300 bp, Homo sapiens
ctctagtttagaaatggggaaacaaacaggtccagagagggacagtgcctcgcccagggacacacagcaaggtgggagaagagctgggctcctgctgcagtgcgcctcctgcaccccagtactgtctaatcagagagcccagtgtgggcggacagaggcgcaggtccttagctcggctgtcaaagtctcttccctctctgagcctgtgtcctcacctataaaatgggatcataccaccttccctgctcccaggaccagtgggggcataggggagacacagggttactctacaaagtccgagccccagggaggttcctgaacgctgggaggggttcctcttaaactgaagcagttccggggtccgattcacccagaaggatccagcatcactgggctgggtcccatctcagcctctggcagcaccagaaagcaaggaatcccagaggccccagccctgcagttcccagggaaacggggcttggtgtggtgggggcagggtgcatccaggtgtccatcccctctttctcctagtctggctggatgagacagggtcgtgcccagatgatggagaaatcgacccagaagcctgaggaggtgtcctgggtttggctggctggctcctgctccagcggcccggcttcaggtgtccgggggcgtggctgcctggagcaggtgtgctgaataccctggatgggaactgagcgaacccgggcctccgctcagagagacgtggcaggaccagcgaggaatccagcctgtccacttccagaacagtgtttcccaggccccgctgagtggaccggacctctgacacctccaggttcttgctgactccggcctggtgaaagggagcgccatggtcctggctgttggggtcccagggagaggctctcttctggacaaacacaccctcccagcccccagggctgtgcaaacacatgcccctgccataagcaccaacaagaacttcttgcaggtggagtggctgttttttataagttgttttacagatacggaaacagtccaaaatgggatttataatttcttttttgcattataaataaagatcctctgtaacaaatagtgaatcctttttttttttttttgagatggagtctcactcttgtctcccaggctggagtgcaatggcatgatctcggcttggctcactgtagtgttgcctcccaggttcaagcaattctccggcctcagactcctgagtagctgggattataggcatgagtcaccgcacccggctaatttttgtatttttagtagagatggggtttcaccatgttgg

SEQ ID NO: 10340 - DNA, 1440 bp, Homo sapiens
gacccacaccagtgagtgcgccccatgctgccgcgcgggctgggctccttcagcgcccggccacgtgagagccactctcaccccgcctgtgttttcagttagcgttttctccagaagcatgataccaagcatattccccggctcctgtaggccccagtgttccagcgcttccaggcagtagagggaacctcagtggtacccacaggtcttcccaccccaggcgctagagcacagacactcttcccaggcctgtgctttgatgtatctgtggccactcagaaagcttcagtcatctgcctccaactttctcagaattccacgtgaaaggcgtcccttccatgtattaaccatgtcttctatgctctgtatacctcttcatgcgtttgaaatgcacatgtttctcagtactctgcaccatctctgttcataccactgtgcatgtggctggccttctctcttgatgctgttacaagccgcccgttttcactgttagatgctgacttcttcatgtttgacccgtagtgactactgtgaagactggccagaggcacagaggatctcagcctcgctcctggacagccggtcctacgagacgctcgtggatttcgataaccacctggatgacattcggaatgactggacaaacccagagatcaataaagctgtcctacacttgtgctaggcaggcaccgctgtgactgggctccgggcctttccactacgttgaagaagaaaacctatttttaaatgtaaataaaatatcttgtagcctgtgtggaaagctgaccgttttaagaagtggcatgtgccttgaaagggggcagaatgttcagtcggtcgtgtttttaacacagagtctctagaagaggtgcagacatcccgtctgactgtccctgtggactctctcagttgtatgttgctataatcctccaaatcaaagctctttctgcttgtgcaagattgttcctattaaacagttttaactaaccttttataatctggagagaatactttttaaggcttttgaactatctttttttaaaaaaaaaaaaaaaagcccacatcttatactccaatgagtgtgtttgtgagtttttatcctgtttgaattttgatgtcgtccaggcgtcctgggatcagggtagacacgtggagtgctggtgctgagctgtttgagaagctctgtgtgggtgtttctgtggtcaggtaggctgggctgtgaacagcactgctccacatggtgtcggctcacagagccaccgcaactctgcccagcgggagtgacaccactgatgccacagaagcctttatcgttaggggcaaaagcagacatctctggtagcaggagctcagtgtggtgctcttcagccacgcagaaagctcacgtgcctgcagggccaggaaagggaaatgatcgtttcttttgtattaggaaaaaca

SEQ ID NO: 10341 - DNA, 1209 bp, Homo sapiens
caggctggagtgcagcggtgcgatctcagctcactgcaacctccgcctcctgcgttcaagcgattctcctgcctcagccttccgagtagctgggactataggcacgtgccgccacgcccggctaattttttgtatttttagtagagacggggtttcaccatgttagccaggatggtctcgatctcctgacatcgtgatccgcctgcctgggcctcccaaagtgctgggattacaggtgtgagccaccgcgcccagccctgcaggtaactgttaatgtaggaagtgctgcctctgggcaccttggccccagggttcattagcagttgcccctggtgggtttttgttggctgtgatgagaagtgcttctgttccccctccaccacactcctgcaactgtttaaacagtggctgtgaccccctgagatgatccagggtttcaaggcgtgcacatgtctgtgtttcggttttcagaagtatcaccttggggtgactctcaacttacatggattttcaaagatttattcaatatgtttttcagaaagtgttgtgaagagcgaagacttttcgctcccagcttatatggatcggcgtgaccaccccttgccggaggtggcccatgtcaagcacctgtctgccagccagaaggcattgaaggagaaggagaaggcctcctggagcagcctctccatggatgagaaagtcgagtgtgggtattgaagggacccacaggcgcgcccagcagctctcggaagcgtgtgtgtgacagagcctctgctcacttctgggcctactgtctagaggcagtcttgcacaggagggttgctctgctgggtttcggggtcactgtgccagggccccagtttatgtgctcaccagtcacttagctctgccagctgacaggatcttttgctaggcccccttctctgtgctgagtggaggtagcctctcagcatatctgctgggtaagacatagttaactgtaaattattgaaagaaactcagcaaaatgcatagtgtttggtatgaaaggggcagaaaaataacaagattaaatagaccctaatactgtaattcaagtaagaaataattttgcagttttaatttgcacctgaagcgaactgtatgcattttcttctttccttgccctgtcacatgcctgcgtgggcacgtgtgtgcacgtacgtgcgtgaacatgatgtggcctgggtt

SEQ ID NO: 10342 - DNA, 1232 bp, Homo sapiens
ggactgcatctcaacagccagcatctgggggtcccgacctgatagtttgtgtgtgggcattgccgggttgctcgctcgtggtaatgactcttccccgaggttctttctgtccaggcagaacaggcatttttgcattctgaataggtatattctcgtacttttggtttgaatgtggatgtgggttaataacagacccgaatctatttgatcttccaggtcaccttgggctctgtttgtcagatcctgttatccatagcctttagagaggaccttctgcttttagcttattttgttgctaactttttacaaacaaagggctaattttaaaatgtcagtgttgtcagtggtcagaaaccgtgtgtttgagcgggtgttgagtggcaggtggctctgctgacctggtggctggtgtgtcgggaggatttaacctgtgtgagggattggcctagaaacaacctgttgagatagtcttgccccataacctgtctcacaccgtagtgtacggccccctcccgcaaagctttgacaaagagtgggtggccaagcagaccaagaggatgctggacatgaaggtgaaccccatccagggcttagcctccaagtgggactacgaaaagaacgagtggaagaagtgagagatgctggcctgcgcctgcacctgcgcctggctctgtcaccgccatgcaactccatgcctatttactggaaacctgttatgccaaacagttgtaccactgctaataaatgaccagtttacctgaaaccctttgtgatcagttctttaatgatacctaaatgaaagctaattaaaacaataggtttctcccaagggtctggagtaaatatattttgggtgcaaatgaaatggcaaaaatctagtatcttaaattgtataaggggacattatataaaaactgaaaatatagaattccttgatgtaggaaatttgaggtttttggcaagagatctttatataagtaaaatcccattatcgtaggcacaccggcaggagttaccacaaccctttttttttgttttgggagacggagtcttgctcttgtcacccaggctggagtgcagccgcacaatcttgggtcactgccacctccacttctcgggttcaagggattctcctgcctcagcctcccaaggagctgggattacaggtgcctaccaccacgaccagctaatttttgtattttttagtagagacggggtatcaccatgttgtc

SEQ ID NO: 10343 - DNA, 1760 bp, Homo sapiens
gtgctttacttttcctagactggatagaaaatctagcgtagaagtgcatcaaactcgatttattgccaaaaccctagattggagcttggtgtcagaactcgcctagtgggcatctctgtggctggtgagatcggccacctccacttttggttgcagtgcagagacgccatgtctcccgaagagcattgccatcactggccctcctaggctcacacgtcaattccagggcagctacacgtggtctgaatcgagaaccgagcttggagttctccaagtggagttccacccgccggactcctgacacccctgggctagggaaaatgtcgactttgttttgttctgttcctaaagtgattagcactaatctctgggatttttaaggattgcactacagaagaatgtaccctgatgtaaatctctgcggttctgggagccaaactcctctgagaacagtcagtgcaagagactccaataatccatattgaaagagtcagcaccagcagaggctactcgacttaggacgcaacagaggttttagtatttccttccctcctccaagcacttgtagcagtttcaggtttttaatttttttctgcaaataaatctaaactacgttattaaatagaaatagtttactcgcaacaacttaatttctaagggtccaagtcccagagaatccatagtcgtcaaagctttgagagtatctttcttcccagccagtcagtggctttgagccctatcttccactacaaatgacctctcgaggggggacggcgacagcgcggctctgtgagtggctgtgaggatgctgcacgtcctcagcagagtttgcaagttgctttatctcccacgggctccccaagaacctccaaccccgaggcttatcgctagcggattcacacctgagacagacatttcaacaatgatacagtcctgtcatttatcagcaaaagattgggaattttctcctgtcaacttcttttgtattaggctgtgtattgatagttaattccgttaaaaattacttggaaaacagtgggaagtggtaggactctggaagaggccacacacccgagagctgcgagatctgtgcaagtctggttttggttaggtagtaataaaagtcctcactgtagatctctaaatttcaacccacggaaatgaaagccttttgtctgaaatttacggacttaaatcttcaaggttaaagggaattttctgctcaaataatactcttatcgaaaatgctaaagtcttcaatgttaaaatactgattggtaaaatcttgcagttgggattttgcagttggatatttattttaaaaaaaattataatattcagactattcttaaaatgggacaatcagcctcatgaaaaattgatgtaaatcagaagaataccctagaatgaggccttgtgatgtgagcgttcaatttgaagagcagttcctaacttcatagaaactaaagcagaaagttgttacattttttttatgacaggcttttagtagaattttttagttttattttagttgaattttatttctatgcaatgcagaattaacagacctcttctcctcatggtacacagtattacagtgttgaagtaatggtgatgcttattacaacagctatttaggggaatgttacgttgatctcttaaattgtaaacactacaaaatgtcaaaataatgagaactgacacaactttgccttaaagagtactagactggaccttctcatattacgtttaaggaagac

SEQ ID NO: 10344 - DNA, 1195 bp, Homo sapiens
ccagagagtggtcccgggaattgcactaggcctggtgcccggtccccaggtgccaccgatggggctctctctggctcctcctgcggaaaggaacttggaaagaagggcccacttgccccgcctggggctccggcatttctgttggccacgtcagcctgtggcagtgtgtccatcggaacctgtctctccagacctgctggtgtggcagccaccagggccttgtgccctggcttgtcatgggagcaggtcccgtttgaaattaagttgacttagtggcccagcaactctcagatgggctcaaggaacattgtgattgtgcagattgtcaagcttttccggatgtaactgtgagagcgatgttcttttgtgactttctacaccctaagtggatgtgggccccagaatagctctgacgggaggtgtaaatcatatcagaccagcaggcggcaccatggagcacctgccccaggttttcctgcagtagcagaattctgctggtgttggatgggtctggacacacctcctctaccttgtcctctcttccagctatgtcagctctatcctgaagagaacttggagaaactcattccttgcttagctggtccggacgcattttatgtggagcgaaaccacgtggatctggactcaggcctgaggtgaggcccttaccaggcacccggcgcgtccacagctggcaaggacaggctggtcctgtggtcaatgctgtggtcctccaaggagctctgggaggatgcgcggtcacctggacctgggtctctacttggcctctagggatttccattagttctggaggattcgggagccctcagtaagctgagagtggttctgagtgtgtgaggaagggaattccagggtgggtcccaccacgtcttgggctttggcagtcctgtgaaataatcctgggctgctgtttccatcctgtagtccaaggttgagactattcccagataaaattggcgtctcttaaacagtttctctggaccctcgatcgtgtcttggctcacgtggcacacgaagtaacatggccgaccagttccgtaaatgtgctgctgccggggccctggggaccagtgtccaagcacctttctggctggtgggtggcactgatctcatgtcacagggcatgactgctgtcgtcaaccttggtggccatgaatacagcattgagaggaag

SEQ ID NO: 10345 - DNA, 1190 bp, Homo sapiens
ggtgctgacgggagctgcggctctggcggcacaggacacgggtgcatctgctgctccgtccacagcatgcttgtttgtggatggccgtccgagccgggccccgaggccctgggtctgagcctccagccttgctgcctgacccagggcccctctgctgccgtagtcacacgtcccctttaccccaactgctgctgggatcgagtcaccatgcagtttttaaagatctgagactaaagcaaaatccacaaatctagggaaaggtggtgaactgttggcacaggatgtttgctgttttgtgagaacaccgtgagccggggtggagggtggcaggaggccccgttggccagccgctccgttatgggggtgcttttgcatgtttgccgtctcggatctctgtcctgaagcccaggggaacgcagtctgtttcctttgtggatctgaagggggtcggggaagaggagttaggtttcacattatggttcttaagaaaatggaatccccccaggacgtagccaccaccgtcccgcagcctcccccacctgcctcagctgcgctgacgtgtatgtgcgttcattctgcttttgaagaaactcaggagtggctggaggagacggactcggaagaggacagtgaggaggttgagggcgccgagggtggggtcgacgacgaagacagcggagaggagagcggtgcggaggactgaggtgagcgggctcgggctggcgggtggcgcggctgctgggtgttcgtgaaaggcttttcatgtttatcggatgcttattggaattcagctttgtaaattttttaaaaacgttggtgtgtggagtaatttgggcagcttgctaatgagtgccgtgtgcctgtgggctctttgatgaggtcttccctgaaaacccggtgttctctctacccctcctgcacgggcctccccctcggctgaatgtgtttctctctcattccttcctccttgcgtatcagaagagcccctgccaggggcgcctggcaagtgctgtgcccacgtccgcccaggacccagccgtgttgagtgaagctcttggggccagcgtgcgtcctgacgcacaggagagagctgaaggtgggtggcccaggccagggtgtgaactttctcccatggtttagtctctgacgcggcactgggccggaagttcaactgagtgcagtgcaggtgg

SEQ ID NO: 10346 - DNA, 1018 bp, Homo sapiens
gcgaggggtgggccgagtgggatgtggcacttccgcatttcagttgaagacagcgcctcgggcacccggcacccacatgcgcaagtacacaagggaaggttccttaaaatcccagcgctgggcagcggcgctgggtttggtgacagcagggctgggggagccccagctcacgcccccgtgtcccacgggtgcctacccagcccccaggctaacacagctgtcttctctcctgacagtctccacgaccgtcctgtgtcagaagctcatgcaggtggtcccccaggagacatagccaggaggccgagtggctgccggaggagcatgcgcagaggccagttaaagtagatcacctcctcgaacccactccggttccccgcaacccacagctcagctgcccatcccagtccctcgccgtccctcccaggtcgggcagtggaggctgctgtgaaaactctggtacgaatctcatccctcaactgagggccagggacccaggtgtgcctgtgctcctgcccaggagcagcttttggtctccttgggccctttttcccttccctcctttgtttacttatatatatattttttttaaacttaaattttgggtcaacttgacaccactaagatgattttttaaggagctgggggaaggcaggagccttcctttctcctgccccaagggcccagaccctgggcaaacagagctactgagacttggaacctcattgctaccacagacttgcactgaagccggacagctgcccagacacatgggcttgtgacattcgtgaaaaccaaccctgtgggcttatgtctctgccttagggtttgcagagtggaaactcagccgtagggtggcactgggagggggtgggggatctgggcaaggtgggtgattcctcccaggaggtgcttgaggccccgatggactcctgaccataatcctagccccgagacaccatcctgagccagggaacagccccagggttggggggtgccggcatctcccctagctcaccag

SEQ ID NO: 10347 - DNA, 1198 bp, Homo sapiens
ctccatccttggcctcaggccagccctggtgcactgcccgctcccaggcttgacgagaggctgcgggccagtgggtgaaggggcgcgccctgactgccaggccccgcccaggcgcatccgggaggacgggctgggatgacgcgggcgccgggaggggggaggtcgcgaggccggggtctccatggcgcaggaggactggggccttcgaggaccacgcgggcctgggaatagcccgccaggctgggccggacgacgcacgtgctccgagctgggccgagggggcggggctgagggacggggccgggccacggggcggggaggagccgcggacggtgggcggggccggcgggccggggcctaaaaggcggcgcgggcggggttcctgacgcagctgcgggcggcgggcggcgcgcacactgctcgctgggccgcggctcccgggtgtcccaggcccggccggtgcgcagagcatggcgggtgcgggcccgaagcggcgcgcgctagcggcgccggcggccgaggagaaggaagaggcgcgggagaagatgctggccgccaagagcgcggacggctcggcgccggcaggcgagggcgagggcgtgaccctgcagcggaacatcacgctgctcaacggcgtggccatcatcgtggggaccattatcggctcgggcatcttcgtgacgcccacgggcgtgctcaaggaggcaggctcgccggggctggcgctggtggtgtgggccgcgtgcggcgtcttctccatcgtgggcgcgctctgctacgcggagctcggcaccaccatctccaaatcgggcggcgactacgcctacatgctggaggtctacggctcgctgcccgccttcctcaagctctggatcgagctgctcatcatccggccttcatcgcagtacatcgtggccctggtcttcgccacctacctgctcaagccgctcttccccacctgcccggtgcccgaggaggcagccaagctcgtggcctgcctctgcgtgcgtgagtacggggcgcgggccgggggttgggaggtcgtagtctctgggtccctgcatccttgcatcactacgcccctggctcccacatctctacatctttacgttcctggaccatcccggcagttctaggctaaggtcattggtcccagaaaccacgtgcgtttctttcattcattcttttacacttctcc

SEQ ID NO: 10348 - DNA, 1239 bp, Homo sapiens
gcagaaacggagtatgggttgtagtctagatggatgcgtgcagctgggagaaacttgggaggagaggtggcgtatcaccacggagaccagtggtatgggtgggaagggatgcttctttctggggtgtggtgagtgtagcagggctgaggccccttgggagcaggaagcgacagagcgtttgctgtagtcagtcaggccccactggagacttgggctgagggagaggacgtttccaagccagtgttgggaaggtggctttggaagggcatgaggaacacagtggaaacggagaggccccgggtggctcgtccagtggttaaggaaagaggcagcgggtggcgttttcaactatttgttaattttcaaagaaactaaccttttgggggtttgaggcaagaagaaccctgcatgtaaaactccacagacgttcgcggcctcttgcatacacgtgctcggctcgtggttttcataatttcacgtgtagcgatggttaatgtcctctcctcctcctttgcttctgtttggtaggtgaccaaaagccagccccactgtgagttgaactctttcgtgttgaccggccactctccgtgctctggatgatgtcggaacacgacctggccgatgtggttcagattgcagtggaagacctgagccctgaccacccaggtacagagctgtgggacagtaggtgaaatattattctctttattcttcaaaaaccaaaagctgctccagttattttctttcctttaagcagaagaaaaagtaatgcatgctgcgtatgaaaagtttgaatcctagagatgtgaacactgtcggcccctcccttccctcgcccctgcagcctcagccccacgtcccttctggagggggcccctgtgacactttgtctcgagggccatccctgctcccactccttgggggtatgcgtgtgttctacactctctcccctgccgcgtccctgtgtgcggcgtcgtggatctttaccatgttgtatgtgtaatcccctgtgtgcggcgtcatggaaccttaccatgttgtgtgtgtaatcccatgtgcggcgtcatggaaccttaccatgttgtgtgtgtaatcccctgtgtgcggcgtccaggatccttaccatgttgtgtgtgtaatcccctgtgtgtggcgtcatggaaccttaccatgtggtgtgtgtaatcccctgtgcgtggcgtcatggaaccttcccatgttgtgtgtgtaatcccctgt

SEQ ID NO: 10349 - DNA, 10940 bp, Homo sapiens
cgagagccctgaacgggatcctcactctccagaggatgaagagcagccacagggactctcggacgatgacattctgagggacagcgggtccgatcaggatttggacggggcgggggtgagggcttctgatctggaggatgaggaaagtgcagccagggggccgagccaggaggaggaagataatcactccgacgaggaggaccgggcaagtgagcctaaatcccaagaccaggactcagaggtgaatgagctgagccggggcccgaccagctccccctgcgaggaggagggggacgaaggggaggaagaccggacaagcgaccttagggatgaggcctcctcagtcaccagggagctggatgagcatgagctagactacgatgaggaggttcctgaggagccagctcccgccgtccaggaggacgaggctgagaaagcgggggctgaggatgatgaggagaaaggcgaaggcactcccagggaggaggggaaggctggtgttcagagtgtgggagaaaaggaatccctggaggctgccaaggagaaaaagaaagaggacgatgatggagaaatcgatgatggggaaatagacgtgagtatgatggagcagagcgtcgcggggcatcctgcccagcagcctgacatagactggtgctggaaaggagggactctgtgtgggactgacttagtgatttgttactagggatggtgcaggagaatgagaggcttgttttgggttcagtcccatagtgattggagagaaagagccagaaatcgagaatgagcagaggcagctccagaagctgccagcagggtttccgtggccctcggccggccagctggtgggattgtttgggttgtagtgaaaggtccagcgcccagtgtttttaggttctaggaatgaagggttaatgtctgtccttgtctttgccgtcttcaagtgatactcaagttaacactcaaccagaaaccacgtgggtttccactcttgtcaggtttttggactgaaaagaatgaggaaattttccatctggttttggatgttttaggcatttttatgctggtcctagagcctgacctctggagagggcaccagctgggccaggcctctttggacatatccctgaaaagactgtggtgggcacctcaacttctgacaaagccagcacacttttttgtacattaaattaatgtggccttcaggttgaggggaaggtagtactatctatgatcctaggtatgggtaggtggggttttcttagcagttgatgccgttggaaaaactatgagtgtttcgggagaaacaccccaaagtcctcctgagtgatacttgccggagctattgaactcaaaggaggtgagcaagggacagagcagttgaactgaactgggtttttgttgttttttttttgaaagatcctggggaaggggattgtgcttatggggagtcattgcggtgaagagtgtctgccgagagtatctctctgatgtcatgctctgggttgaggcaggtaaaggctgccagttagatgtgtaaccgccggtttgccttgaatgccatgctccttttttttgagagagagagtctaccctgtaacccaggctggagtgcagtggcgccatctcagctcactacagcctctacccccaggttcaggcaattatcctgcctcagcctcctgagtagctgggattacaggcgcccgccaccactggctaatttttgtatttttcgtagagatgaggtgtcgccctgttggccaggcttgtttcaaactcctgacctcaggtgatccggccgtctcagcctcccacagtgctgggatcacaggcgtgaggcaccacgcccggcgggtgccatgcttctccagtagcatgctggcgtgcgtgctctcaatgcacgtttggatatgactttccggccatcgctgctctctgtggcactgctcagtaatttatagggtttgaagtattgctcatgtgactttacgggacgtgtgtgcacctgcaagctgagaattttagatgtttcatctttccgcagcgaagtgtaggaagtggtctcctcagctagtgctttttgcaagaggagacctaccccagggctggcagagggaaaggagagacggtgagattcaggttcatcagctgggggagctggttgggttgaggatgcccatgagactgagtttttgtgtcctgggggtaacagccctgtctgcaccaccactgggagtgcagcaggtcctgcacccagggctctggcgtgctctagttcctcttaagaggactggctgcagaccctcaagtcttgggggagattcatcagacggatcaagggtccccatagtggtcctgaaaggccatgtctgtggagcatactgtgagttctcagtgccgcaccatgggcgcgggcggtgcggtagatgggtccagctgctctggagaatggccctggctgccaagggcctggacatgctggtttcccctagacacagcacatggaagaaaaaccccatttgccatttttgcctacctagaccttgcctgccctgcctggcaccgtcttgtgaggggacccacagttgaaaacggagtgctgctgtggaaaccccagcacagctcccttggcaaacggggaggcaggtttcttccaccgcacagactgcctccagcgccccacatcccccataggtctgtgctcctggacaccagcacaggtggaccttgctgtgccacatgctgagtgtgactgggcagggcggagcagagcccgctcctgctgtgggggcagcaggcctttaaccaaggtgggcagtgctgtgaatggtgggttcagcctctacaagagcacatttgacttcaggcccctgggttgcttgccccaggagcccccgtggtctcctcttgttcccacgcccagcagcgtttcaggctcctccatcctttatgtgtcaacctcagcatttgcgtaggctgtttctctgttgcctctgcctctctgtcgtgacacaggttcatctgtgtgtgtgtgtgtgtgtgtgtgtgtgtgtgtgtgtgtgtgtgtgtgtgtgtatatgtatatgtctctgcctgctgcttcccctattcccaagaacatgtttcctaagactgggggctacctggctggttcccctatctccctggggcctggcacatagtgggcagccagtcagtagaggaatcctacttgcccggggcacattgaaggtgagaacctttgtaatgtgaagtggcagtgagtggaaggtccacgctcaagagccagtcacagatggaagggagttcacgtgagcagcatcagccctccacccttgtgggaaggacccagcagaggtacgcgccacgccatcctgtgcatgaagagctgccgctccggctgcttccagctttttcctcctctcaggcccagttccaagcctgtcgtccactcttgcatctctgccgtatctccaccaagcccacctcctgtgcctgcctctttctcagaggccctgctgcattcctgccccgcgccctgctccctgtctctagctgggtttctctgatggactgggagccctggggtgcgccgggtccgtgagcagtcagcttcccaccaggcctttcgcccggtcccctttcctttcagtccctggaaagcagcctctgcgtgtggtgcaaagtgtccgttctagaagacatttttctcgttgctttcaagtagagccctggtgtcacgtctactacccagatgtttctctgtggaagaattactctctttggcctgtaccttcgcaaatggatgtttctgaggcctcatagcattccaggtcccagcagggtcttaccggcccagtcaggagagggactgattcgcctagaggctttccctgcatgcctgcagcctcgtggcctaccccttggcaccctggtctactggatacctggaaggattgaatggcaaagtctagagagccgtttgatttggcattcttttctctttttcttagttttgatttttaatttttgttgcttttaatttaaaaaacagatggggtctcactatgttgcccaggctggtcttgaactcttggcctcaagtgatcctcctacctgggcctcccaaagtgccaagccactgtccctggcctgatttatcattctttttcagaagcgctttctcttctctcagggcacatgtcccttttagattttgggtcactgggacaggtgaactgattatggggtacactttccttgatcgggacatcaatttgtacaataagcccttgaaattgtttaaaccacatagcttgtgcctaaggccttgaatctgtgtttggtatgctgccagaacaccccctgatgcaagtatcttctggaagtgccgctggcctgcgtggtggggtggaaagtttccgtacagggctgggaccagcagtttgcagcacctggctcatttgtggtgtgggtgagggcgtccctgacaccagctgaccttcagtcaccggtctcttacctgttcaggaagcggcatggaagagagctgggtgcagcaggccttgtttttatgctcctgccgtccaaagagtgcgtggagcccaccctgacccactcatgccatgtggcagcctctcctttctcctgcacgtctagtctctccccagaaccacctttcctgctgggagatgacaagctccttccagcctggcgaggctctgatttgccgttacagttgagaggcctggcctgggtctgtctgcccgctcttttgctcactccatgttccgtgtttatatctgacttgacatttgattagcaggccttccgtcacctggagcacactggcccttggaaaggatagggttcccattttgttccattctcctcttattgaggacctcctacatttgtagggtggcctcctagtcagccagcagcgcagtgggccctgtcctgagtgggtgggccacatgactcctgtcataattggtagctctcagtccaccttttggaacattttctttgcacatggtctttaatattttctcctgtttaaatccacctttcctttttcttttctttttttttttttttttttttttgagatggagtcttgctctgttgcccaggccagagtgcagtggtgcgatcttggctcactgcaacctctgcctcccgggttcaagcgattctcctgccttagcctcccgattagctgggattacaggcatccgccaccacggccagctgatttttgtatttttagtagaaatgggtttcaccatcttggccaggctggtcttgacctcctgacctcgtgatccacccgccttttatgtctggatccatgagctcttctgcagaagattcttcagcgagcctcatggctgtgggtttccacttcaagtggggttctcttccgtgtcactgataaggtgccaagtgcgcccattctattgccaaagcccaggaagcagcggcctgtaccacacttggaaaaagggccccgtagcatcagtagtaggctcagagaccttctgtgccccttagcgtggttagtgttccacatagccacatgaaaaagcgcaggccaccgtccttacagctctgaggcctcagaagctctgagaactgaaaccttttcctcacctggtggcagacctggcccaagctggcgtgaggctgctcatagcctcctgcctcccctcttgtgggagggtccccgagacctctgcacaggattgctgtgtacctcgcaggctaccgttttagaccctgtgttgtcacctttctgaagccagaatatttctgaattctcaagacacctggccccacaggtttcagttaaggaatgatagacccgtattttcacccacatcctgcagacaagatgcccaggattcaggaggttgtggttggcctgagtggccgtgccaggttgggcccggggcccggctgctcggcttcctctggcacagcagctccacgcagtggccccctttccttatctgcatctgcctttgtacagaagctccagtgtgaaataacttttttcttgttgtgtaagtaatacatgttcacagtgttctttctatttaagaaaggaaaagaaaaggctgcacaaagaagaaagcgaaaatcccctgtgtcattgctctgagttagtcctgtttagcacgttaccagtgaggcgtttcctttgaaatggaggactcaggcgcgcttgctgagcacttgctgctcatgttttaagcacggtgcagcattttccttcagcccacatcaccctgctctggggcacttgccccgtggtgcaaaggggaaggcgagctttgcagatcaggtgacttttgcagatcaggtgacctgtccacactcacagtcatgacagcctggacccaggatttgaacctgggccttttcccccactgcatgtgaattttataaaggctcttaaaattggagtagatgatgccctcagcctggtgtcctttatccacgtgtgtatttcccctgtggtgagaaagcaccagcaggagtgtgccagcgtggagacccggcttcagatgggtgcactgaggcctgtgtgtctcctcacactcaccctcagtgtccacgtcaacttggcctgtcccaggtggtgtgtgttgagagccccacgggcaccatccgtttttaggccaatttgtagctagctggtccactcaggcccctccttgtcctctgcttcctactctctgtggctcgggtcacatgagcagaaggccatcggcgtgagggaaaccaggagacccggagttcctgcgtggcagacacttagtgtgacaatctcagatgacttcagctctgggtccctgtcttgagttgtctttgcatgatattctaaaatttaagaacttgttttaattatccattatttagtgatttgtttatttattttgggaggttaaatattttgttatttacacatataaagtaagaataaaaattgggcacggaggctgggcgtggtggctcacacctgtaatcctagcactttgggaggccaaggcgggcagatcacctgaggtcaggagttcaagaccagcctggccaacatggcaaaaccccgtctctactaaaaataacaaaattagccaggcgtgatgtcgggcacctgtaatcccagctactcaggaggctgaggcaagagaattgcttgaacccgggaggcagaggttgcagtgaaccgagatcgtgccactgcactccagcctgggcgacagagcaggactctgtctccaaaaaaaaaaaaaaagcatggtaatcatccattatttaaaagaccattgtgctaaatggtggttagttgaaaattcacaatattatattgctgagtgattggtggattatttttgtttgtttgattttttaactgaaaggggccataagcccagcacaccaatatgtacagcccctggtccttgcgggtgtagaggctgggtgactggggtcagtgtgtaggtgctagtctgtgttctttgggttgaaatgatgtctcgcaccttcagtatgcaactctggtctgtttaccgatcacctttagtagctacagggtcctccctccaatcttaaggtggttacattgttctccttttttgcttctgtgaatgttggtggttacatctttgcagaaacaatgctacatctgatctagtttgtttcctattcatcctgatgcgggaaaaacccttctcaccacctcatctcctacacgctcacttccaagtaaggcaggaagattggaatggattcgaactttccaaatgagttttgtttttctcatgggaacaaagaatgtgttctccacttagatttgagcttacatagaataccacgttgagattttagtgtggtgctcattactgtaagaatagtagtaaaaagaagacacaaactaaaagaccagagaagagagacatcctgtcacttggcataaattaaacatgccttctctgatcatttctttttttaatttgttatgtttgatcatttctttaaaaagtgattctgctggattacttaagggatataactctcaggaatctgttcttttccttataaaatactttttaataaccagatatctttgaggcaaaaaatgatgcaaatatttaagctgtgaaagtttaggttgtcgtaaatccagggtttggtttcagcattttttcattcaacagataattacggactgtttactgtgagccagatgctgcctgggcccagcaacttggcgatgggcctgccctggcagacgtgggcctgccctggtggggcacagggttcagccaggcaggtggtggtgtcgtcaacacaagggtgctcaggtgtggctgcaacacctgcagggcttggggctgcaaggacctgtcgtagggggagctcagggaaggccaccccaaggaaggggactcaagcttccatctgaaagtaagttgaataatcaggaagaggagagggaagaacgcggtcaggcctggaactggaaaagggcgcttcacactgtgaagcgagactggaggagttgaggagggaatgagagaggtcagttagaaagtggttttaccaggctgggtgtgatgggcagtggtgcagattgcaggagatggggagggggatcaagaggggccacatgggaccggtgagattggttacgctagggctggctggaagaggccgggatcaggctgacgagtacttccatcttggatggtcctgtgtcagggatgtcaggtgggcagctggtgcccacgtgggctggggtggtgtaaggaggggtctcagctgcacgtccgtgggaacaggccctgggacagtgggtggcttggggagagcaccaagcaagggtcaggtttggctgtgcacccgagtccctgtgggtgaggcccagcttagagctcctgggttgttctaagacttgacagtcagggtgaggagctggttgaggatgagcctcaaggcgggccactcccaactgctggcatcactgccctgaggcacccaactcctcccctccccaagaattgtaaattagaggatgtttgtgtttaagggacataaaatattttgttctccatattttatttaaatgttaaaagttttaaaaccccgaagtgttactatttcctgcccagagttgatagttaagagaaatgtcacgaaagcccactctgtaaattgccctgtgtgctgcacagtgcttctccctggtgctgtggcgggatgcttagagctgccgggcacgctctgatcatccctgctatgtagatctgggacctaagatttggaaaattgacgtgaattcaattcctgtgacaatatccaggttccacacgcagcttcctgccccttctggtttggagaaagcagtgctgattgatagatgcctcccccacgctaagacggtgttctctgtttcaggatgatgacctggaagaaggtgaagtgaaggaccccagtgacaggaaggtgaggcctcgtcccacctgccggttcttcatgaaaggtaattgtctgcgtgtgaggccttctcgcagccagctggggccccaccttctggggctgtggtgctggctcaccttgccaggccctgctctgctcaaggcagttctctgggcattactggctaggtggtggtggtggtggtggtggtggtggtggcaatattgatggtaaacaataggcccttttattggtgcttttatcactttaatgactgccttggtgggagcagcctggtcattctcattctcacactggtggtcccaggcccttccgatcgcagcagacccataactataatgcagatggcatcagtcatttttcaaagtggtccttttcataaggccgaatgttctagacaccagaattagcattttccccacctctgtagagatggccgcttttcctgcaagatgtgtccgaagcgtttgttcgtgtggaatggatttcgaaatggccagagatggccgctgaaggcagcagggctctctcctgtagaaggaatggtgtgagttcaggagctgcagcaggggacagtgtaagaaagtgtcagaaaagtctgggctgacccattttaaaatgtggcagaactctagcctgatgatgttagggctttttgtttcgctgcttaatgtcttgggggattcggaaatggaaatgagaatttccaacttgtaagggtatctttgatgtgcagcagtagttttggcatatttcttgtaattcagcgttccccttggaaaggtaggaaggtgtttttctcttttctcttaattttgctgtaagcccatagatgactgtcactgccagcctgtgtgtgccatctaaagctcacaagagcttcctgtacttcttttccagatgttgtgacaccattatccactcttcttccaccaatatccaattccataccattcagaggccaggttaaaggtacaaaatacgctatattcactctcttcagtaccttaaagtccccctactccagaggccagacttccttctcctggatccagaacacagctgtgaagccagaaggaaagggggtctttgaggggcagagagctgttcggaacctcctccttagaggcacgtgagccagtcgagcatcggggacaggcaggacacacccttggggtgtggcggagtcccatcattcagaggcaggctgtgctcttagagcagccgggaacgcccctgtgcaagagatgacctgatgatgtggggctcatgggaaccccgggttaggctcgctcctgtgggtgtgtgcttgcttggttttgccaagcaaaaacagttgacgtgcccaagtcacacgtgcatgtgaggggcccctactggggagagcctgtgagggcagcagacttagagccgtagattgtcacagacacacc

SEQ ID NO: 10350 - DNA, 1754 bp, Homo sapiens
cagcgaattgcagccccaccccccacccccccccacacacacacacacgctcctgccctggttgaggctggagggtgccctctgctccgcatgcccttgggcaaaagatccctgggcacagaggtgggaagaataacaggaggttgtgcggggccagcccaggaccctcccagtctgctccacaaagcccgggagccagtggctaggaccaggcctgcttgtggcagtgggagcctggccatccagggagccccttgcctgtcctggtggccgctgaggacacagtggaagcgcccctacggggaggtcaccccttccacctgcagacgtggcttctgggggctcaaggtcttccccacccccttgtaggaagcgccagctgtcaccccagtccaagagctccagcaaggtcacgagcgtgcccggcaaagcctcggatcccggcgccgccagcaccaaatcagggaaggccagcacgctgtctcggcgggaggagctgctgaaacagctgaaggccgtggaggatgctattgcacgcaagcgggccaagatccccgggaaagcataggccgtgccccgaccggactggacgcatttttatacatagggtaagcgcagccattttggattttgcagttaatgtcttattttggctgtgattctttttaaaaagtaaaaaagaaaaaaaagtttctcagctggaaaagaagccacacaggaaatgacaacgacgctgaatcccagcctccctccccagagcagaagtcccgcaggacagacagacacagacagcgctagtgaccagcacggttctcatgtaaattacaagccccagccgccagccccgccttctcttcctcctcctccgtcttcttccctggccctggtcaggcctgtggagccccagctctgggtccctagcccgggtccaggcagccaggctccctcctgagctgagaaacggaacctcgcgaaccactggtggcacatccttctcctcccccgcccctgatcacccgcccccggatcagaaatatatctatattctcgactaaagtctcatcaggaaatatttcctgtcttttattttaagcatcaaattgttttagttgatttaaaaaggaaaaaatacagaaaagaccaaaaaaaggccaagggtgttgttggggcgtctgtctaatgtggtgggtctttttttgaggggtctcctaaaataaaatattttgataagcagctgtccttgccctcgtggtgtgtgcgccctctgcccatgcgcagccggggctgcctctgtgtcgtgcactgcactcggcccagcactcgggagccgctggggggcgagggtgtggctgtgcactcactccccccgggaggaccggctgtggagcagctcctgccttcagacccagcccaggagagcattgcgcctcagtttccccattcgtggggctgggttggggcttccttggtccgtgaggtggaggtactttccctgcaggggccgtggagctgctggaggggaagaggtccagggctgactcccagccccaagcccagctgccaccactgcagtgaccaccaccggctccgtgtgcaggccccagacctgctgagccaggccccgcgtgtgatgccacgttccacagcaggggccaccggcagagccccccaggacccaccgctgctgctccctgctttccaccttgaaagccacaggcctgcgcctgggcagcggcctcccaggtgcacgctcc

SEQ ID NO: 10351 - DNA, 1218 bp, Homo sapiens
aggtggggagtatcagacccttgaatagggagcgcctggggtgggggctgctggggtccctgggacccccccaccccaaccaccccagcagaccggagttcctgccctctgacctgctccgagggccaagcttgcatccagtgatcacggccgcccaagccattgccgccaccttcctctcaggggctgcctgttcccaggctctgtggttctctgtcccccctgtgacagaagcagtgcccagggcagggggctcgcagctggcaggggcggctgtgcctgcaggagctgcgtgtgggtgtcaccactcaggcgctttaccttctgaccaggacccacaggaagggcgggggcacaccgctaccctcctgtgtccggccctacagatgctgggcacaggatgaggcgctgccattcctggtgacctgacatggatttctatccccaggtggggccagggcctcaaatcctggatgacccctgcgcccacctcctgggtcctgacggcctgccgaagccagctgcctgactgcctcagcagggaccgcatgccgcttggagaaggggtggcctcgccggagctagggagcggatgtggtgggctggccggactcctgggacatgtgggtggtggcttgaccccgggcccatgggcagcttgctgtggggcagtgcagggagtcctgcggccgcccaggtgtcaggagaggtccccgccgagtgcttcagctgccctaagctgcaccagcgctttgccaagatgggatggggagggggtatgagaactggcagagcctcggtgcagcagggctgaagggctttctcaccccagctctggctatgcccagttctctgagaaaggagctcagtggggaggtggtccctccagcggaccagggaaggggtcaccgtgctgggagcagcctccttgggcctcaggaaaccaccaagtgcctcggatggtggctgcccacggcgcttctgctgagaccctgcccccggcccaggtgtctcggagggtggctgcccacggcctgggtgtggctggaatggtggcaggagtgggcaccagtgcggccccggtggccatggggaataaaccagcattgctgcctccggcctccgccgtttttctgtttcgtaaaccagcatcccggggttcctgctctgagtgaccctggcacctgtcagggagtccaggtgtgccccatgagggcc

SEQ ID NO: 10352 - DNA, 1215 bp, Homo sapiens
tctattaccagaaccatcatacttataaattctttatttttttccagaaatagaaaaaaagtctgttttttttctcactctgttgctcaggctggagggcagtggtacgatcaaagctccatgcagcctcgacctcctggctcaagggatcttcccacctcagtttcctcagtagttgggactacaggtacacaccaccatgcccggctaatttttttcttaatttttttgtagagatgtgggggggtcttgctatgttgcccaggctgatttgaagtcctggcctcagggaaccctcccatctcagtcttccaaagtactgggattaggtgtgagccactccacctggcctgtcaattctttgtgtattttttcattgacgtgcatagtacaagcacatagcgtgttctcccaccttgctttttctacgtaccttcttcttagagatcatcccaatttagtaaaaagcttccttgtttgttgtctaaatatacctggtctgtcctagttgggttgttactataaacagtgctttcctacgttgtttgtgcacatgtatttctgcaggagaaattcctggaagtggaattgctgggccaagtgggatgtgcctgagtacttttgatagctgttggcaagtcgccctttgtggaagtcaattgattactcaggtctctctgcggaagtctgagagtgcctgcatgccttcaccagcacagtgggtcacctgccagagtgacatgtgttgtctcactgttttcaatttgcatttcagatggtggttatttttaatttctcttgcaatcacagctgcttttccattttatgcaaagccactaaatcctattgaagagctgatgtggactgtctcggcctatagtcagggtgtattccctcagctactcagagagagtggggcttccagtcacctccttccttctgccacggctgtgatgaaaaagaagacacaggcttggtgctttgggaggccaaggagggcagattgtttaagtccagtagaaaaaaaaacaatttatttttgtttagagacagggtctcactctgttgtccaggctggagtgcgatggcaccatcagctcacagcagcctcaacctcctgggctcaggtgatcctcccacttcagcctcccaagtagctgtgataagtgccaccactcctgactaatttttattttttattttgtagagatggag

SEQ ID NO: 10353 - DNA, 1193 bp, Homo sapiens
tctccttcctgtctccctcgagcccggtgcatctctccttcctgtctccaggactacagtattgacgaggaggccgccttccaggctgctctggccctgtctctctctgagaactgaagggaagcgcagccacccgcctgcgtctggggtcagggatgtccccgctcctgtgtcgcacctggcacctgctcgggagcgcacctcaccggactgagctcacaggaggagcctgcacccgcgcagaaggggagccggggccgagcctccgggcctgaatacgggccagccgccgaggccgccagagcagggccgcctggtcccaccggcgtcgctgggttcttcggtgcttctggccgagcaggcggcctacttgggcagggctggacgctgggacctggagctgccgccgtctcttcaaagccatgataccccctcgtgggaagaagggaccgacgcgcgagtcgcgctccgcagtcgagccgggaggaacccaggctgctgccctgcccagcccgaccctgccccggccccacttccaccttgcgcatttggtactggcttttgtgatacttaggaaccctggcatcttttctatattatccagtgtgataatcttttcacgttttatagagcaaagacagagcagttactcttcatattgcaatatctgtgtttgactaggaataatagtatttttatggaacatttacaaaattatattttttaagaaaacaatcaaaacaagcattgggggattggggcaaggatggaaggagcagtggggcagctgccagagctcaggcgagccatggggtctgctgtggggtctgccctggccacccactgtgtgtctgggtccttgaggtttgtacgtttctctttgatgaccaggaagaaatcccagcaccccagccacaggctgtggctgctcccagcagaggcggggccggcagagaaggggcctcctccacccagagtcctggccttggcccgctgtcaccttcaaagctgactgtgccccgctgcgggaggggacggcaccccagtggtggcagagcttgggggcctgggcaggggcccgcttggcgggccgggcaacacgtcaacattcttttctgttcttggcattaattattgctgtcttttttttaaaaaaaaaagtttaaataaaatgtctcagagcatctctagca

SEQ ID NO: 10354 - DNA, 1216 bp, Homo sapiens
caggatactgagccctcgctgtggcccaccccatttccgcacttcaccccaaagaggtggtgtctctgcatggtgggtcctcgctgtggcccgctccatttccacgtttcacctccaagaggtggtgtctgtatgtggtgggtctttttttatggggtctgggttggccttgccctgtacgtgcctaagtctgtccactccaccagctgggcccttctgagcgcctgtggggaggggtgccggggctctgccctcgtttgctggatgcagcctccgtggctgtgcagtttgtacctggtcgtgggaggggccggtgagcctcgtgttcaccctgaggaagccactgccagaggggccaaccccgcccctttcaccagtctctggacagagcctggatgtgaagatgctgcttttaaagatggagattggcaaaggacgtcgtcacctggcagcgcctcaggacgctgctcactgtgcgggtagcaggcggttccctcatctcaggtctgtgttgcagggactgtttcaaggccttctacgtccacaagttcagagccatgctgggcaagaaccggctcatctttccaggcgagaaggtagcgtctgggtcctgggggtctgactgagcagcctggcccctcgaggtccctgcttgtccctcccacaggcagcctggcctgctgcagcccgccagctcctccttggcctttgaggacagactcgatgtcctagatgtccacgaggtggggtgtctgcctgtgttggaggtgcggtgccctgagtgatgttttttctcccccaggtgctcttggcgtggtctggggggccttcgtccagctccatggtctggcaggttcttgaggtgcgtgttcaccaccccgtgggcccgggctgctgggctgagcttcaggctgggggcctcccttctcagcctgctgaggggctcttggttggggctagagagcagtccaccctgcggcctggacacttggggggttctcagatgtgttcacaacaggtgcaccaatcaggagctgagtccacagtgtgtgtgtgcggcccactctcagatgtgtttacagcaggtgcacaaatcagaagctgggtccacagcgcgtgtgtgcggcccactctcagatgtgtttacagcaggtgcacaaatcagaagctgggtccacagtgcgtgtgtgcggcccactctcagatgtgtttacag

SEQ ID NO: 10355 - DNA, 1104 bp, Homo sapiens
ctatcagacgaccaggtacccgaggctttcctggtcatgctgctgatccagttcagtaccatggtggttgaccgcgccctctacctgcgcaagaccgtgctgggcaagctggccttccaggtggcgctggtgctggccatccacctatggatgttcttcatcctgcccgccgtcactgagaggtgggcccacgcgtgggggcgctcggtctccaggggcggggcagtgcaggctgggggccctgcggggctgtttctgatggggtccttgacctggccatcccgccccaggatgttcaaccagaatgtggtggcccagctctggtacttcgtgaagtgcatctacttcgccctgtccgcctaccagatccgctgcggctaccccacccgcatcctcggcaacttcctcaccaagaagtacaatcatctcaacctcttcctcttccaggggtgagtgcaggtccgccggggtgggggtcacggcccgggcatgagggagcccacctgacgggaaccctggctgtgggcaggttccggctggtgccgttcctggtggagctgcgggcagtgatggactgggtgtggacggacaccacgctgtccctgtccagctggatgtgtgtggaggacatctatgccaacatcttcatcatcaaatgcagccgagagacagagaaggtgcctgggcccagggcgggggccgggacaagggccagggatatgccctctccctaagacagaggcactgctgccacgagaacccgtggtgctggaggccctcccagggctcggagcccatggggacatgaggcgagcccacccactagctgatcacgaggccagtgatcttggcagctgcgagtgagtgctgggcgcagaagtgggcagcggagttggtcctgttccaggcaggctggcagcagagcagggcctggtgcagggaggaccggacagccactgtttgctgcattcttgtttaatggcctttctcagagagaattcgtgcgtcagaccactcccccacgtaaaaagtacaactcaggggtttctagtggattcacagttgagcatctgccttctcaccacttcaaaaagaaaccccggg

SEQ ID NO: 10356 - DNA, 1135 bp, Homo sapiens
cccaggaaatgaggggcaggaacccagttgggagatgacattttcggaccctctcccaggcaggatgcagtgagtgggaccccactgctgcgggaggagcagcaggagcatcagcagcagcagcaggaggaggaggaggaggaggaggactccagggacgaggggctgggcgtggccactccccaccaggccacgcaggtgcctgaaggtgggttgggcgggcagagcacagctgccacccagtctgctgtgccatgtcccagctcggggggcgttggcagagtcccctctgggctccagagcctcttcctcacaggggacccgggaatccccgtttgtgccccgcactgaccctcacaccatcacaggggcagccaagtggggcctggtggctgagcggctgctggagctggcagccggcttctcggacgtcctctcacgcgtgcaggtgttcctgcggcggctgctggagcttcacgttttcaagctggtggccctgtacaccgtctgggtggccctgaaggaggtgagtgtggcaggcaactcagcttcccatctggggtggggtcgctctggcctgcccagctggcctccccaagcccagccccacgtgcccactgccctccccaagcccagccccacgtgcccactgccctcaggtgtcggtgatgaacctgctgctggtggtgctgtgggccttcgccctgccctacccacgcttccggcccatggcctcctgcctgtccaccgtgtggacctgcgtcatcatcgtgtgtaagatgctgtaccagctcaaggttgtcaacccccaggagtattccagcaactgcaccgaggtaccggcccccgagggctgggacgggaggaagctccaggcaactctgtattcgcagcccgaccctcctggggcagctgcctcagtgcagtggggccagcaatggagatggaggactctcccctgggggcgccaagggggcttcctggaggcagcatccttcgacctcaactgtggaccaggggcgcactccctgcacacaagggtgtccagtaggggcggagtcccagggtctccggcagtgaggacgggagggccccacccctggacagggagagacagtcaggcatctctgcctgg

SEQ ID NO: 10357 - DNA, 1094 bp, Homo sapiens
tgctctacaccctgaccttctggctcctgctgcgccagtttgtgaaagagaagctgctgaagtgggcagagtctccagctgcgctgacggaggtcaccgtggcagacacaggtgagtggtgggccagaggcgggggttgccctcctgcctgcccgccctgatgccatcgcctgcccctggcttggcccacagagcccacgcggacgcagacgctgttgcagagcctgggggagctggtgaagggcgtgtacgccaagtactggatctatgtgtgtgctggcatgttcatcgtggtcagcttcgccggccgcctcgtggtctacaagattgtctacatgttcctcttcctgctctgcctcaccctcttccaggtggctggggggccgggatgggggctggggcacggaccctccccgcggtcctcaccacccccacctcacccggcaggtctactacagcctgtggcggaagctgctcaaggccttctggtggctcgtggtggcctacaccatgctggtcctcatcgccgtctacaccttccagttccaggacttccctgcctactggcgcaacctcactggcttcaccgacgagcagtgagtccaggctggggcggtggggcaggggcgccgaaaccccgtgcacttccccggggctgcagcggctctgccgggggccgggccggtgctgatgctgcccctccacaggctgggggacctgggcctggagcagttcagcgtgtccgagctcttctccagcatcctggtgcccggcttcttcctcctggcctgcatcctgcagctgcactacttccacaggcccttcatgcagctcaccgacatggagcacgtgtccctgcctggcacgcgcctcccgcgctgggctcacaggtgcggccccgccctccctgtccggccctggagaggtgtagcctcctgggccagggagggagccaggtgggagttggacaggagccacatcttccaccttcagatcccaaggggcatttgctcataccaaggggatggcagtagcgtggaggtcacagggacagtgggcatgagttgcgacacagctgtgcacctgaactggca

SEQ ID NO: 10358 - DNA, 1098 bp, Homo sapiens
agctgaccgctgtccccacctgcagtgcggcccaagcgggctgagcccagggaggcgtctccgctccacagcctgggccacctcatcatggaccagagctatgtgtgcgcgctcattgccatgatggtaggcggctgtgggggttggggtgggcggccccctctgccgcgcaggtgtggggcatcgcctgggtggggtgcgctgggcagctgtgcagccccctctgccgcgcaggtgtggggcatcgcctgggtggggtgcgctgggcagctgtgcagccccctctgccgcgcaggtgtggggcatcgcctgggtggggtgcgctgggcagctgtgcagccctctctgccgcgcaggtatggagcatcacctaccacagctggctgaccttcgtactgctgctctgggcctgcctcatctggacggtgcgcagccgccaccaactggccatgctgtgctcgccctgcatcctgctgtatgggatgacgctgtgctgcctacgctacgtgtgggccatggacctgcgccctgagctgcccaccaccctgggccccgtcagcctgcgccagctggggctggagcacacccgctacccctgtctggaccttggtgccatggtgagtgtgcaccaccacatccgggggtgcctgggtgcgcagacccatcagggttgtcgtcctgttcaatgtccacttgcccgggggagtggcagcgccaagaaggcagatgtgtctgtctgtccccttctgcccacccagagccagcccagagtagcttctcagtgagcgtttgttgactgaataaacagacaaccttgtgttggcacgggcaccacccctgtgccctgacactgtgtgagcgtgggctctgttggcacgggcaccacccctgtgccccgacactgtgtgtgagcatgggctatgcccattggcacaggcaccacccctgcgcccctgacagtgtgtgtgagcgtgggctctgcccattggcaccatgcacagccctgggtctcagtgacaagctgtgcaggccatgtgttcacagggtgcctgcgtgtccatgtgaaacgggtgccagcatcgtgtctggacacctgtt

SEQ ID NO: 10359 - DNA, 2491 bp, Homo sapiens
ggcgcggacccagacccctgagaaaaaggtcccgggcactgctggcgctgtgccctcagtccctcctgcggggggcagctcctgcctcggggactctggcaggtttcaaatgctcctgatgcattggtgtgttgtctgcctctgcccctgagagctgacgaaactgcgctggggagagggcagagcttccctgggggagctgcgtggacacagcagagctggggtgtggagccgggctttcccgtcaccactgctacccctaacggtgccagtgctggtgggtgtgcaagggccgcgaaagccatcgtgtgtggcatggcaggccccatcggagggtctccctggccgaggggcctgctgtggcgttggaggggtaggggcctactgcttctcatgaggctcctccctccctgacagtggcgagaaggcgcccgcctaccagcgcttccatgccctggcccagcccggcctgccgggactcgtgctgccctacaagtaccaggtgctggcggagatgttccgcagcatggacaccatcgtgggcatgctccacaaccgctccgagacgcccacctttgccaaggtccagcggggcgtccaggacatgatgcgtaggtgagtggccgggggtgggctgtggctgtcctggagttgggggtgggcccgggcctgcctcctgagccgcccccatcctcccataggcgttttgaggagtgcaatgttggccagatcaaaaccgtgtacccggcctcctaccgcttccgccaggagcgcagtgtccccaccttcaaggatggcaccaggaggtcagattaccagctcaccatcgagccactgctggagcagggtgagtgctgggtgcgggacctcggtttccccatctgtgagccgcacagtttccagggtgggtgtgaggtgctgggcatctggcccaggactggtcacgggtgggtggctgggtggcctggtggggacttaggcctggactcgtcccacagaggctgacggagcagccccccagctcacggcctcgcgcctcctgcagcgacggcagatcttcagccagaagctggtggagcatgtcaaggagcaccacaaggtgagcggcccccggccccgctgtgtgaagatggtggcaccagcactgcctcagcacctaaccctgtgcttggagcatccctgccactcacagcttctcccgggatggaactgggctgggttcaccctgagctgagggctggtgtgctcagggtgcagccgcaggcactgaggaggtccccaaggcgttcagcgagcgcggaccatgggaggccttgtgctctccctccaagctgagcactgggcagaggctgagtgacttgcccgaggcggcccggctgggacgtaagcacaggcctacctcacatgcagtctgcccttgtctcagatgtgcccagggtcacccatctactccttctccccaggccttcctggcctccctgagccccgccatggtggtgccggaggaccagctgacccgctggcacccgcgcttcaacgtggatgaagtacccgacatcgagccggccgcgctgccccagccacccgccacggagaagctcaccactgctcaggaggtgctggcccgggcccgcaacctgatttcacccagggtgagactgcgaggcttgggcagcccatttctcccgggtgggtgggccagcctgaccccaggcttaagaggtggaagccttggtgatgagcttgacgcctcatctggcttcctccttggctggcggatccagagagttggtggcatttgccctctgtccccagctgcagcctctaagcctggctctgccactagccccatgtggggagttggcctgggcaggcgatgctgcacactgggacactgcattgaccggcacagaccacccagtgtgctgggtgaacttgtgccttgagagataccggggactcctgggcagacagccaggggcacgttgcatcttgtgacctctccagtccaacctgtccctcccgcagatggagaaggccttgagtcaattggccctgcgctctgctgcgcccagcagccccgggtctcccaggccagcactgccggctaccccaccagccaccccgcctgcagcctctcccagtgctctgaagggggtgtcccaggatctgctggagcgggtgagtcgtccccagtgatggcgggtgggcgcctggtgacctgctgcccactaaccaggtcccggtacctgctgcagatccgagccaaggaggcacagaagcagctggcacagatgacgcggtgcccggagcaggagcagcggctgcagcgcttagaacggctgcctgagctggcccgcgtgctgcggagcgtctttgtgtccgaacgcaagcctgcgctcagcatggaggtggcctgtgccaggatggtgggcagctgttgtactatcatgagccctggtacgtgcagggcggggtgaaggggcgtgca

SEQ ID NO: 10360 - DNA, 1409 bp, Homo sapiens
cagaggccagcgccacattggttgttgaagggcaggactcggggctccttgctgttcccacgccagcccaacagcccgggttgaaggaagccacagggccaattctgtgttgaaccctccccaggcccctcctccagtacccccccaccccacgccttcccaggcccccctcgggccatctgggagacagaatcaggaacaaggaaggggaaggcggaggcctcctgggctggacgtggacggctgaagtgtagctcacacacttggaccggtggggccggctcatgtggcagcttccccggggacgtgaggatgtcagggtcctccatttccaccttccctaggggtctggagcccaggccccaggccttgccagccctgaccaccgcacactgcgaggcagccgcccctaccacgccccttggcatcagacgatgggtcccccacccgccctggaaccggggccccagcagccgcatgcagcctccggcctccccctccgaaggctcctgggggctgccttccactgagtgggttttcccttctgcagtaactgccaggccaaagctgaattgtaaaagttgcgaaatgatgggccgggcgcggtggctcacgcctgtaatcccggcactttgggaggccgaagcgggcagatcacggggtcaggagatcgagaccatcctggctaacacagtgaaactgcgtctctactaaaaatacaaaaaattagcagggcgtggtggcgggctcctgtagtcccagctactcgggaggctgaggcgggagaatggccggaacccaggaggtggagcttgcagtgagcccagatggcgccactgtgctccatcctgggcgacagagcgagagtccttctcaaaaaaaagttgcgaaatgaagaaaagtcttggaatagagcacaaggcattttagctctggggattttcttgaaaggaaattgtgtttggggggagttatgcctcacacaaccccctgggtaccagtcctcgggcggccagggggttcacagctccccaccccaaggctaaggggtcacctggcctctgcaggcggacagaagggcttctgccctcgcggatgcgcgccctggcctggccacaccttccggcctccctcccccgggtccgggcggggaagagccgcctcaacggcagggcccatccgcgagaggccagcgcccccggccggtccagcccaggcccgccgcctccgccctgggctgctccctccgggccctgcaccgccctcctgctacttggaccgcttcctcacgcccttctccaccccgcgcgccagcctcccgcgcgcagcgtggggatctcggccaataaaggagaaagggcgcggcccgtacgcgcgccaggtgcgtgggcgagaccagctcacgcccc

SEQ ID NO: 10361 - DNA, 1353 bp, Homo sapiens
cagggcagggcccccgggccagggtgagccccaggccagggtagaggtggcatagacagcggttatggggacagacatgtagcacagctggcgctaccgccacgtgtagtaactagatgccaggagcgggtacagctgggcctggcccataccagggtaggttcacggccgtatcacgcccttggccctgctggcagctgaggtcggcagagtctggggctctcccttcactcctcctccctcctctccccgctgtgtgtcccgcagacttgcctcctcatgcggcagcagcacgaggccgcggccctgaacgccgtgcagaggatggagtggcagctgaaggtgcaggaactggaccccgccgggcacaagtccctgtgcgtgaacgaggtgccctccttctacgtgcccatggtcgacgtcaacgacgactttgtattgttgccggcatgacaccgcgggacggccgcaggacgcaggcgagggccgcacggctgcccaggactgctgctgagccccaggggcggaggagggagcgccctgtccacccgggcggggagagaccccgagagagactgcacttggccacagcgcctccatcccttccagactggtccagacgtcggggaggtgaaacacgtctcttctctaccagctgccgcggcgggggcaaagcccccagagcctcactggccccggcgggatgaggagaccatgccgggcgcgcacacacggcagcttctgtttgaaaacggcgaccttcgggcccttttctccagcaactgcagaggcatttcaggagttggagaacggagtacatttttaaaattttttgttccattctgatcaactaaagaaaattaaggtgtccacctctcacaaacagtgacctgcaggtcggaggggcaggagccccatcccagccgtggttctgttgccgccgagctgcgacggcctcagactgggcttcagacctggtgcggagccaggcggagggacacagagccaggactcccagccgtattgaaatggagtcaaatccgcgtggtttgtatcttctttcctttaatcttgggcattttgtttctctttctgagaacgtaacttgaaacactacagagccaataatcatataaaaagtgtatccgtaaacgctgtacagttttatataccttcacaatgtacttttgctgccttctagataatttattttgcaacacattactgcacagttgtaaataacttatgtactgtaacatcactttcagttatgtgtaaagaaataaataaattaattaaaatgctctttgtacagtgcgtccctccaggagaggggctgtgtgtgggactgac

SEQ ID NO: 10362 - DNA, 1104 bp, Homo sapiens
cccccgagccactgcaagaccaccggctcggttgtcagctttcatattccactgtgcacgttacagcctggttgaaaggctgatttggggtgcatgggccctccctgtgaacacaggaagctcagcctacccccagccccctcctgctgtctcgctgtatctcctctgcacagttgggtgctcatgccggtgtttcaggccctccttggcacacgatggcccacagatactgtcccgcgcctctccctgcactatctcctcactgcgtggtgctgtacggggcaccgtggaggtgtccgctctcccgcgtccagcacatagtggtttctagaagcttcctggtgtgtctgttgctgggactggaggaggcctccagggcaggctcctaggagtggggaggctgagtcgggacccccgtgaactccagactatatccttcgtgcagttccacagccccagctgaccccccacactcaccttttgcctgtagatcgcaccccctccctccctggcggagcccctgaaggagctgttcaggcagcaggaggccgtccggggaaagctgcgtctacagcacagcatcgagcgggtaagtgggctggcacaggcaggggggcgccacggccagggcttttcacggcgcaggccccaggggctgtcgtgttgacagtggggcctggagcgtggctgtgtcccagctcactctactcctctcctccttcaggagaagctgatcgtatcctgtgagcaggagattctgcgggttcactgccgggcggccaggaccatcgccaaccaggcagtgccattcagcgcctgcacgatgctgctggactccgaggtctacaacatgcccctggagagccaggtagggcccgtctgcatgccaggcccatgagtccaagtgcctgcaccctgcccgcctcccctccccttgatagattctgcactttgaccaggagcttcccgggtgctcagcaccttgcaggggctacagagtcctttgcatgcctctagccttgggcgagcctcagaaaggagccaagaaggctgcagcagacagcagacagctccccgcacgggcaaggccctcaggccactggg

SEQ ID NO: 10363 - DNA, 2226 bp, Homo sapiens
gaaagataaaaatgattccgagagagaaccttccaagaaaatagaaaaggaactaaagccttatggatctagtgccatcaacatcctaaaagagaagaagaagagagagaaacacagggagaaatggagagacgagaaggagaggcaccgggacaggcatgcggatgggctgctgcggcatcacagggacgagctcctgcggcatcacagggacgagcagaagcccgccaccagggacaaggacagcccgccccgcgtgctcaaagacaagtccagggacgagggcccgaggctcggcgatgccaaactgaaggagaaattcaaggacggtgcagagaaagaaaagggcgacccagtgaagatgagcaacgggaatgataaggtagcgccatccaaagacccaggcaagaaagacgccaggcccagggagaagctcctgggggacggcgacctgatgatgaccagcttcgagaggatgctgtcccagaaggacctggagatcgaggagcgccacaagcggcacaaggagaggatgaagcaaatggagaagctgaggcaccggtccggagaccccaagctcaaggagaaggcgaagccggcagacgacgggcggaagaagggtctggacattcctgctaagaaaccgccggggctggaccctccatttaaagacaaaaagctcaaagagtcgactcctattccacctgccgcggaaaataagctacacccagcatcaggtgcagactccaaagactggctggcaggccctcacatgaaagaggtcctgcctgcgtcccccaggcctgaccagagccggcccactggcgtgcccacccctacgtcggtgctatcctgccccagctacgaggaggtgatgcacacgcccaggaccccgtcctgcagcgccgatgactacgcggacctcgtgttcgactgcgccgactcgcagcactccacgcccgtgcccaccgctcccaccagcgcctgctccccctcctttttcgacaggttctccgtggcttcaagtgggctttcggaaaacgccagccaggctcctgccaggcctctctccacaaacctttaccgctcggtctctgtcgacattaggaggacccccgaggaagaattcagcgtcggagacaagctcttcaggcagcagagcgttcctgctgcctccagctacgactctcccatgccaccctcgatggaagacagggcgcccctgcccccggttcccgcggagaagtttgcctgcttgtcgccagggtactactccccagactatggcctcccgtcgcccaaagtcgacgctttgcactgcccaccggctgccgttgtcactgtcaccccgtctccagagggcgtcttctcaagtttacaagcaaaaccttccccttcccccagagccgagctgctggttccttccctcgaaggggcccttcccccggacctggacacctccgaggaccagcaggcgacggccgccatcatccccccggagcccagctacctggagccgctggacgagggtcccttcagcgccgtcatcaccgaggagcccgttgagtgggcccacccctccgagcaggcgcttgcctctagcctgatcgggggcacctctgaaaaccctgtgagctggcctgtgggctcggacctcctgctgaagtctccacagagattccccgagtccccaaagcgtttctgccccgcggaccccctccactctgccgccccagggcccttcagcgcctcggaggcgccgtaccccgcccctcccgcctctcctgccccgtacgctctgcccgtcgctgagccggggctggaggacgtcaaggacggagtggacgccgtccccgccgccatctccacctcagaggcggctccctacgcccctccctccgggctggagtccttcttcagcaactgcaagtcacttccggaagccccgctggacgtggcccccgagcccgcctgtgtagccgctgtggctcaggtggaggctctggggcccctggaaaatagcttcctggacggcagccgcggcctgtctcacctcggccaggtggagccggtgccctgggcggacgccttcgccggccccgaggacgacctggacctggggcccttctccctgccggagcttcccctgcagactaaagatgccgcagatggtgaagcggaacccgtggaagaaagtcttgctcctccagaagagatgcctccagg

SEQ ID NO: 10364 - DNA, 1297 bp, Homo sapiens
aaggctatactgttagagaatgatctttccactgaaaacaagctaaaagtgttaaagcacgatcgcgaccactttaaaaaagaagagaaacttagcaaaatgaaattagaagaaaaagaatggctctttaaagatgaaaaatcactgaagagaatcaaagacacaaacaaagacatcagcaggtctttccgagaagagaaagaccgttcgaataaagcagaaaaggagagatcgctgaaggaaaagtctccgaaagaagaaaaactgagactgtacaaagaggagagaaagaagaaatcaaaagaccggccctcaaaattagagaagaagaatgatttaaaagaggacaaaatttcaaaagagaaggagaagatttttaaagaagataaagaaaaactcaaaaaagaaaaggtttatagggaagattctgcttttgacgaatattgtaacaaaaatcagtttctggagaatgaagacaccaaatttagcctttctgacgatcagcgagatcggtggttttctgacttgtccgattcatcctttgatttcaaaggggaggacagctgggactcgccagtgacagactacagggacatgaagagcgactctgtggccaagctcatcttggagacggtgaaggaggacagcaaggagaggaggcgggacagccgggcccgggagaagcgagactacagagagcccttcttccgaaagaaggacagggactatttggataaaaactctgagaagaggaaagagcagaccgaaaagcataaaagtgtccctggctacctttcggaaaaggacaagaagaggagagagtccgcagaggccgggcgggacagaaaggacgccctggagagctgcaaggagcgcagggacggcagggccaagcccgaggaggcgcaccgggaggagctgaaggagtgtggctgcgagagtggcttcaaggacaagtccgacggcgactttgggaagggcctggagccgtgggaacggcaccacccagcacgagagaaggagaagaaggatggccccgataaggaaaggaaggagaagacaaaaccagaaagatacaaagagaaatccagtgacaaggacaaaagtgagaaatcaatcctggaaaaatgtcagaaggacaaagaatttgataaatgttttaaagagaaaaaagataccaaggaaaaacataaagacacacatggcaaagacaaagaaaggaaagcgtctctcgaccaagggaaagagaagaaggagaaggctttccctgggatcatctcagaagacttctctgaaa

SEQ ID NO: 10365 - DNA, 1325 bp, Homo sapiens
tgtcttcatcagagctccgtggagagcccctggttgcaggcaggacagcaaggctgaggggtcacacggggccacatctgctggtgcccgtcgtgctcctctgcagcaagcccagcctggccattgctggaggtcctggagcccacagtgccttggccttaaagagctcacttgagaaacggcttgttccggtggggtggggggtggattgaagactctgagacgagcagggaactcagaacactgagtccctatttgatgttaaaatatgaccgttaaacttctgggtaagataatgaatggcactatggtttatactgtttctgttttatgggctcttccagagacgtgaactggaaaaggctctgcagtgtctgggattcgctcagtgctgcaggggagggcaggtgtgaggggaatggccctggagggtgatggggctggggcatccgatgcagctttatagttctgtaattaccacttttaaactttttattacgaaaaatgtcaaggaccctggaattacggtgaggtaggcaggataatggcccccaagatgcccgtgttgtgacccccagaccttgtgagtgcctcacatggggagattgtcctaggtcatcttgcaggcccagggcagccccatgggcccttaaagcttgagagcctttcctgctgagtctgagagatgccagaagcaggagaggttagaacccgaggagggccgcacctgcgctgctggccttagaggagggccgaggagtgtggtggcccctaagcagctgggactggggacctccgtcccagccctgcaagaaactgaattctgccagcagcccccatgatggaggaaaggaaggatcctgccctgccagcaccttgacctctgacctccacaattgtaagcctgaggttttgtgtagtcaccatagaaaactcacacacataagaactctgtactgattcaacaatagaacatgtcacacacgaactggaaactgattctgtgggcgacaagagtctatagtaaacgttatgacagattctttgaatgcgctaatctcagactggactaaagttgggattaaatttaatttgtacttgagttcagtgcattgctgttctgggcataggaaatccaggttgctggtgatgaacagctgaaaagagctgtgtcaccatggttgtctctgtcagtcatgtgaccacccttacccttgtaaaatcaagcaagggagagattattttctaatgtaaatgaaaataaaaaataaagcagcttgcagaaacttggtctttgtttcctctattctgtccccccaaccctt

SEQ ID NO: 10366 - DNA, 1107 bp, Homo sapiens
gctggtcgtagttgttattctcagcgtccctattattatcgctgttttgaaatgagagcaggcggctctcgggctccgagccggagggggagggcgaactggggacctgggggcgtcggggttgcaggaggcgcgcgtaggccgaggaggggcaggaatgcgggcagccgtgtggggggtgttagggggagggtaggcgggcgggtgtggggggtggctgggaggaaagcggtggcggtggcggctgcaacagcagcccttggcctcaaggaacaatgtgagacgttgcctgaaatgttaatttccgttcctcatttcatcatcccctggcagggcggtagctgtgtgtgtggtgtatgtgtgtgcgcgcgcgcgcgcgcgcgcgtgtgtgtgtgtgtgtagggttggccctgccacattgattcagtcccctctcaaagagggattgtactgttaactcttgtgtttgtgttatttgggaaggttggtcggggggagtcttgatttttctcgaggcttgctcttttcctggtgccccattaagattttctgcttctgttgtgtttttggaaggttagtgttatatatcagcttccaagaagttttggaagaggcttgggaagatgaagctggtctaacagctccctatgctttgaaactgttttccttctatgtaacatgcttaggattcatcgtttttgtagattatgagtagttttgtatccttttgcaagaacagggttttatggtagagaaattagatttcaggctttcttacatgaggagagagttttatgcagtcattagagcaatatccttaacacttgaaatgagaaataaaagtgtgcacagttgttgaactgcaaaacttagagaatcttttgatcctttttgggatgttgagacttagccaaacatataagatgatattacctgtggaaaaagtgccatcgaaacagttactgtttttgttgtgtgcagacctagtctatggcataacgttcaaaatcggagaccctgaggctgtttctttggtttctctgagaccttgatttctcttagtaagtattggctgccctggaagacttcgagttctgttagagaatg

SEQ ID NO: 10367 - DNA, 1046 bp, Homo sapiens
gtttgcggaaaggaacatttcttcttagtttttacttcttgcaaccatgaagccatacattgggaagtatttttgtttgttttgtgtttttttgttgttgttggaaagagagtttctctatgctgcttacattggttttgaattgctgggtttacaggcttgagccgccatgtccagctcagggagggtttttctttttttttttaaatcccagggaaggtgattgactcagggttgcttttcagcagtacttatggcagcgaacctgacccccaatccccgggaggtcctccaggttctcctgacgcttggttgttcccttgccctttggtgcatgtgggtttaacaacctgtctttctcttctaggtctataagaaggagaaagctcgagtcatcactgaggaagagaagaatttcaaagccttcgctagtctccgtatggcccgtgccaacgcccggctcttcggcatacgggcaaaaagagccaaggaagccgcagaacaggatgttgaaaagaaaaaataaagccctcctggggacttggaatcagtcggcagtcatgctgggtctccacgtggtgtgtttcgtgggaacaactgggcctgggatggggcttcactgctgtgacttcctcctgccaggggatttggggctttcttgaaagacagtccaagccctggataatgctttactttctgtgttgaagcactgttggttgtttggttagtgactgatgtaaaacggttttcttgtggggaggttacagaggctgacttcagagtggacttgtgttttttctttttaaagaggcaaggttgggctggtgctcacagctgtaatcccagcactttgaggttggctgggagttcaagaccagcctggccaacatgtcagaactactaaaaataaagaaatcagccatgcttggtgctgcacacttgtagttgcagctcctgggaggcagaggtgagggatcacttaacccaggaggcagaggctgcactgagccaggatcacgccactgcactctagcctgggcaacagt

SEQ ID NO: 10368 - DNA, 1134 bp, Homo sapiens
gctgtgtcccgtgcccagtggagtgctggaggggtgcggggggaagcagaagcctgcttggggggctgggctggggcctgggtgtttgcatttttagctcaaacatttctggggagaggcccgcccaccgcctcaacactgggctcctagggccgggcgcggtggctcacgcctgtgatcccagctctttgggaggccgaggcgggcagatcacgaggtcaggagatcgaggccatcctggctaacacggtgaaaccccatctctactaaaaatacaaaaaaattagccaggcatggtggcgggcgcctgtagtcccaactactcgggaggctgaggcaggagaatggcatgaacctggggggcggagcttgcgttgagtcgagatcgtgccactgcactccagcctgggcaacagagcaagactccgtctcaaacaaaacaaaacaaaacaaaacaaaaactgggctcctagcagggggcacacacaccaccaagctcttccagctgctttcccccgcgggtttcaggcccttctgcagaaaaatgtagagtgtgcccgtgtgtatgccgagaacgccatccgcaagaagaacgaaggtgtgaactggcttcggatggcgtcccgcgtagacgcagtggcctccaaggtgcagacagctgtgactatgaagggggtgagtgctgggccctggtgctggatgggtggcgttcgctggctgaagcaggaatgggctctgcggtctggatctggggcagctcagagttgacggaaggtggatcagcgcggggtggggaggttgagggaagctggatcagcgtggggtggggaggttgagggctggatcagcgtggggtggggaggttgagttaagctggatcagcgtggggtgggaaatgctggcagggacacaggtgaggctgcaccctgagcttgcactgatgccccaggaaggacctcttgataagacttgggcttttttttttttaaatatatattttttagagactgtcttgctctgtcacccaggctggagtgcagtggtgcagtcacagctcactgcagcctcaacctcctgggctcaagcaatcctcctgcctcagcctcgcaagtagctgagaccacaggcatccac

SEQ ID NO: 10369 - DNA, 1924 bp, Homo sapiens
caccacacacaactaaaggttataacagatgtgaaattggcgtaggtcattctggaagctgcacacattagcaggatgttttgtagagccatcttcacacaaaataaggtttgcttttttctgcatagagtaccttatttgcttttaggacattacaagagagcacaaagcagtgatctgcatgctaaggaggacatggagagcctggagccacagaactgagtggctggaggccagggtccagcacagagcaaagttgggcaccccctgcccagttcaaatgaggaaaccctccgggggaacgcgtctcgggctaggggcgttgcacagagtggggactgagtgtcactgggcatgaggttgtcagaggaaagaacggggacccctgtggctcagggagagcctcccgttcagcgctagggagcccacgaggggcatcgagatgatgtcatcaccaatgtgtttccattccagatcgggcccgggacacccagacagatgagattgtcgcactgaagaaggtgcggatggacaaggagaaggatggtgagcaggaaattggggtgttgggacctcgcactgggaggaggcagaaggatgtgagttacctgaagtttcctcagagcgactgcacggtgcttgtagcgggggccggcctctgggagggttctggtgtggcccagcacatcacccccaggtccacacgcagcctcagctgtctgccaggagggctctgcagtctccatcccctcctccccctcctgtctggtgaggccacctcactgcaggctcagctctgctgtcccctccacccccagcacctgcctgtgcaggcagggccctgccatgccccacatagatgtccacggtgtttagagaggtgccgattcgtatttggtcaaggaagagttaaaagtgcttattgggccgggcatggtggctcatgcctgtaatcccagcactttgggaggccgaggcaggcggatcacctgaggtcggcagttcaagaccagcctgaccaacatggagaaaccccatctctactaaaaatacaaaattagccaggcgtggtggcacatgcctgtaatcccagctactagggaggctgaggcaggagaattgcttgaacccgggaggcagaggttgcggtgagccgagatggtgccattgcactccagcctgggcaacgagcgaaactccgtctcaaaaaaaaaaaaatgcttattggggtcgccccaattctccctgaggtggggacactgcagcacctgctatcaggtgttcgtgaagcccaagagtggctggggttggggcttccccgccatcactggggtggggctcgctgaggccacctccctccccaggcatccccatcagcagcttgcgggagatcacgctgctgctccgcctgcgtcatccgaacatcgtggagctgaaggaggtggttgtggggaaccacctggagaggtacgtggtctcctggtctgcacattgggccctagggagcatgtgtcttgggctagaggtgttgcacagagcgaggactgagtgtcactgggcatgaggttgtcagagaagagatgaccccacctcaccgcctggctcagcccattgtctgagggggacacaggttgtcctgcccatgtcccctcctgcagcaggggaggctccacttccaccccttaggagaaggccggagagtggcatgcatcttctgtttcttccagcatcttcctggtgatgggttactgtgagcaggacctggccagcctcctggagaatatgccaacacccttctcggaggctcaggtgcgtggcagaggggcctggggtgggggaatgggcttcatgggcccttgtggtgcacatttataacgaaacagggcacttggggacttgaagagctgctgctgcctctgcctcc

SEQ ID NO: 10370 - DNA, 1295 bp, Homo sapiens
gatctcaaactgctgggcttaagcgatcctcctgaagtgctatgattgcagatgtgaaccgtcatgcccagcttatttaaagtctcttaaaccacagcattgtttcattaatttcctaccaattttttaaccagccagaaaactcagacaccacactggggccagagccaggcagtcctttgttctctgttgtaggagggaatgcctgatccacagggccaggcatgggcaactgaggaaaatgaggcctcttcttccaaaatgtaggcagctggggcccaagagcacagggcaaggtagacaggaccaggccagctgcctgctcagtcagcagctctcagaacgccaggatgctgtgggggcagcaccagcacctgcccacactctcacgtggacctgggggatgcagacctagtttctgatggtcctgaaacccttctctgtcctctgatggaaaggcaggccccaaaggtgacaggtgggaataaggacttggtttctatggcgtggttgtatggttgtaaggccctgcaatgaccccgttctctctgtcccagtttcctctcccctgaggctgcctccccagcacccaacccggactggctctcagctgctgcactgcactttgcgattcaacaagtcagggaagaaaacatcaggaagcagctaaagaagctggactgcgagagagaggaggcaagataggaaattcttttactgatttattttctcgcaagcttggtttcaatcagtgctatttctctgggcttgtctgatgaactgtttttctaaagacaaatatgtggcttggagcaagactttttttttttttttttttttttgtatttttagtagagacggggtttcactgtgttagccaggatggtctcgatctcctgaccccgtgatcctcccgccttggcctcccaaagtgctgggattacaggcgtgagccaccacgcccagctggcttggagtaagactttgactatcaagtttactagtaaaaataataatttcagttttttaaatggttgtatgtagttgagacagggtctcactgtcgcccaggctggagtgcagtggtgcagtcagctcactgcagcctcttctgggctcaagccatcctcttacctcagcctctggagtagctcagactacaggtgtgtgccaccatgcccggctaattttgtaattttttctgagatgggggtctgtagtccaggcatggtggctcatgcctgtaatcccaacacttagggaggccgaggcaggcggatcacttggtgtcagga

SEQ ID NO: 10371 - DNA, 1252 bp, Homo sapiens
gggactacaggcacccgccaccatgcccagctaatttttttgtattttttagtagcgacagggtttcaccatgttagccaggatggtctccatctcctgacctcgtgatcctcctgccttggcctcccaaagtgctgggattacaggcatgagccaccacgcccagctgttttttcttaattgataagtagttgataagtagtactgtaactcctgggctcaaggaatctgcctgcctcggcctcccaaagtgctggcattacagacgtgagccacagcacccggcctgcactgttctatatttgcaatttcaaagtgatttccaattgaaatagcttgccccacttgttccttcttgccctgtccactgtggagacctctccctgacccctgacgtctgggtccccgactggctgggcagtgagccccgaggccttcctgtgccagcatactgctctttttcaggagatggtagctgacctggagctgcagcaagacctcatagtgcctctcggccacaccccttcccaggagcacttcctctttgagattttccgcagacggctccaggctctgacaagcgggtggagcgtggctgccagccttcagagacagagggagctgctaatgtacaaacggtaacacctactaccacctgggcagggcagcaccacctgggcagggcagcatctcatgacggtcctagaggttctttgtagtgagtttgtttcccgttacttacttgtctgtgtgtccccaccccaagcctgtccatttctgtggcacatgccacggagaagaggatctggagggttgaaagtacttttgattaaaaccttccagccaagcgaggtggttcatgcctgtaatcctagcattttgggaggctgaggtgagtggatcacctgaggtcaggagtttgagaccagcctgaccaacatggcgaaacgccatgtctactaaaaatacaaaaaaaatacaaaaaaatttagctaggtgtggtggcgggcacctgtaatcccagctactcgggagactgaggcaggagagtggtgtgaacctgggaggcagaggtttcagtgagccgagatcacgccattgcacaccagcctgggcaacagagcgagactctgtctcaacaacaacaacaaaaccttcctgctcagacgtggagggacgtcgcagaaggagctcttgtgaaagtagggaaaagtgttcagaaatgcccacggcggctgcatttataagaagc

SEQ ID NO: 10372 - DNA, 1163 bp, Homo sapiens
cccagaacatcgtgttctctcacacagatggcccaggaaaccttagtcccttccattccttcctcatcttcatggacagagctggcctcagtccctgttgtgactgtttgaggccctggtgtgctgggctcttctctcaggcttggcacgaccctctgggggagttccgtgtcacagagggtgccgctgaggccccgtcgggttggctcccggggctccactcccgggtgcggcgcggcctgcccttcccaacctgtttccttctgctccactcccgggtgtggcgcggcctgcccttccccacctgtttccttctgctccttcgcttctctgctccgtgggtttcgccgttgccttgccccctttctcgttgaactgccacctccttggattcagtttcaagtctgtggttatagtggcctggccaagaaagccccttccttgcttaaagaagggatgagcctgagccacagtttgtgctgggattggtgggtggcgtgcaaggcaccctccctttcctgacccctctttctgctgcattggcaggttcggagtgttcagtggacacacgcttggcagtgtaatttccacagatcctctgaagaggttcttcagtcataccctgactcagatactcactcacagccctgtgctgaaaggtaggcccagtgtggaggctgctcagttgctacccattttggggattgctgttgccttgttgccttggtaacgctgactggagatgccaggaattctaggacctcttttacgtctgtcttgaaccagagactgggtcctcagatgcctgagattgttactaaatatccttttacctgaaagcaacagatttttataagaaaattcagaattatgagtggacaaaataattgtcattaaaatagaaatatcttttttgtttgtttgtttgagtcagagtctcactcacttgcccatgctggagtgcagtggcgtgatctcagctcactgcaacctctgcctcccaggttcaagcaattctcgtgtctcagcctctcaagtagctgggactacaggcgccaaccaccacacccggttaattttttgtatttttagtagagactgggtttcaccatgttggccaggctggcctcgaactcctgaccttcggtgctccacctgccttg

SEQ ID NO: 10373 - DNA, 1103 bp, Homo sapiens
cctatcattttcattaggaaaagtttgtaggttgatgggtccttggtgcctttttttcctgcctgctgctggagaggagctgaggcttgaggagaaaggaggaagaaggaactttaatgcattggctgaatatatatatttaacgttttgtcctgcagatggtcctctgtaaatggagtaaattacaatatttgaggagtcttccttacctcatctctgaaggcagagataccccatagcctcggggccccggctttctgtagagctgctgacaaagtccccctgagccagagctgagtcactgctgtgtccaacagtctcgggttcttgcatctttcccgtccagcgtctcgcactgaccctgggggtccccaacgcaagcccgttcacatctcactattcatatctcagcatgagcgttcacactgtaagtaacgccctggctcttctccaacctgtttttccagataaacattgacgatcttgaggatgaccctgtggtgaacggggagaggtctggctgtgcgctcacagacgctgtggcaccagggaacaaaggaaggggtcagcgtggaaacacagagagcaagacggatggagatgacaccgagacagtgccctcagagcaggtggggggctgagtggtgaggaggtggcatcagacgggagagttccaaggcacccagccacgtgtatcctgtgctgtgattttccttggaggtgtaattttccgagttccattttggttacctgctagttgcccccaaatttacttgggaaccttgatgagatttgcatgaaatgagtgaaggtcgcaggcctttctcctgcatctcaggagagtctgcgcctgcccagcagtgtatgtaaccgcacacgtgtgtccctcctagccaaccgcgcacgtgtgtccctcctagccgaccgcgcacgtgtgtgcctcctagccgaccgcgcacgtgtgtccttcctaactgtgccccgaacgtttgcttggctgggttgtggatctgggtgctggtgtaagtgaactttgaagaaacatgcaggtcaggttaacgtgggatgggcagagatgcagacagcctgctgctgtgctccac

SEQ ID NO: 10374 - DNA, 1099 bp, Homo sapiens
tgagccaccacgccccgccctctggcttttatttacaatgaagttttcaaggttcatcctcactgtagcgtcgatcagaacgtcgttcgtttttatggcttagtaatactccactgtgtggacggaccacatgttgtgtatccatcattagttgacggccgtgtgggctgttgtaaataatagtgcttacgtcagcatgcacacgcagtcttaggtggacacatctgtgctgcacacatggacgcctggttctgtcaggacgtggcagcagttgtgcctcatggtgttgaaagtgttaccatgtcaagctcacaagttctgtggttgaaataaatgcagcgtggcatccagggtgcccaggggcatgtctgccctctcagtgtccaggactctagtttcgtgaccttccgtccagacctttccttgttgtccattatcagaggaggggccgtggttgctgtgtgtggccatgacaccctcccctggcgtccctgtgcccacagagagagcgctgtacagcatggaatgtgcgttccaccccctgttcagtctcaccagtggggcctgccggctggattaccgcagacccgagaacaggtgagtgcagctgccctggaggtgacgcagctccccttcccttctcctgcgagtgaggctgggggaggtgcagtgggcacctcatggctgccctccagggtggaccagggcccacaggtccagagtgacccaccttcctctctctgggcttaaggatagagggatgggattgtctcagcccaggtttacctttgtctgtggacatgcctgatgctactgtggaggtcagagtgggaggtctgctgagcccaggagttcaagtccagcctgggcaccatagtgagacccccatctcttaaaaaaataaaaataaaaataaatgtttgtgttagaagtgagcctggctgggcacagtggttcacgcctgtaatcccagcactttgggaggccgaggtgggagggttgcttgagcccaggtgtcaagaccagtctgagcaccgtggcaacatgcagtctcaaaacagcattttttttttttttttttttttgagacggagtctca

SEQ ID NO: 10375 - DNA, 1169 bp, Homo sapiens
ccagagagcagaatgggggtggagcgggtgctgaccggggcgctaagcagtgtgtggggtggagcgggtgctgactggggcgctgagcagtgtgtggggtggagcgggtgttgactggggcgctgagcagtgtgtggggtggagcgggtgttgactggggcgctgagcagtgtgtggggtggaatgggtggtactggccaggacgctgagcagagggcggggtggagtgggtgctggccggggcgctgagcagagagcattctcctttgtgtcgttgtaattcatgtggaactattttggatctaggagcttctacctggccctctacaagcagatgagcttcctggagaagcgaggctgcccgcgcacggcgctggagtactgcaagctcatcctgaggtgagtgtctgctcagggccaagcccgtccacgctccctgtcctggctgcaggcccactctcagcctgacgatgcccctgttcccctttgctctgctctctgtgctgcctccggaagtctcgagccggatgaggaccccctctgcatgctgctgctcatcgaccacctggccttgcgggcccggaactacgagtacctgatccgcctcttccaggagtgggaggtgggtgcgagcctggtgaggccccgtggagggacggacacctgcttctccttctgttttcttggttcagtatctgtgcgctcaggggacgtttggggatgaaacgataatcgtctgagggcagaaccacgtcctcctgccttgtttgtctcccttgccgcctctacggagtggaatgtggttttcctagggacagtacagcagccttatgtcagaatcctcatacgtgtgtacacatgctcaaacgtgtgtacacatgcacacgtgtgcctgcaaggactgtgatgctggtaatgatgaaaaaccgacaactcccgagctcctcatgggcagttcaggaagatgcagccgggaggtagaaggagggttggttgcgtggggctgacacagggacccccagcacgtctgtcctgttccatgggaagagtgtgagtacagcaggagagacttgagctctgtccccagtaactctaacacagacacgtgttggaatgataatttcggtgtattgggttagatataacgtattaatctcacctgttttgtc

SEQ ID NO: 10376 - DNA, 1118 bp, Homo sapiens
ctttgcttggggcccaggaaggaggaacccatttctgagaggtgtgtctcacatagcaggtggatagcaagctagagcggggctgagtgagtatctggggctgaggcccagagaggatcccataggtagctctagggctggagctctgcaacattgggcaagaggaccctgtgctgggaggcagggagcttgggcccctcagatgggccacgtgccctcgtgggaccctcattgtcaccgtgagctctttccaaggggacgccaccagtgggggcctgggcaggaggcagctgaggtgtttcaggaaaaggctgaagatcaaggctgtggtgtgaggactacccactttagggaagtgaaagaggccagcctcaccccagacaccccagtgtggttggggaaagggggtggtccgtggtgagcctggtacctggggactcatcctggccctgcctggccctcaggtgggatgctatggaatatgatgagaagctggcccgtttccggcaggcccacctcaaccccttcaacaagcagtctgggccgagacagcatgagcagggccctggggaggaggtcccggacgtcactcctgaaggtgggtgctggtgggagtcagggtgggagctgggcaggtctctgactgcttacgtggacccctcctttcttcctgccgcgtcctgcgcagccctggctttcccacggagccggcacctgctggctgtgttctttttcccatctcttctgtggtcgtgtggtttgtttctgtgtccccactagaattcacattcctgagggcaagatttgtgcctgacccatcactgctgcatcctagggcccagcacatagtaggtgctcagggaacacttgctgagtgcggtcagcgctgagacctggtaagggagaggttagccgagggaacgtgctctgggcgtcagggtggcatgagctttagaaactgcagatgaggtcatcagggagtgcttggagcggggcagctgcagagacggcctggagtcgacactggggttcgtggattttgctgtgtagccatgcagtggtttttctctcgcccccgtggtcacgcatgaggtgtccaccttagaaatgggatgtct

SEQ ID NO: 10377 - DNA, 2143 bp, Homo sapiens
ccgaggaacagtgctgggcaccccgcctggcccgccaggacccaccctgccaacatcaagttgttccttctgctccggagacccctggggtgcggccctggccccctccacccctgctgggccagagcgggtgggcagtgtcaaggcccgctgtctcccaggtgcttgctgggactcggggcggctgcacctggctgtcacctgggtgtgctgctgtgaggggtccttgcgtggcccccatccttcccccaatgcagaactccatgggcagggagctggggggacatctcacctcccccatggcacagagccctccacacccctggaccagggcatccgggccctagaaattccacagctcccgtcctggccaccctggaagctcatcaggccaagacccggacagagcttcagaggagtgttgagtgacacctgaggatgcggctgcacacactcagccaagggccgagtctcacctgcggtggggtgtcggctctgcctgggggctccatccctttcagccactcgtggccttggggatttctggttgtccccagctgggactgttcacagttgtcacctgcagacctgcctctccctggcctgaggttcaaaggcctcatcggatggtcagtacagtggggtcacctgttgtttctatacaacagcagggaaggggccatggagcttttccctgctgggtgctcctgctttggcccagcccacctttcctggtgctccaagctaggaggctgtggccccagcctgaggagggtgtcctggcctccaggtgtgcagcaggggctgtgtgctgggggaggttccagttaggcgatgggatcctgcagtggtctggtggcatttcttggaaccagatttacctgaggagctctgtcctgctccctgtggagggctccagatagctcagaaatgaccagccaatggccttttgtttgggggcctgaggtcaagagagctgagagtattcgctcgactgagcacattcaggaagatcagggcaggcgtgtgggaggtccctcactccacgggacagaggcccctgggcagcagaggaaacctacagctctgggtgaggggacacttggctttggtgtttgcactttacagatcctgcggtccacgaggggcctcaggagaggacgtgtcaggacgtggcttcccagccttctgccttgggcagtgggggtgctcctgtctgtccttttcccccacaccctggactgtgcttggctgttggtgcacatggttggcacacggtgggcagagggcagagaatgccactgcttggttattggtcccctttgaccaggaaacccaagaggagacacctcagtcagcagaaaggccacctggctcactggctcattccaggagtgggagagacggcagggtctcctctttgtcctccggcatcaggaaggggatggtgtccactccccactgtggtggctttaggcaaggttcttattgtctgctctgcctcggtttccccatctggaaaatgggggcaggggtcctgacctacctcaggtggaacggtgagcagggaacatgtcggagtccttcagagaatgtgatgtgaggttggatcaacagtgtgggttcctgtcctgtttccccttcctctttggggctgaggaggaggttaaaggccaaatgctgtttcccaacaccccaaagtctgcacacgtctcatgaatgcatcacatttctgtcatatggatattagccattccgaaatctgtgtaatcaacttcacattattcaagttacaaatcactgtgtccatagaaaaactgtgctggtatttgctggacaaagggttgggccccttttatttttacctgccacccagcatctcccccacctgccccttctgggtgacacagccggtaaacggaatcacgtatggttctttctgtgggtctgtggcacagcaggaagagcccggtgccgccagcaccttgtggaagaccacacatgggtggtcccacagcatgggaccaggctggcctgagggatgcccagttgtaacaatgctgctgtcactgtctcattaaatatacatcctttagcctggtgtgtgtgtggtgaattgcggacaaagtaagagaaattggtc

SEQ ID NO: 10378 - DNA, 1099 bp, Homo sapiens
agatcactatgggggctcaggacgacctgaggaaggtcacccagagtgcctacgcccaggtaagggtgggcatcccccggcacgggccgcaggaggctctgttgggcgcaggctcatcctgggttccgcactggcaggttgtgcagtttggggtgagtgagaagctgggccaggtgtccttcgacttttcccgacacggcaagaccctggtggagaagctgtacggcgaggcaagcgcccagctccttgatgacgaggtccggcacctcgtcagtgccacctacaggtgcaccctggacctgctgacacggtgccgggagcatgtggagaaggtgagtgtggcctctgcccagacaggtcgtgggtcccatgttgagtcacggtcatgccacacccgaaggccacacccgtccttcagcttgcttaggtttgggctgtgatcatgtcctcagagccgtctgacaggtgggccgttgtttccaggtgggccagcggctcctggagaaggaagtactggagaaggcagacatggtggagctgctgggcccccggcccttctcggagaagtctacctatgaggagtttgtagagggcgtgggcagcctggaggaggacacatcccttcccgaggggctgaagggttggaaccgcggacaggaggaggaagatgtggagagcagcctgtgcagggggctctgtgtagcctgtggcggtcgcctgcacctgctgctgggtggagttggggtgactgccacttacctggggccttggcaaagcagctgcggaatctcacccaaaacaaattaaaacgtgacaactgtgaatgggtgttttagatgagggtgctctgagcccacatgcagggagtaggagtgggagtgggcagagggggtaccctgagtccctgggccctcccgctggaggacagtcgggtccaggcttagacgggagaggccccagggctctggcccctgtggtgctgaggaaggcacgactgtagcttcgagaggggcttgcgtgggacaccttggagacaccaggccttcctggggcctccgtggaggagcgttgatatggtcataaagacactcggaggagc

SEQ ID NO: 10379 - DNA, 1189 bp, Homo sapiens
gacaatgcccctctcatatccttaactgaaattcctaaataacgtaacctatctctacctattgttaaaagcagtcaggatattgccctcaccgtagtgcagagggggaagtaatgaagtgtgttctggtttgtaaaagctcagatggaaccgcagtgagggccgtgatgtggctggagtggataggtgtcatagtcactgcctgcgacaggtggataggtgtcatcgtcactgcatgctggcagtgacaggattttctacagtagacaacggcccttggtggaatcttgaacaaagtatagtccttcagtctgcatggaagctgcattcccagaaaactcagaataagttgaagctgcagaaatactgtttatacatagaagacgtctaggtgccagcatgcctgaggctggcagcagctggtgatgggcaggagagcacccagctctcaccatgcaggccacagcccctttggttctgcctgctgagcccctgccgggcctgtgcttgtgcctgcaggagcagatggaggacatgcggaagaaggaggaccacctggagagggagatggcagaggtgtctgggcagaacaagcgcctggcagaccctctccagaaggctcgggaggagatgagcgagatgcagaaacagctcgcaaactacgagagggacaagcagatcctgcttgtgagtttcccgctggattcctctccctccttggcatgagcttgcctaggctcaggagggaggagcatcacagggaggggcttggcccttagggcaggaagggagacggggaggcctgcatttctcctttctctgcctcgtgttctcctggggaaagtaaagtctgggggtgttttggagacaaggccctcatcttcaccacgtgctaccggccggccttggtgagactcagctgcttgtgtcctggaaccaggtctttctggcgattatttttggccttgccatctcccaggagcccgtgttacttggatgactgtgaatcttgaatactttctgtcccctactccctgtttttcctccagtgcacaaaagcccgtttgaaagtcagggagaaagagctgaaagacctgcagtgggagcatgaagtgttagagcagcgattcaccaaggtgagtggcaccacgctggccctgcagttggcggtgggtgttagagcaacggt

SEQ ID NO: 10380 - DNA, 1118 bp, Homo sapiens
tcggtccacgggacagccactggccaggctagctgccgcctcactccgcagccttctgtggctaaatggcaggacggacacacaggaatgggctttggaccacaagctctggcatatcgggaggcaaagcactcaagtactctgcagtctagatgacacatttcatggtttggaggacagaagtaggtttccacatcacatgaaaaggacagtgtcacagtggggttacccagtaaacagctaccaaagccatcatttcacgcttccctgtagttttatgagctcgccctctgcatgtggatatggggaaagccgggcatgaaggggtgtgtgaaaaagaacagcctctgtgactgactgcagtaagctcacaagtttgtcactgtcagacttagcaagtcagcctgcaaaggttgtgctgatctcttggccacactacctactcaggttcccatccatgcctcctgcctgcccccacccccagccccaccagtgagacttctgattggaagtctatagacataagaattcaactctgacccatggatgagaggatgaggcaaagaaccaatgggttatctagtaaacgatcaataactacctacccacaatgattgtcccaggccaatgtcacaagacgacattacttccaagaaccaagtcatcccttgcttctgcgggcccagtgccacgggtactgtcctgagtggtttggaaggtgggtagccgctgatacagggacaggcagatgtgcagacacttaccaccctggtccaccgatcccaccccatgcttccacctcccagagctcttgagataagaccttaagaaggatccttgggcttgcattaaaaccactttgctgtccgtggaggtctgacaggacccaatagttgttactacaaaagtgcttttgcaaatagggcaagttagaagaaggaggtaatatgaatattctttagaaaaactcaaatccatcggcttatcaatacccaaagtctgaggctacccagggcacaatttggtccatggaatgctgagtggaggaggcagctggtgtgaggctgcgcctgactcccaggagcatttagccatcctttttggcttggggagtgtca

SEQ ID NO: 10381 - DNA, 1211 bp, Homo sapiens
tcatggtgtcatgcctcaaagaaaccgtctggatgaagttctctacacccaaggaagaaaagcaatttttagagctcctgaactgcctgatgagtcccgtgaaaccccaagggattccagtggctgctcttcttgagccagacgaggtgctgaaggaatttgtcctgcctttcttgaggttagatgttgaagaggtagacctcagtctgaggatcttcatccagactctagaggcaaacgcgtgccgagaggaatactggctccagacctgctccccgtttccactcctcttcagcttgtgccagctcttggaccgcttcagcaaatactggcagcttcccaaggagaagcggtgcctctctttggataggaaggatctagcgatccatatcctggagctcctgtgtgagattgtatcagccaatgctgagaccttctccccggatgtctggatcaagtccctgtcctggctccaccgcaagttagaacagctagactggactgtgggcctgaggctgaagagcttcttcgaggggcacttcaagtgtgaagtgccagccacactttttgagatctgtaagctttcagaagacgagtggacctcccaggcccacccagggtacggggctggcacggggctcctggcctggatggagtgctgctgcgtctccagcggcatctcggagaggatgctgtctctcttggtggtggacgtgggcaatcctgaggaggtcagactgttcagcaaaggctttctggtggccctggtgcaagtcatgccttggtgcagccctcaggagtggcagcgccttcaccagctgaccaggagactgctggagaagcagctcctccatgtcccttatagcctggaatatattcagtttgttcccctgctcaacctgaagccctttgcccaggagttgcaactctccgtcctcttcctgaggactttccagtttctctgcagccatagctgtcgtgattggcttcctctggaaggctggaaccacgtggtcaaactcctctgtggcagtctgacccgcctcctggactcagtcagggcgatacaggcagctggcccttgggttcaaggaccagagcaggacctgacccaggaagccctgtttgtttacacccaggtgttctgccatgctctgcacatcatggccatgctccacccggaggtctgtgagccactctacgttttagcc

SEQ ID NO: 10382 - DNA, 1718 bp, Homo sapiens
acattgagttgtactgcgcatcagtttttttcattctgttgaccaataaatactttcaggaccataatcccttcttggcttaggcatctcaggtgtcaaggatgatagaagtcctttgcctgcgtttaataccaattgtagcaagtagaagagtctttatgcttggaatgacacctttgtttgtggctgccatagcctaatgtagtcaatacgaaataattgactttttttcttttttaacaggtgaagagcagaataaagaagcgctgcaggacgtggaagacgaaaatcagtgagacataagccaacaagagaaaccatctctgaccaccccctcctccccatcccaccctttggaaactccccattgtcactgagaaccaccaaatctgacttttacatttggtctcagaatttaggttcctgccctgttggttttttttttttttttttaaacagttttcaaaagttcttaaaggcaagagtgaatttctgtggattttactggtcccagcttttaggttctttaagacactaacaggactacatagaggctttttcagcattactgtgtcgtctccgtgccagatgtggcaagatcaccattagcaaatggaaattacatttgaaagccattagacttataggtgatgcaagcatctaagagagaggttaatcacactatagaggcataagtggtatcagttttcatttttctaattgtttaaactgtgttttataccagtgtttgcaagtaattgggtgttagcttgagatggttaaaggtggtttggggagggacttcgttgtaatggttttgctgtaaaaaatgtttccaactccgctgaaatgttgctgaaaagcatggtgctggtaacagttcaacaatccgtggctgctcattcttgcctactttactctcccactgaagcaggttagcgttgaaggtggtatggaaaagcctgcatgcctgttcaattcttttgtttcttctccttccccctccccctacctccttcccctcactcctcccctccttcgctcgctcaacctcttttgttcagtatgtgtaacttgaagctaatttgtactactggatatctgactggagccacagatacagaatctgtattgttcttactgaaacacagcatggaattaacattaaacttaaataaaacaaacctaaattaaaaatgccaaatatcgcgcctccatcctttatacttctaaaataaaatctctagtccaaacacactgacagtattatgtttgcctgaatgtgaaacattcctccttttttcttccataaataatttgtttgcttcccaaagatgtatgttttggaaaaaaattgcctgtagtctggttgtgaagaacactgagtcagttgatggtgtgtcttgtcctccagaccaggcagcaacatggtatttattttaatcattaaagtacaacatgagtagtacaaggtgtaattatggatcattttctagcatagtatttcatacaaccaaataaggctgaatgtcttataataattcttagaggtaaaaactgtgtgccctcttcctccagaggctagtggcagtagtggagaattactcaatcctttcttagtaatccatacacacattatagacagcaggatagcagtctccctttccagaaacactgtataagaagcttctttccataaacagtttatacatcaatgt

SEQ ID NO: 10383 - DNA, 1906 bp, Homo sapiens
actaaaggaattgcctggtgaatgttgttaaggatgtgagtgctgaaggcaaactgcctgggtttaaattttgattctgtcccttgcagcctgcctgggttcaaatcctagctctgcttattaaattcttatttaattgttgatcttagagcaatgtctttacgttgctaccttgtgaaagaaggtaattcatgtaattgaccagcatttaccaagaagcatcagtgttcagttttagtcattggtaattctgtagctgtactgtggtactgtgaagggggtgtgggggctggcgtgtgtgcgtgcctgcatgtgtgtgtgtaacaataggcagcatgcagaagggaaaagatactttttataacctagaggcagcttttctctgcttttgtgtcaagaaggaagaagggagtttggagagggatacaaattctttttaatactaagctctctacctcaaaaccagagatagaatatgtaataatttgtagaatttctagacttaatctgatttaaaaaaaatttttttttttttaggttgagactgagctaaagttaatctgttgtgacattctggatgtactggacaaacacctcattccagcagctaacactggcgagtccaaggttttctattataaaatgtaggttctatactagaagggaaaatgtaagattgaaagttggtccttttagaaccataactttgttctatgtaggttttcaacttttatttaagaataattgttcaatgttagaaggatagttaatattgtaatgaaaaggtggttgggctattatgaaaatgtattagcttttgcttatttatattcttttgtttttgtgagacctatcccattcccctcccccaaacggcatacatttcacagtgcttagtgttatatatagacattttattttatgattaataaactgtcatgccattccttggaaccacttgcttgtttaattctggtctatcaggtgataattttattaatttttagaggctcctcagttaatttcctgggatttttgcttatatttagtaatatgaaatgtctaaggaaaaaaatgaaacgaagccagttattcctgagagtgtttaaaattattgaagtacacctaattgttacatatatttttgtcacattttatataatatagaacaattttagcttattttcctttaaaaatcgttcctagtttaaattttttttttttttttaattttggttttgttttaggaaaggggactaccacaggtatctggcagaatttgccacaggaaacgacaggaaggaggctgcggagaacagcctagtggcttataaagctgctagtgatattgcaatgacagaacttccaccaacgcatcctattcgcttaggtcttgctctcaatttttccgtattctactacgaaattcttaattcccctgaccgtgcctgcaggtaagttgtggggaagaacagcagcgctcagcgtgaaagttaaggggggcgctgtttgggttttccgtgttgtttcttgggcctgtctttgtagacttggctgcatagtaattcttttggctcttactgaaactactttggatagtattaaaacagacctgtctcaacccactagcatagcagtcagcataattattttgatgtgggatatttttgttgctggtagattgaaatctaacatgttaaaatgagtagaggaaggaaatgagaggaattagaattattttaatttttgttatattagttttcagtctttttttaaatttgagaccatgtctcactctgtctcccaggctagagtgcagtggcgccatctcagatcactgcagccttcacctcctgggttcaagtgattctcctgtctcagcctcctgagtaactggagttacagg

SEQ ID NO: 10384 - DNA, 1107 bp, Homo sapiens
ccatatactccgtatatttttgctgtatgaacaaattccccttccttttgtatttttggaaatactatttatttgtgagacaatacattttagaacctgtaaattcttaatctttctcttaaactgacagctcatttttttttgctggaaaatagttaggtgtgcctaattaccttatttaatgagaggtgctttcagaccacactaaattatattagatagtatatgaagtctttctcactccacctaactaccttctggagtctttgtattggctcttagtttggtttcctttacatgtttttggctttttactcatattagttttgatgattatgaaattatttttgttaaaatgtttttttcgcagtagcttgacagaaaaaaactactttgaaaggaatatgttaagaaaacttcaaatttgtaaggtctgacttttccttttcccatacagaaatggtggagtcaatgaagaaagtagcagggatggatgtggagctgacagttgaagaaagaaacctcctatctgttgcatataagaatgtgattggagctagaagagcctcctggagaataatcagcagcattgaacagaaagaagaaaacaagggaggagaagacaagctaaaaatgattcgggaatatcggcaaatggtgagattgttgtgccatcatccccccttatccacagtttgagttacctgtaggacggtacacttaagattttgagagaaaaggagactacattcatataacttgtattacagtatgttataatgtttctgatattgatctttgtgcctggtttataagttaaacttacccgtggctatgcatgaggacaaaacatagtctgtatcaggtttggtattttccatggtttcatcacatccactggcaggtctcaatggatccctcttggataagggggaactattgtattttcaagcaaaatgatgactgttttttaaaaaaatatggtgggttggccaggcgcggtggctcaggcctgtaatcccagcactttgggaggctgaggtgggcggatcacgaggtcaggagatcgagaccatcctggctaacatggtgaaaccccgtctctac

SEQ ID NO: 10385 - DNA, 1433 bp, Homo sapiens
tcacttcccattcacacatgtccgtctgctggatcaacagaatcccgatgaggacttcagctgagtatagttcaacagttttgctgacagatgggaacaatcttttttttttttttccaactgccatctatacaattttcttacagatgtcaaaagcagtctagtttatataagcattctgttacctgtgatattttttagactgaactgctccattcctagtcttaattaccatattcagggtacgaactggagggcttgtgtgttagcttctgaattggcaattggaggcggtagtggtcgtgcctgtgtgtatcagaagggataggtatcttgcctcctttctctcaggcagtgcaaatcaccctgtggaaaaccgatggacaggaaggagtgttacacactgcttaccctgatttattcagtggttttgttttcattctggaaccatactatcaaatggcgacagactgttccgttccacccccgtgaagtaatcatgcaccgtgtgaatagtatcaagcaggattgctttcattgtatggagcatgaccagcgtgtgactcattctgacatttcagatcctaagaattctaagaacactactagaagcatttgttccctcctagtcaatgcttcatactttttcttgggattcttttagcccttgacattcttgtcccccaaacctgtaagtaggtgaattcctaagataagtgtgtattttcattccaggtgaaaagcaggatgtaccgagcactttattcagtgcatagctttaagccagtgttggattcactaagtggacagccagtctcccagctctctgccttccccaaaagggtcgtagtaggtcacccttctacagcagctaactagagtcctaactaatgggatccagcagggccatttctccagagggccagtatcctattaggagactcttggaattcttaggttctactcaagagtggaaggaccaatcacctctgatattctgtggaaggttttggggtcaaattctgccctctgcattctgtgcaacttgtataaaagtcaagttagtattacatgaatttggggtagggttagtgctttgaaaaaatgttgaaccggctgggcgcggtggctcacgtctgtaatcccagcactttgggaggccgaggcgggtggatcatgaggtcaggagttcgagaccagcctggccaacatagtgaaaccccatctctgctaaagatataaaaaattagcccggcgtggtggtgcacgcctgtaatcccagctactcgggaggctgaggcaggagaattgcttcaacctgggaggtggaggctgcagtgagccgagatcgcaccactgcgttccagcctgagcgacagggcaagactcagtctcaaaaaaaaaaaaaaggaaaaaaaaaagaaaaaaaaatg

SEQ ID NO: 10386 - DNA, 1834 bp, Homo sapiens
tgagcccaggagtccaagaccagcctggacaatatagcgagaccccattctccataaaaaggaaaaaacaaggacgaaaagaaaagtctgagtaccggggcccccgtctgctcccctcaccacttggccgtctctctccgcccccacaggtcgccccacggctgaattctcggtgataaaggcgcccactggaccctcccaacgcccaatgctttgcttttctcctcctccccttcccagttaccaaagactcgaacttccagacagggacccagggacaccccgaagcccacctgcaatctcccacctcctgcccatccctctcttgagggagcagcaggggccaggagctaccccaggagtgggccaggccgggccacagcaataggaaagccagggccagagcgagccatgccagccctactgccgatgccaaatatttgagagaagggaacttttgctgaggttttctctgaggtttttttgatgctttataggaaactattttttaaaaaaagccatttcccacccaaggacacagtggatgtgttttccctgactccagcagggcaaggaatgtagccgagaggttgtgtgggctgggctctggtgccctcttccctggccaggacacctctcctcctgattcccttggcaccttgtctttctgtctgtttacctgtctccctgcctgcccatctgcatcttttgcagcccactctgacttccatctgggggctgagaccacccttgcctgcccccttctttctgccttaagaatgtccttttaggctgggcatggtggctcacgcctgtaaccccagcactttgggaggcggagacgggcagataacctgaggtcaggatttcgagaccaacctgacctacatggagaaactccgcctctagtaaaaatacaaaattagccgggcatggtggtgcacgcctctaatcccagctactcgggaggctgaggcaggagaatcacttgaacccgggaagtggaggttgcagtgagccaagagtacaccactgcactccagcctgggcaacagagcgagactccgtcttaaaaaaaaaaaaaaagaacgcccttttactgtcctcatcatcccagtttgaggcagtgctggagtggggaaggccgtcttagaccatagaggttggaagacgctgagagatcatccagcccagccccttgatgttacagagcagaagacagatgcccaaacaggagaaggcacttgcccacggtcatacggcaggttgccacaaaaccaagatggcagcccttcctcagcgtgcctcactgccactcccagagccagggagccccataaaacccacatcatgtcttaagagtatatctggctccttgaccagcaatcggccctgggagccaccaggtgggaaaagcgcctctgccagagtccaggccttgggatgacagacagcttgcccgcacactcgggccccactcaaggatgtagggccttttctggcccctgacccctccctggcatgggagcgtggggacggggctggccttgggaggagcggcaggggcatcacctccttctgctgcttctccctgctcctaccctcaagggcctgggggctgcccagctgcctctatgcccttctgggggtctcagcccactgctgacacttctgcaatccagagaaacactaaataaagcaatacgtgtttgccaatgtggtctccttatgaatattaggaaacgaagagggccccggaaggcaaccaagggcctcgtgttgcaggtttttctcgagacagtctcgttcttgtcacccaggctggagtgtagtg

SEQ ID NO: 10387 - DNA, 2166 bp, Homo sapiens
catgttgtcacttttccccaagccccctccttccgttaactctcggtgctggtttcccagtgccctgtacaccacccgagtcatgggattccagcagctcaaagcagtcttaatcactgaatgaaaaacctggctctgctcccaattagcctcagagagaaaattatttttacaaataaaagctggcctctaaccctacgggcaaggagggccagggtctcaccaggagtgacggcaggccctgcttactctccctgccccatgttcccaaagcagcctcggggaggctggagggtggaatgaggcggactgctgtgatgccagcttctcagtcactgctctgggcctcagtgctctcccccactcccttccccacccacccactggcttccctcctcctcttgaaattatccattcaggacgatttacagtgtttctgttttctcctcttgcttccttaatactttcatttttcttctagttttgcaagacagtggtcaacaggaagacccagcagctccaccctcccaagtgacaggccattttcggacgcagccgttctgtgcccattcttcaggcaactttcgattccttactgtagctaattctagatgcccttcagtattgtgaacaaatagaccgtctggtgtcacagagcccgcgtgtgcaggagcctgctcctccgagatacgtggcgtgtaggttgctgtagttacagcgcctccgtctctctccattgtgttccgatccatttctgtgtgttcccccaacctttatttccaagtgacattttcagtctttcaaatagctgccttttgtgatgtggtgatttaaatgatttaagttcatttgttctcaaccttggggtaaactgaggtattttgcttcctgggaagatcttcgcaattttgagtgctcctgtggggagcggggatgagctaaagatacaatgtttccctgccccgcaccgcttccacaaaatagcaatgtggttttgcagctctgacttctgctcccagtaacccatcgttagggcactctagcactatggaggtacccaaggctcagccagtctctatttaagaaaatttaacaaatacgagtaaccctgtcccaatcactgaatctctagttactactcttagaaacacctgtggcttcttggccctcctgttgcccgctctgaatctctctgcagtctacaaaatcgccccagtcaactctccacttggagggaattgtccagtgtggcccctagaattgagtcaccccctagataccaactgtctgaccccgaggagctctgtaagtccctgctcctcctcttccctttggggctggtgctgccactcagcaataatcctcttttctctgtgctttcttaggtccctgtcctctgtctttgaggctggttaggaagcaagagtcctgatctttcatgctgcacaatatgagcatgcaaaaagctttttccagcagaacatgttccctcgtctccagttgccggaaaggaatttggggatcaagaacttagctcgtcctacccccatgttgagttctgccctggaaaacccaaagcaagtagtgatcatagtacagaacccgaccaaagtaggctggtgaggaagtccaggctccaggggaacagacgctgcccagtgttcatagcttcctgcaacttgacagagcctgagtttgcctcttagtgggagaatgagagagagctgtagtgtcacctgacattccccaaaccttgtgaagcacgttggcctaagtgtgccgtgatcccagcccacactagcctgggtgcatctgctaatgggagaccaaatctttgtccgggaagcaagaagtgggtgggagaatgtatcctgtttttgtcagtttgtttgccttactcatttctaagtgcaataagggagtgtctcacaggattgcacctgtgacatcctgatggatgcttccctgtggccctcctggggcaagggtggacagactcagacccccagcatggttagcgctgaccttcattgaggtccctttggaaccagatgtcttgttacagacaccttcctctgtgtaagtctcctcaccttgaggggtctttagtaatgcatctgggtagcatctcaactgctggtagcatttatctgacttggaaagttg

SEQ ID NO: 10388 - DNA, 2205 bp, Homo sapiens
actgcactccagccttgctgacagagtgagactccatctcaaacccactatttagtggctgtcaggttggcaaatttgaaaagattgttaatatcctgtgtgggtgagtttatagtaaacagatcctctttctttcttggtgataatgtaaaacttaaaatagcaccaagtgctggttttccagatgttttcagcttgtgaaaatacactgagctgcatgtgtgctcatttgcttgtgaatactatgcttaataatcagctggggagcttgtgagcagtgcagattcctggaccccactcaggagattctgatgtggtaagtccgcgatgaggtccatgtctaacattttgaacaagcaccccagctgattctgatacagggggttctgatcacgttttaagaaactctgtcctcgttcttgggggaaggaaggaaacagagggctggcagctccaactctgacctggtactaagaagagttttggttcctgacccctttgtctccagattgcaggatacctatatggggtgagcccaccagataacccccaggtgaaggagatccgctgcattgtgatggtgccgcagtggggcactcaccagaccgtgcacctgcctggccagctgccccagcatgagtacctcaaggtaatggggagtgatggagcctgggagtgtggaaaagctggtgcgattcctgtctgtggatgggattcagctctgtactcctctttacctataggagatggaacccttaggttggatccacactcagcccaatgagtccccgcagttatcaccccaggatgtcaccacccatgccaagatcatggctgacaacccatcttgggatggcgagaagaccattatcatcacatgcaggtgggcctgggctccttgggaggaagtatggtggggcagggattgcaggccagggcccagaacagtggcctgagctgttactctgtcctcgttcctcccccagcttcacgccaggctcctgtacactgacggcctacaagctgacccccagtggctacgaatggggccgccagaacacagacaagggcaacaaccccaagggctacctgccttcacactatgagagggtgcagatgctgctgtcggaccgtttccttggcttcttcatggtccctgcccagtcctcgtggaactacaacttcatgggtaagtgggaggagcctggggatgtggggatagcagtagggataaggtgaggccatcgccctttgcacttggggcctggctggcttggaggtggcgcaggctgcatgaggcaggagccctgttaacattggctgtttccttctccccgaaggtgttcggcatgaccccaacatgaaatatgagctacagctggcgaaccccaaagagttctaccacgaggtgcacaggccctctcacttcctcaactttgctctcctgcaggagggggaggtttactctgcggatcgggaggacctgtatgcctgaccgtttccctgcctcctgcttcagcctcccgaggccgaagcctcagcccctccagacaggccgctgacattcagcagtttggcctctttccctctgtctgtgcttgtgttgttgacctcctgatggcttgtcatcctgaataaaatataataataaattttgtataaataggagttcaggggctggtttgttttttttttcccccccaaactcaaattctggatttaggtctaacaggaggctggactggagcggttcacagcaagatgctgggctcggctgtgaaggggggagtatgaggcccccttcctattcagggctttggggtagatagcccctggactcagtggagacctgaggcagggctgggctttcacactccgctgccttgaccacatttgctgctttttccacaaaactacttggaagctctcgcctcctttccacagttttgggagcagttgccctttcccgggtctaggaactctgtggcttgtgctgagcggctgcggtgtccagcccagccctttaagctttctgtgtcagtcctggtcaggaaaacaagcacacaggcaggcagtttgtgtacagccgggcggaggccagagaccggctgcctacctgtcacctctcgcctggagcgggccactgccaagttggccccatgactccaaacgggcggagcctggattgggcctgtggggagggct

SEQ ID NO: 10389 - DNA, 2205 bp, Homo sapiens; identical to SEQ ID NO: 10388

SEQ ID NO: 10390 - DNA, 1187 bp, Homo sapiens
gtagtcccagctactcgggaggctgaggcaccagaatcactggaacccaggaggcagaggttgcagtgagccgagatggcaccattgcactccagcctgggcgacagagtaagactgtctaaaaaaaaaaaaaaaaaggccgggcgcagtggctcacgcctgtaatcccagcactttgggaggccgaggcggcggatcacgaggtcaggagattgagaccatcctggctaacacagtgaaaccccatctctactaaaaatacaaaaaattagccgggcgtggtggcaggtgcctgtcatcccagctattcgggaggctgaggcaggagaatggtatgaacctgggaggcggagcttgcagtgagccgagatcatgccactgcactccagcctgggcgacagagcaagactctgtctcaaaagaaaaaaaaaaaattcttgggtttcatgaaaggttaggattaaagtgggagagcctcaagcagctgacctaccccactcttccaaatcttttcccaggccttctcccgtctcatcctgattctgcgtgccctacatgtgaacaacgatcgggcaaaagtgatcctgaagccagacaagactactattacagaaccacaccacatctggcccactctgactgacgaagaatggatcaaggtcgaggtgcagctcaaggatctgatcttggctgactacggcaagaaaaacaagtgagcagtgctggtggggacacagacaggaggtctatatacggttttctggggttttttggaagcacttaggcttagaagtttctcaagaaggccaggcgcggtggctcatgcctgtaatcccagcactttgggaggccaaggtgggtagatcatttgaggtcaggagtttgaaaccatcctggccaacgtggtgaaactccgtctctactaaaaatacaaaagttagccgggtgcgatggcgcctacctgtaatcccagctactcgggaggctgaggcaggagaattgcttgaacctgggggcagaggttgcagtgagccgagatcatgccactgcactccagcctgggcgacaagagtgagactgtctccaaaaaaaaaaaaaaaaaagacgtttctcaagaaattatcttgtcttagccaggcttgagtgctcatgctagtaataccagcactttgggaggccaaggtggg

SEQ ID NO: 10391 - DNA, 1099 bp, Homo sapiens
gggctgtatctgtccagccagtttctcttcctttacatttatagcatgtttcatcttacattcagtccaggatcttagtagcccaaacccctgatgctcatctccaaatctgtgttttgcttgtatttttctttctagaatgaactcccctctttgctctgttaatcacagtccctccttaagacacgtttttttgtgcagcttttttctgatcctagtagccttaatttcttttgttcctgaactctgtaaaacagtgtatagtttagcacatactcatgtgtcagcttgtggtattgtcttgttgaaaggggctgtcagcctggtcattggacacggccatttgatactctttgtaccttctaagtgcctaacatttaacatcagtgttcaatagaaacgtagttggattatttcaaaactaggatattctgttctagttgatctgggagggtagagactaaatttccattttcttctctcttgcttttaagttggctaagtggaagacagctgaggaggtggccgccctgatccgatctctgcctgtggaggagcagcccaagcagatcattgtcaccaggaagggcatgctggacccactggaggtaagagggtggggtggggtaggagaaaagagaccttgagaccttcaggctgtttctcatcttggacttgatcttgtcttaggtgcacttactggacttccccaatattgtcatcaaaggatcggagctccaactccctttccaggcgtgtctcaaggtggaaaaattcggggatctcatccttaaagccactgagccccagatggttctcttcaacctctatgacgactggctcaagactatttcatcttacacggtatgaacctcgggaagagaagatcgctggaggaggagcgggtttagggttaggagaagatcctgtgtcaggtttttgccattttcacatttttagcctatagattgggtgggaactctgttgactttcatgagagtttaagaccttaaagttaaaaatcaactcttggggccgggcgtggtggctcacgcccgtaatcccagcactttgggaggctgagttgggtgaatcacct

SEQ ID NO: 10392 - DNA, 1133 bp, Homo sapiens
gagctcacttgtggcagaagatccatgagagcattgttatggacttatgtcaggtgggctggaatcgaggggagagggtactgtagagagtcagctcaggtggaattgaggggagagggtactgtacagagtcagctcaggtggaatcgaggggagagggtactgtacagagtcagctcaggtggaatcgtggggagagggtactgtagagagtcagctcaggtggaatcgcagggagagggtgctgtacagagtcagcttaggtggaatcgcggggagagggtgctgtacagagtcagctcaggtggaatcgcggggagagcgtgctgtacagagtcagctcagcttgctcttttgcatatgggaaatccaccctggaagctctgaggatgagactcctattgcctcattatcttattgtacaaactctgattttaattgggcttccttaacaagtcttaatctctccatgttttccttcaggtgtttgaccaggaacttgatgcactggaaattgagacagtacaaaaggagacaatccatccccgaaagtcatataagatgaactcttcctgtgcagatatcctgctctttgcctcctataagtggaatgtctcccggccctcattgctggctgactccaagtaagtgcctcaggacccagccctaggcagccaggacactttcgttttcctgttcttctagccctgcaactttaggaattgtcctgtctgcctttgtttcaaacttggagccagtgctacgcttggagcctgtcaacacccttagtcagatctgctgattctctggggtcctgctgacctggaacaagttggtggagtgggtgggatggttttgggatttaagtggttctggttctggggacattggttatgcccatggtttcttagaagcttgaaccctcttcatcctcagggatgtgatggacagcaccaccacccagaaatactggattgacatccagttgcgctggggggactatgattcccacgacattgagcgctacgcccgggccaagttcctggactacaccaccgacaacatgagtatctacccttcgcccacaggtgtactcatcgccattgacctggcctataacttgcacaggtgag

SEQ ID NO: 10393 - DNA, 1191 bp, Homo sapiens
actcaaatctttctttagtagtagggataaaactaactgcatcaagtagtctccaccctccccgcccctggctcatctgtaatttacttttttttctactacctttagattgtgaataagtggaatacagctctcattggccttatgacatactttcgggaggctgtggtgaacacccaagagctcttggacttactggtgaagtgtgagaacaaaatccagacacgtatcaagattggactcaactccaagatgccaagtcggttccccccggttgtgttctacacccctaaggagttgggtggactcggcatgctctcaatgggccatgtgctcatcccccaatccgacctcaggtacagcctggttcaacgtatttctaaaccctattgctcaggccctaagggaagtgggtatttctttagttttaggctttattttttctgtaatcttggttgtacacccaaacaggtggtccaaacagacagatgtaggtatcacacactttcgttcaggaatgagccatgaagaagaccagctcattcccaacttgtaccgctacatacagccatgggagagcgagttcattgattctcagcgggtctgggctgagtacgcactcaagaggcaagaggccattgctcagaacaggtgggcacctaggagggcatgccaaccctggggcaggggcagtggtggcctttgaaccgtgtggagttcagggtcagagcatgccatggttgtatggaggtgagaaggctggttctactgaccctaattatttttggccaggaaggagtgctgagctcctcatatgagatcacgttttgacttgaatctttctttttttggaagacgcctgactttagaagacctagaagattcatgggatcgtggcattcctcgaatcaataccctcttccagaaggaccggcacacactggcttatgataagggctggcgtgtcagaactgactttaagcagtatcaggtatgtagagggagcagattttccctgagtcaggaaaatccatggctatccccgaaacttggggcaataggcacccagaagcttgaccgtgcctgccttgccatctaggttttgaagcagaatccgttctggtggacacaccagcggcatgatgggaagctctggaacctgaacaactaccgtacagacatgatccaggc

SEQ ID NO: 10394 - DNA, 1079 bp, Homo sapiens
tggaaggacataagctaagggcccagagagggcatacctgaggctgcgtcctgggtgggagaggcgtggctgtgtcaggatgtcatcagttggcctttgaagggaagttccttccaagaaactgctgtgaccatgtgttctctgtgggcagaggccgggcggtattctgggacatcaagaaccgcttgccacggtcagtgactacagttcagtgggagaacagcttcgtgtctgtgtacagtaaggacaaccccaacctgctgttcaacatgtgtggcttcgagtgccgcatcctgcctaagtgccgcaccagctatgaggagttcacccacaaggacggggtctggaacctgcagaatgaggtacagcctgggcggggctgggagtgacatgaacgcgcctgcacttcctgggtcagtcaccggagtcttgttgggtggaaagacttgagtggtgggcacagttggctcttgcttctgtgggagttcctcggacatgttaaccttgactttgtggtttaggttactaaggagcgcacagctcagtgtttcctgcgtgtggacgatgagtcaatgcagcgcttccacaaccgcgtgcgtcagattctcatggcctctgggtccaccaccttcaccaaggtacagggccgtcatgcccagcttccctcttgtcctctgctgtcctctgctcatttcacacccctttcacttcgtcccctgctggctgcttccttctcttctttgcttagtgtgccagtttccatgctctgtgccatagtggcttatagtatgtcaggtcacttcatcgttattttctgagcgttccttgtagaaattgtgtagcctccttcttgtggacttgtgatgattctaaattaaggcaagagtaaaagttggatttattattttgaacagaaaagcattatttttgcattttctcaggtgcttatctaagtcatgttaaccagtggcatagagaacctgtgaaaaagcagccctcataggcatctcggggttcgtttctccttcacttaccttcagaggcccagccgaaggcaaccggaattgagaaagaaaaat

SEQ ID NO: 10395 - DNA, 3265 bp, Homo sapiens
actcaaagggggtggcaaagacagtaacaaagcagcgagtggagtcacattttgaccttgagctgcgggcagctgtgatgcatgatattctggacatgatgcctgaggggatcaagcagaacaaggcccggacaatcctgcagcacctcagtgaagcctggcgctgctggaaagccaacattccctggaaggtgggtgtctctttatttccttggaggcgtaaacatccgtctttagggtaggattaccacttcgggaatcattagggggctatctggctccaatctcttttcttttcccttttagacagggaaaagaagcaccatgttgcttaggctggcctcaagctcctgagctcaagcgatcctccttagcctcctgagtagccgggactacagatgtgtgccacagtgcctggctggatcctggcttgattgtgctttttggacttttaggtccctgggctgccgacgcccatagagaatatgatccttcgatacgtgaaggccaaggctgactggtggaccaacactgcccactacaaccgagaacggatccgccgaggggccactgtggacaagactgtttgtaaaaagaatctgggccgcctcacccggctctatctgaaggcagaacaggagcggcagcacaactacctgaaggttgggcagagtaggctgggctgggtgtgagtggtgggggagtgggcaagagggaggactgtagagttgtgactgaaccttgttctggcaggatcgggctgtagcgggaggctaatttcatgtccaccttacaggacgggccttacatcacagcggaggaagcagtggcagtatataccaccacagtgcattggttggaaagccgcaggttttcacccatcccattccccccactctcctataagcatgacaccaagttgctcatcttggcattggagcggctcaaggaagcttataggtgagtagtagggtagataggttcctgctgggaaggtgacagcagggaatggcgtcatcctcagagtccaaagaaagaaggtgtagccccagtctttcctggttttacttcctcctagttttcccattcacccttcccattgcttttgtcagtgtgaagtctcggttgaaccagtctcagagggaggagctaggtctgatcgagcaggcctacgataacccccacgaggcgctgtcccgcatcaagcgtcacctcctcacacagagagccttcaaagaggtgagtgaggcctcccaagttttctttttggttctaccaaaggtagcagttgcctttggttctaccaaaggtagcagttggtggattggtgtgaaccagcctccttgtcccacaggtgggcattgagttcatggatctgtatagccacctcgttccagtatatgatgttgagcccctggagaagataactgatgcttacctggaccagtacctgtggtatgaagccgacaagcgccgcctgttcccaccctggattaagcctgcagacacagaaccacctccgctgcttgtttacaagtggtgtcaaggtagaactttcatgagatcgccctgtgaggaacggggcaggaatttagttctacgtcaaaaatctcatctgggtagcatgattggtttactctcttgatgcgtggtagtaaagggaagtagtgttcgtgttaaactgaggaaaagcccatagtcaaagcaatccaaatgaatacgtggaatcatagtgggattggttatggaaggtaatgatagttcctgtggggctagtcttgcaagaggatttctaacctgctggagacctgccttgctactcctcaggcatcaataacctgcaggacgtgtgggagacgagtgaaggcgagtgcaatgtcatgctggaatcccgctttgagaagatgtatgagaagatcgacttgactctgctcaacaggctgctgcgcctcatcgtggaccacaacatagccgactacatgacagccaagaacaacgtcgtcatcaactataaggtgcgtctcaggcgcagtagcatggaattgtgtgtggagtgcttgtctggcccactgactcagaatttgctgaggaggaggctgggtgcggtggctcatgcctgtaatcccagcactttgggaggctgaggcgggcagatcacgaggtcaggagttcgagaccagtctggccaacatggtgaaaccccgtctctacttaaaaaaatacaaaaattagttgggtgtggtggtgggcgcctgtaatcccagctacttgggaggctgaggcaggagaatcacttgaacccgggaagtggaggttgcagtgagctgagattgcgccagtgcactctcagcctgggtgactgagcacaactccgcctcgggagtggaaaaaagtagaatttgctgaggggagaacaaaagaggttaactctggagaatcctggggcatggctcacattcttaagaattgtagttctttctttctaggacatgaaccatacgaattcatatgggatcatcagaggcctgcagtttgcctcattcatcgtgcagtattatggcctggtgatggatttgcttgtattgggattgcaccgggccagtgagatggctgggccccctcagatgccaaatgactttctcagtttccaggacatagccactgaggctgcccaccccatccgtctcttctgcagatacattgatcgcatccatatttttttcaggtgagggctttcctggattcctagccttgcagggtactgaggcatgtgctttgcctctgaaatcagctattgtacctgagttgacttaactgctgttggggctttaaaatggaatgaagcggccgggtgcggtagctcacgcctgtaatcccagcactttgggaggccgaggcaggcggatcacgaggtcaggagatcgagaccatcctggctaacacagtgaaaccccgtctctactaaaaatacaaaaaattagctgggcgtggtggcgggtgcctgtagtcccagctactccggaggctgaggctggagaagggcgtgaacctgggaggcggagcttgcagtgagccgggattgcgccgctgcgctccagcctggggaaagagcgagactgtctcaaaaaataaataaataaaaataaaatggaatgaagcccggggagggtgggggtaggatggggtggggtctccgtctattgagctggaggacttgtgggtgtcccaaatctcagtgtactggggcctcagcagtgtacctggt

SEQ ID NO: 10396 - DNA, 1119 bp, Homo sapiens
ttgccgccagggctacaacatgctcaaccttctcattcaccgcaaaaacctcaactacctgcacctggactacaacttcaacctcaagcctgtgaaaacgctcaccaccaaggtgcctgcattggaccctaggggcctcctgggcttcaaggacggacagttgttttcctctggttactgatgaaggcatacatcagttgggtccattgctcattcacgttctgtctgttttttgcatcttctccaggaaagaaagaaatctcgttttgggaatgctttccacctgtgtcgggaagttctgcgtttgactaagctggtggtggatagtcacgtgcagtatcggctgggcaatgtggatgccttccaggtaaggttaggtattcccaacccctgcctgggtgaggacgctggaggaagcctgtgctgaccgtggagctggtttaagctccaggtctgatggggcaattgtattgcagctggcagatggattgcagtatatatttgcccatgttgggcagttgacgggcatgtatcgatacaaatacaagctgatgcgacagattcgcatgtgcaaggacctgaagcatctcatctattatcgtttcaacacggtgagaccttgactttactgactttcttttttttgagacagagtcttactcttgtctcttgggctggtgtgcaatggcacgatcttggctcactgcaacctccgcctcctgagttcaagcaattctcctgcctcagcctcccgagtagctgggattacaggtgcccgccaccacgcctggcaattttttttttgttttgttttgaaactgagtctttctctgttgccccagctggagtacaatggcacgatcttggctcaccacagcctccgcctcccgggttgaagtgattctcctgcttcagcctcccaagtagctgggactacaggcgcgcaccaccatgcctggctagtttttgaaattttagtagagatggggtttcactgtattggccaggctggtcttgaactcctgacctcaggtgatccacactcctcggcctcccaaagtactgggattaccagcgtgagtcaccgtgcccagcctcactggacttaactttctcaga

SEQ ID NO: 10397 - DNA, 1173 bp, Homo sapiens
caggaggtggagcttgcagtgagccaaggtcgcaccactgcaatccagcctgggcgacagagcgagactccgtctcaaaaaaaaagaaaaaatttaatccaaaaacattaagcataacaatatcctcaacaagtattgctaatcactcaaaggatcacacagaactatatgattttaataagcatgtggttgtaattgttccattttttaataatccttaactttcctgtagatttttggaaacattttcagtaaacattgaagaatagggaccaagggtcattgtgggattttctttctgttttcagacgtgtcttaaagacattaacagagcacagacacatgggtatccagaaaggttgcaacccaagattatgttacgtaaagcagaatgtctggtggccctggggagactgcaggaggcaagccagaccatcagtgatcttgaaaggaacttcacagccacaccagccctagcagatgtcctccctcagactctgcagagaaacctccatcgtctgaaaatgaagatgcaagaaaaggacagtctcacagaaagcttcccagcagctctggccaaaacccttgaggatgcagcgctgagggaggagaatgaacaactttccaatgcctcatcatccatcggcttatgcgtagatcctttaaaaggtcgctgtctcgttgccacaaaagatattctcccaggagagctcctggtgcaggaggatgcttttgtgagtgttctcaacccaggagaactgccaccaccgcatcacggcctagacagcaaatgggacaccagagtcaccaatggggacctctattgtcaccgatgtttgaagcacactttggccacagttccgtgtgacggatgcagttatgccaagtattgcagccaggagtgtttgcagcaggcctgggagctctaccacaggacagaatgtcctctgggagggctgcttctcacactgggtgtcttttgccacattgccctgaggttgactcttttggtgggatttgaggatgttcgcaaaatcataacgaagctttgtgataagattagtaacaaggacatctgtttacctgaaagcaacaatcaggtcaagacacttaattatggcctaggggagagtgagaaaaatggcaacatcgttgagaccccaattcctggat

SEQ ID NO: 10398 - DNA, 1159 bp, Homo sapiens
ctgtaaaatgcgggttcctgggatgtccgtagccctctctggaccctgtttgtgcaagggccactgctctcaagatgtcactttggtgctagggtggcctgtgttctatcccagtgtcacttgggtgctggggtggcctgtgttcaatcccgcagccctaacctgcccacgtgcttctgcagggtgaaatccgagctacagctttcaatgagcaagtggacaagttctttcctcttattgaagtgaacaaggtatggccgtgctgactttagaactgacaccgcctgggggtggagtgcggatgaaaagacgctggcccaggggaggggtgtgtggtggcagactaggggtttctgtccgatttgatggtagtctcaggttctgtggcttggcctccttcgcaggtgtattatttctcgaaaggcaccctgaagattgctaacaagcagttcacagctgttaaaaatgactacgagatgaccttcaataacgagacttccgtcatgccctgtgaggacgaccatcatttacctacggttcagtttgatttcacggggattgatgacctcgagaacaagtcgaaagactcacttgtaggtaagctcgtgtatgagaaggaagagcagggatgactagctttctttgcagtgtacggggtggtgtcaggcttcagtgcttgccgttcatcatttgctggcgtcggaatgggagtcttgaccacctcctgctaacacgtgcatgtgttttagacatcatcgggatctgcaagagctatgaagacgccactaaaatcacagtgaggtctaacaacagagaagttgccaagaggaatatctacttgatggacacatccgggaaggtggtgactgctacactgtggggggaagatgtaagtgctgggatggggtcttcaacacgcacaggacctcctggggttggggcgtggtcttgtcctataggatggggccttcagcacacacaggaggagctcctggagttgggggagggagtggtcttatcctataggatggggccttcagcacacacaggaggagctccaggagttggcggagggggcatcttgtcctataggatggggccttcagcacacacaggaggagctcctggagttgagggagggaggggtcttgtcctatag

SEQ ID NO: 10399 - DNA, 1870 bp, Homo sapiens
gggggggatttttggggccattcagccccatcgtgtctggacagggaaggtgaagtgaagagaggctgcctccccagagctgagacaggacagactcggtcctctccctctgctgcaggtgctcttcctttcaccactcagcttttcttgaaatgaaagtttgaaagtttagctttcagaactagctgtgtggctttgtgcaagtcacatgtcctctctgggctgtatcccctgcagtagggagaataaatgaaactagagaaaccctctaaagtccatctcactaggattctaggcttctgggtgtttgggagcttgggtaaagaatcagaagggcctgtgctggagaaaggacctgttcactcgcccagccccagacattcaggaggaggctgtcactcactggaatgactgaactctgaacccgtgcgtctgttccctcccgctgggctcactgaaaccactgaagcaaaaggggtttcactgctccacaccacactttcactgctcacaaactacttctccctttttgaaggacgagtctcgaattaaggccactgtgatggacgtgaagcccgtggactacagagagtatggccgaaggctggtcatgagcatcaggagaagtgcattgatgtgagaggagcagtgccaatcgggcagaagtttgcaaataggcagaatggaatcgatttcctcccacctccgtgtgacgatcccatgttagctacacagtgcagaggctcttgatggtggactaagcaatttcccccctcgtgcgcatctcagaacccatcggtaggcaaaggaaaatacgctcaggtggttgtggtgtagactgtgtcaggcctacggagtcagccagtggctagcgcaagaccagtcactccctctgccttcaggcttctgtcaatttcattatcatcaagcaggaattatgtcgtaagtcactgaccctaactgcagaccatgaagtaaattatgtaactaggtttttgcttctccagtggtgaccacccccccccatccccgctcacaacttgggttcttctcagcggggcgagctgagaagcggtcatgagcacctggggattttagtaagtgtgtcttcctagaattcgaaggctctctctttctagaggtgctacatagttggtaatgcttggaatggcaatagggtagaatgattaatcaaaggcatatcttctatatctgaagagtatccttccttcagggtttaatagactgagtcagatgggtctgatattaatcaaaattgtctcttctgaggaccgctgataagcattgacttgccgtcccctaaggaaatccgagcggctacaaagcgtttctttacttctcacttcaattaatgctgcgcttcgcttggtgagtgcgtactttttctacctgtacacattcctgcattcatgtattttgttttttttgactaaagctatgttacatggaaaggattttgaagccttttgtttcccttgctttgttttaataaacagtatattctttggttgtgaatcctactttctttgaatgcaaagagttcctataactggaaagcaattaattagccttcataataaatgttcacttgggggggatgttaactcattataaacccgaagattagtccaaggcatggagatccttcttcctagtgtttgcagccctgaaatgcatctttcaaagcatgaaaacactaaaaacaaaaagccattttgcctgaggatgctgatgatctggcacttgggattttattgatgtttacgcagcagtctaacaccaaccacgctttgaaatgtgtacagacagtgagctggtaagaaaacagtaattatgctagtgggccttt

SEQ ID NO: 10400 - DNA, 1653 bp, Homo sapiens
ctcttctcggtgggcttgcctccctggcctttctcctcaccgtagatccctcttgccttccctgttttaggagccataacaaaagagtctgtgggtgtcacccgcccgtctgccagcctgcaggatcaggtatcggaggccttcaggactctcgtaggctgccttggcatctctgcaccacacttatgcctggcccccattcggcaggcagatccaatccctgggaggataagggtgtgttctggaagctggcagtgccccctggtgaagccctcagaagcctggggcgagagctgtcacctcccccacagagaaagctggaatcgattcctctctcaccactcccttggaaagaacagcaacacaagggaaggcctgttattggtggagggtttgtcctgagagagcagcaggtacataaaaaaatagctggggcaacacgccggcctcggacccagcctgtgcagcccaaaacgggggcacagatccgtcccgccccacccttgctgctgagttgggtctgggcccctcctggtagccggggtatggaggaccctggctgctgcccctgcctcctcgccgggacctgactttccctctgccccccactgggaactggccagagtgtttttactaacaagctagccatgtcacaatctcaacagagagagacgggcgtggggaggaagagagagggagacagagacagagaaaagaaaggaaggaaggaagggagggagggaggagggaagagacagagagaggaaataaagaaagacaggccgggcgcggtggctcacgcctgtaatcccagcactttgggaggccgaggtgggcggatcacgaggtcaggagattgagaccatcctggctaacacggtgaaaccccatctgtactaaaaatacaaaaaattagccaggcgaggtggcgggcgcctgtagtcccagctactcgggaggctgaggcaggagaatggcgtgaacccgggaggcggagcttgcagtgagccgagatcgcgccactgcactccagcctgggcgacagagcaagactccgtctcaaaaaaaaaattaaaattaaaaattaaaaaaaagagaaagagagaaagaaaaaagaaaggagggagggagggaaggaaggaagaaagggaaagaaagagaaagaaggaaggaaggaagacagtccttgcagaaataccgctgcagtgtctgccaggacctaagatctcgtactatctattttttaataattgagggtaataaatatgtatttctttctcctcatcatcccccaacctccgatgcttgtcagctccctgcgtctctcctctgatcagaccaagtcttccccaagcaaaaaaaaaaaatcctttaagcaaaaaggattaaaaccttgaaagtaggtctgcctgagctccccccactccctcccctcccctcccccagggctgaagtgaagaggcccctcaggggagccggggacggggggagctgatgctgcaaaccccaagtggggaccttagcaggggagaatcccgcagtcaccccttcccgcagcccatcgagtcctgggggaggcagcctagcccggcccagctctccactggccattgaggaggggctgctcgagaacaaggctgccctagtccccag

SEQ ID NO: 10401 - DNA, 1202 bp, Homo sapiens
gactagaccctccatggctgtggctggaggaggagaggctggtgctcagttgctgtctgtgtggcatgtacttggctggacagcagtggggaattctgggagcagccacaagcactgggtgtctagagtgtttgagtaagcgtctcaggcacactgtctggaaagatgacaggaccctgcattaggcaactgagtctccaaattctttttcctctctggtgaggattaaaaactccccctaatcaatttcaactttgcataaatccacatacacatacctcagattgctgccttgggcacagttttgtttcctagcatttttggggtatgatttcctggcagatgccagcctagacaacatttgctgcaagtacttccctgctcacaaatactgagaatacttttttttactggtccctctttagagctgctcttttcttaccttatttctcacagtgttgctgtggatgtatggtcgacgctggctgatttctgtaacatactgactgcagtgaatcagtctgaggtgccactgtacaaggacccggatgatgacctcacccttcttatcctggaagaggatcggcttctctcgggctttgtccccttgctggctgcccctcaggacccctgctacgtggagaaaacctcggataaggtcagccccaggccaaacatccctccccattcgcccctcctcttaattctccagacttttttattcttgggaagttttctgtgcaaatggaacatgattaagtcattgagaagggtgttaagggaaaatatcgaccttttagccgctgacatccagctctgtgtcctgaaaaaaaaaagccctctcgacttcctttggtgtgtgtgtgtgcttgctggcatgttgtatatacgatcatttcctcacttgtttaaatagtgcagcttgtgttggcagtgctctcactcagctccaaatggtttgcatcatgcttaaagcaccctcctttctcccccttcctccccgcccccctccgccacaaagctctgcactaggaaaacagccagggctttttcccttctctgaggaggagagtgataaataggtgactagagagaagcagacaccatgtgttaacttagaaaaaaaaacttgtaggaatatgaagcattccccactgcctggtttctattttccttcctctgaggactgcgttttaacctga

SEQ ID NO: 10402 - DNA, 1162 bp, Homo sapiens
aaatttttttttttttgtttagattcacattacttttttaattgaattaagtttcataccagagagtttagggactgtgaaggtttcaggaaatttgttgagtatttagaaaagccgatggtttcagagagaaactttgatattagcttgaacacagttattgccaggggtgaggaaatagcataccaaagcataataactcatagtgatttatccaaaacttgagttgtttgcatctctggaccctgaaaactcctttatcttgaatttgttcaaaattgcaggataccgggaaggtttgtgaaagtagcaaagaaatgtcctaggcagtagttgtctggtgtgtgtgtgtgtgtgtgtgtgtgtgtgtgtgtgtgtgtgtgtgtgtgtgagacagagtgagagagagactgaaagagagaggtgcctcattgatgggttttctgaatctgcaggatggagacattccctgcagtggctgagaaggtcctcaaggagttccaggtgttactgcagcacagcccctctcccattggaagtacccgcatgctgcagcttatgaccatcaatatgtttgcagtacacaactcccagctgaaaggtaaggcatgtttagtttcttcatctagaatatagacagatagagattaatgtagcttctttcttgtgttaccatacctaccatacctacctccccccaccccacccccgaacacacacaccctaccctacgcttcctaccattgtctcagatatttagtttactttgaaatctgtatgactctctagtgcttgggtgggatggaaggagggaatcatgggtatagagcttaatttgcaaatgcagagatgcagttgcacatctggccacgcgaaaggcagcagcaaggcctcttgaaggctgcagacccagagcctctcccaagggagaggcattgctgagatgtttcattgcagagaccatacgcttggcagggattgggaatagctgtttctggactcatgtaccctgtttgttcaatatggaaaagtctagttccctatgggatatccctagtgggagcctgccagggagtaagaaccgagaattgatgagctttggtgactcaaatctggaagcacaaaaaccaccagtcccagaatttagctattataccagtgt

SEQ ID NO: 10403 - DNA, 1230 bp, Homo sapiens
acccggattgggtaagtgtgcaggatgtttattttattttcctacattacaagtcattttggaatttaatattgttagcaactggactgtgtttgtaactgagggcacagggtgtgaattcttagaggcctccaccttctcttctcttcccttcatcttctgtcctactgtgctcatgaaatttggtaaatattactctctatctctcttgtttcttctttctctacctttactaaaacactcctttaaatacaatcttgtcccagcccccaccccagtccctctgggtttctctttcctctgccttccggcttaggtccctagtgagtgcctcagggcagttgtgctaaatccctgggtgcagctgtcagggggtcctccttgggaagaatactgtccactacttttccatcaaaaataagagtaacattttctttctatatccttttgacccatatcctttcctcctatgctcagattcctttgccatattgctgatctcattagataccaagcctcttacggtttcatcatccaccatggatttccatagacatctcagggaaggtagtgtgtgcaaaactaacacttgactgcttaaattcctggaaacagatcgagttttgagtattcctttattccttggatggatccgagttcttcctctctgcataaaactagtgatcctaagcccaacgtaatgcctacacgccagagcagatggatgcctggtgcctctttagtataggatctccctgagtataggagagtgaagaaagtagtaggtggcagtgcccccagaccagtcttccactagaccagttttctactggattctaatattttctgagttggaagttgtattgtgagctaccctttggggtgatttgttttgaattatgaataccccagttattgtcaatgtttccctttcacttcccgtcataacttcgtaagtttatctgtaattctctagaaggcttttttttgagacagagccttgctctcttgcccaggctggagtgcagcggcatgactcgactctctgcaacctctgccctctgagttcaagtgattcttctgcctcagccccccaagtagctgggattacaggcacatgccaccgcgtctggctaatttttgcatttttagcagagatggggtttcaccatattggccaggctggtcttgaactcctgacctcatgtgatccacctgcctcgccctccc

SEQ ID NO: 10404 - DNA, 1197 bp, Homo sapiens
caaagcagatgacactctgctactttgggactgtggtacagtatttttattgtcaaataaataccggtgaggtgaggcttttctctttgtaagctgagtctcaggaaagtctgagctcatgtgtgttttttgtttttgagacagagtttcgctcttgttgcccagactggagtgcagtgatgcgatcttggctcactgcaacctctgcctcccggatttaagtgattctcatgcctcagcctcccgagtagctaggattacagatatgcgccaccacacccagctaattttgtatttttagtagagacagggtttcactatgttggtcaggctggtctcaaactcctgacctcaagtgatccgcctgcctccgcatctctaagtgctgggattacaggcgtgagccaccacaccaggccatgagctaatgtgtttgtatgttatataggcagaacagatggaaaagaagcaacatgaggaatttgacctgagccctgaccagtggcggaaaggaaagaagtctactttccggcatgttggagatgacaccactcgcctggagatctggattcatccatcccatccacggtcttcccagggcactgagtctgggaaggattctgagcaagagaatgggctgggcagcctgagtcccagtgatgtaagttcctgagaatgatgcaatgagccaaactagctcagtaagcctgggtgccctggttcatacagctgtgaggcacagatacttcccactgattgcaaggaagacaaaccacttgaggctccctgatggtcttttcccttctcatgtacgcttcctttatctttattatgtacttccctctctcaccactatgtgtcactgcagaatttagtaaaagtaggattagaatttttttttttttttttttttttttgctgctttttgttcagcgtcatcaacatgatgctttaggattctatgtgggattttgtacttatcttttcctcttggttgaccttatattccgagaatgaactaaagtagcatggataggttagttagtctgatttgtgatgggctttctatgggatatcctcttataactcttgggcggggactttttcctttaagccaggagaaatgacagtagaaaaatcacaggcttgtttagaagatttctcctcttcattgactcagtaagtaattatcgacag

SEQ ID NO: 10405 - DNA, 3720 bp, Homo sapiens
tatgttaaaagaacttagccacccaggaaaaagttagaggcggaagaaaaggctgaggtggattcacaggctctatagatagagaacagtgtagtgctgaaaaggttagagaggtcttttgttctgacaataatgaggtagtttgggatcttggatttctgaatatgacttggatgacacataaggagatgggtttcccccatttcacttacccaagtgtaggtagccccaacacagttaggtccttagccttgtgaattgttgaacaagtgttgtaaacccagaatttctgcttctacagaaatgtccttctttgcctaccagtattagcatttggatatgtaattcttgctcgactttttttgttacttaaccagaatgacagtctttcccctatcttccttctttattcttatcttctacctttccctcccaaactctttccccgacataacagaaaacatgaaggaattaaaggaggccaggccgcgcaaagataacaggcgtccagatctggaaatctataagcctggcctttctcggctaaggaacaagcccaaaatcaaggaaccccctgggagtgaggaattcaaagatgaaattgttaatgaccgagattgctctgctgttgaaaatggtacacagcccgttaaagatgtctgcaaggaactgaacaaccaagagcagaatggtcctatagacccagaaaataatcggggacaagaatcctttcctaggactgctggacaagaggatcgtagtctaaaaattatcaaaagaacaaagaaacccgacctgcagatctatcagcctggacgacgtttgcagactgttagcaaagaatccgccagtcgggtggaggaggaagaagtcctcaaccaggtagaacaactgagagtagaggaagatgagtgtaggggaaatgttgcgaaggaggaagttgcgaataaaccagacagggctgagatagaaaagagcccaggtggtgggagagtaggggctgcaaaaggagaaaaaggaaagaggatgggaaaaggggagggggtgagggaaacccacgacgacccagcccgcgggaggccgggctccgcaaagcgctactcccgctcagacaaacgaaggaatcgctaccgcacgcgcagcaccagctcagctggcagcaacaacagcgctgagggagctggcctgacggataatggatgtcgccgccgccgacaggataggaccaaggagaggccacgactgaagaagcaagtgtctgtgtcctcaaccgattccttagacgaggacagaattgatgagcctgatggattaggacccaggagaagttcagaaaggaagagacatttagaaagaaactggtctggccgtggggagggtgagcagaaaaacagtgctaaagaatatcgaggcactcttcgtgtcactttcgatgcagaagccatgaacaaagagtctcccatggtgaggtcagccagggatgatatggatagaggaaagcctgacaaaggcttgagcagtgggggcaaaggctctgagaagcaggagtccaaaaacccgaaacaagaacttcggggtcgtggtcgtggcattctgattttgcctgcccataccaccctatctgtcaattcagcaggttctccagagtccgcgcctttgggacctcggcttttgtttggatctggtagtaagggatctcggagttggggccgtggaggcaccacacgccgattgtgggacccaaacaatcctgatcagaaacctgctctaaagactcagacgccccagctacatttcttggacactgatgatgaagtcagccctacatcttggggtgactcacgccaggctcaggcatcttactataagtttcaaaactctgacaacccctattattacccccggacaccaggccctgcctcccagtatccctatacgggctataaccctctacagtacccagtgggccctacgaatggtgtgtacccagggccttactacccaggctacccgactccgtcaggacagtatgtgtgtagccctctacctaccagcaccatgagtcccgaggaggtagagcagcacatgaggaacctgcagcaacaggagctgcacaggcttctccgggtggctgacaaccaggaactgcagctcagcaacctgctctccagggaccgcatcagtccggagggcctggagaagatggcgcaactcaggtatgatgtggtctattctggctggagggaaatggggatcagccggaggtgtatagattgctatggctgaggaaggtagaaactttttagctgagccactgggtattatttccttttcacgttgtaagggaagggcagttggaaacagaacagaagttttatttctagtcttttttttttttttttttaagacggagtctcgctctgtcgcccaggctggagtgcagtggcacgatcttggctcactacaaactctgcctcctgggttcataccattctcctgcctcagcctcccaagtagctgggactacaggcgcctgccaccacacccggctaattttttgtatttttagagagacggagtttcaccatgttagccaggatgatctcgatctcctgacctcgtgatccgcctgcctcggcctcccaaagtgctgggattacaggcatgagccaccgcgcccggccctatttctagtcttagaaataattatgcatcctactttttctttaagaaaaaattatctttaagggatcatggaatcttgaaatggaaaaagactttctagaatgccaagaaatgaacaacatgtaacttgcagtgaagatcttatttcagttgttaaatttaggtgaagacatatggggaaaaactattttcctagacacaactatctttagaatgacattctgctctgcagaatggaaaccagagtgagtagtatacctacctggtcacattttttatttcctgccaggggaggtggttaatttgcaggaatctcaaaacttgagtctagctttttctgtggtgtatttggagctggaagttgcatgtattttattccagagctgaactgctgcagctatatgagcgctgtattctattagatattgagttctctgataatcagaatgtggatcagatcctgtggaagaatgctttctatcaggtgattgagaagttcaggcaacttgtcaaggatccgaatgttgagaacccagaacagattcggaacagacttttggagctcttggatgaggtaaactgtcatctttttgtcctcaggataaaggcttcagcattctgtagttacgatggatttttactacctgaaatactatgttttagaacagaatatcgacaaaaaaactgcccttttcttgggttctgagccttccctacaccagttgcttccttgggaccataaattactggcaattggagttttgaggttgaaagctttctgaatgccttggcctaaaagagagagaatgagaatgtgtatgtatgtgtttgtgtttgtgtggagagagcgtgtgtgtgtgtgtgtgtgtgtgttcatgtgttcatatctttaaaaccatggaggctttgactgtgaatttgccttgttctcaaattggtggccagtgaatattgtgcgtgcctcccttttcataggatgtctgaacatcagcagaactgtgaaagggttgtctgccccggtttttggtggatagg

SEQ ID NO: 10406 - DNA, 1831 bp, Homo sapiens
atccgtgacaacaacatggacttcactgacatcatcaagtttttcaatggtacgagctggtccagccatccaggctgccctgagcagaggtgtggaggcccccacctctgccccgcacacagctggagggttctcaggaatcctgggggcccttccccaaaggccgggatgtcaagaatctagcagagcagatggaaacagagcagggtagtcagccacctcctagcctgctgccctttctctgggcctctctacagctcttcacgtttccccccagaacgtgctgagcatcacgatgcccaggagatcctgcggattgcccgggacctcgtccacaaggtgcagatgctcatagagaacaagtgagctggggccaggaggcagcagccgtgcagagcctgggctccggcagggagaggtgcaggggagtcaccgcccagacctccccagccaccaaccgaccccacctctgttcctaacaaagcggttgtgagcctggatccgactcccggcagtgctgaccctgcagggcaagtcaggggccaggatgccctcggatcagggccgggatgggaggggtcagcctcagggagcagctgccttgggggacacacctactctgctcccctctcacacatctgggagtagccccactgccacctgcagccgcagcctggactgctgcccacgagtgaacctggggccccacaggattaacaggggctatagcggcctgggccctactcagctggggtggcagagggcgagaggctctgtgctgtgtcccttctgagggtccctttgcagtcccagtatattgtgcgtgcaccagccccagctggagcaaccaaaactgcttctggtttaggcacacgtcacgggtgcgggagacccgggcacgggagacccgggccgccttcaggccgctcccccgagattctggggcagtcggaagatgtgggccctgggtgggagcagcccacttcagcagcactgccactgcctttggccacctgaggtgacccccaggcctccccggccttgtacagtgtacctctgtgtatctgtacagcctcgctcctgccaccccacccttgcgttctgcattaggtacttccctgaaaaccacgtgtaagaagtgatgcttttgccagtggatgatctggaatgcgaccggagcacttgctctgaggaatcccagggtgactctgtcggggaagaatccggtcacagcctcccctcagagacaggcctcagttcgagggcagcccattatctgtcgcagacatctgccatgtccctgagactgcgggaggcaggggatgcatgggtgtccccatctgtccctggtgagaagcaaggctagctctgccttccacatgcttctcaggatgccaagaggcctaggaacccagaaacccccttggaggagctgtgtatgcgggggtgccaggaagggcatagctcctgcccccaggcctaggcatgctgcttgctcggccatccccacttcctcctctaccccaacacatgcaggctaggccttgccctggaacatggaggccctgcccggggctggggcctagtccagcagccaccaaagtctggcagactttctgcatttgagaaacatgacaaagggccccgcagcccttctgcacccagcacagcctgcccagcccagccctgcccccgggcactgcacagcctgtctgggggccagaccaccccattgtccatccttgttgtccgtgagtccttggcctccaccaagcacgtgtggccattgtgtgcctgccttagtgactccgtggttttgtgaggagcagag

SEQ ID NO: 10407 - DNA, 1223 bp, Homo sapiens
gaggccagtggcccccgggcctgcacagatacctcatcatccacccgctgcccctccccgtccctgtcccccagcatcgggggcctgcaaatctagtgccgaatgactatgtccagattggtgacgatgggtgttgctgtttttcttgtcgtttgtgaacgctgtgatgctgtgtgcccaagtgggcagtcaccacccagcccttccttgggcgtctcccccagagtgctgtcgggaccacatctgtcctcaccctgtgggaccgcctggccctccctccctagcccttccagcctgggacacacacacacacacacacacacacacacgcacgcacacgcacacatcttacctctcatgcgtgttttaccttttgatgttcagagtggctcactggctgggagtccttacctcggggagagggggaggttggttccttggggggccaaagaaggcagggaatgcctggagggtaactggggggccaccatgaccccttctctctccagaaacagctgcttctccccccatcccagggtcccacccccaacccccagaggtggcccttgtttacagtgaggactcggccactgtgtctctgtttcctgaaatataaactgtagcgaccccagactgtagagatttttatgtgtttggatacatctgctgtgtggaaaaaaaaaaaaactacaaaaaccctaattttgtacatactgtatttttactattgaactgtattctagtggctgttcatgctccaagactttagttaccgagacatgaatactatccatgtaataagcacttgcctggaataaaatataaaactgaaataaacctgcactgaaacctgagatggagctgccagcctgcagcatctgggtcattttattgcaaaaggaggctgaggcctgtagggaagcatgtggcaggagcggtgagatcacctgtctcgaccctgtctgcccagcatagtcctcaagcggctctgacccggtgcctccgccgctctgaaaatggcagttctggtcggtctgaaacttttgcaaagcttcgtatttcctcagaccattttacaagcattatcttgtttcatctttcaacagccaagtgaagtaaataagccagacttagccccattttggcagataaggaaacaggattgaggtggcccagtgacttgttgaggccacacggctagctggagacttcgttggagctgc

SEQ ID NO: 10408 - DNA, 3185 bp, Homo sapiens
gacttgcctctgtgggccagctgatagggagaggtttgtgggggctttgggccccaaggctgctgctcagggtgtcctgctgtcccttactctgtgtgccagtccctgaagaggaaggagaaggaatatgagcatgaaatggagcggctggcacgtgagaagattgccacgcagcagcggctggcagagctcaagcacgagctgagccagtggatggacgtactggagattgaccgcgtgctgcggcagacgggccagcccgaggatgaccaggcctccacctccaccgcctctggtgagccccagcccccacgctggccccccagccctcagatgttacacctcaaattccagcctccctggccaggctctttcttgcctgctagaaaagatggccctggccccagccccatcacattcccacgcccccacgagcatctacgcctccagccacttgcttccccgcccttctgacctgctccctgccccatgttccccacagagggtgaggacaacatagacgaggatatggaggaggaccgggcgggcctgggcccacctaagctgagccatcgtccccagccggagctgctgaagtccaccctgccaccccccagcaccacccctgcgcctctgcctccacacccacaccctcacccccactccgtggccctacctcctgcccacctccccgtgcagcagcagcagccacagcagaagacccctctgccagcccctcctcccccaccggctgcccctgcccagacactggtgccagctccagcccatctggtggcgacggctgggggtggctccacggtcatcgcccacacagccaccactcacgcttcagtcatccagactgtgaaccacgttctgcaggggccaggcggcaagcacatcgcccacatcgccccctcggcccccagccctgcggtgcaactggcgcctgccacaccccccattgggcacatcactgtgcaccctgccaccctcaaccatgtggcccacctgggctcccagctgcccttgtacccgcagcccgtggcagtgagccacatcgcccacaccctctcgcaccagcaagtcaacggcacggccggcctggggcccccggctactgtcatggcaaagccggccgtgggggctcaggtggtgcaccacccccagctggtgggccagaccgtgctcaaccctgtgaccatggtcaccatgccctccttcccagtcagcacactcaagctggcttgaggacgaggccactcagaggcccccagtggggacagggagggggacctgtcccccactctctcacccaccagctccacacattccagccaggcccaggccagcccccccacccacccccaggcctcctaggggaagggggtgcaaagactctgagccaagggagggaagggccaccctgctgcactaggacttggtaagatgactctgagaaaatgcgagactctgatggaatgtgccacctgtccggcccagtgccagctccagtgccgctcctgcttcccctccctaccctcggaaatcagtgcgatgtggacgtcacgctccctgacttctcccccgccctgccccgccttcgtgtgctgctgctgctattgctgtctggtgaggtggcccaggcccccggctttcctccggagcctcatgttctcttcccaggcctttggaggggaaatggggaaagcagaactgaagccacttggcccagaaagctgcggattggggtgataaggggccttgctctgagcacaggtgacagatcataggaagtggctggtctggagtcccacccggacaggtggggcctcagcctggggctctctgacccggttgcagtcactgtgattcgttaccgtagatactacttaaaatgattctctaccaacaataaaccaaacccagccactgccaagcttcctgtgccctcaccccaatccctgccactgggctctggacctcaggagggcaggctgaggtggggaaggagggacttggctgtccttccccttccccgtcccctgcagcctgggtctggatgggaggagagccactgggcccctgtccccagtccccagtccccagccctgggcttggctcttggcttccagaaggcagcaaagaggggcgctgtcctgcgttcagcccctgatctctgacctctgctgagtgctgggcactgctccaagggacaggtgggcctggcggcctgtgggtttgggtgcctcctgcagtttgggagacatggaccagcatctggtcttgtttccaggagcatagaagccacatcgttgagacatcaggaaggtaaaaacccagcggcttagccaagccctaagcctgtccccagaccaaccctgggacctatacagaacagagggccagagctagggctgctgcttctgctccagcccctttgcctctgtcctcccatcccctcaacaccctgcttctcccggggacgcttttgagtgggccctgcccggggagctgcagagcagcagcacctttctctgagaagaggtccttggttgggtcaaggacagggctgagcgtggaagggggaggagtcaggggctctgtgttaggatgcggctttctctgcctctgggcagcctgctttggcctttccttgtatgtgggtgtttattacaagtggctttgtgtcagacacgctcggctccccacctggacacacactcaccagtggcctttcagtgtagcgggaggaagccggtgtccctggatgtgaagctcacactgatgggctggggcaggggcctgggccggcgagggggccggggggaggggacagagctgaggatttcctggagtgccctgcaggcacagaggaggtcagcaaaggtcttgaatagattttctctggaaataaagaatccttagatgcctaaaaattcccttcctgttccctcctggtcctggacacctcccaggggactgttccttatttctctctcctggtgtgggtaaagggacagttacaaaccaggtcaccatcctcagaggctgagccctgtacccaccccagcacagccacctccgccagaccccgtggctctgggagagccagctttgctattcccattgtgacagcgatggcaggcctgacccacggggcagttagagcagcctcgtggagc

SEQ ID NO: 10409 - DNA, 1155 bp, Homo sapiens
tttttcctccaaacaggtccagcataaacgagttccctgtggaaaagaggaagtcagccttttcctaacggccatagaaaactcctggattcatttaaggagaaagaaaagagagcgtgtgagacagctgagagaagttccccgagctcctgaggacgtcattcaggccttggaagagaaaaagcccacccccaaagagtctggcaatagccaagaactggccaggggcccccaggagaggaccccctgtgggcctgctctgcgggaaggcgaggctgccgctgtggagggcccgtgcccgagccaggagtccctgtcccaggaggaaaacccggaacccacggaggatgaaaggagtgaggaaaagggaggggtggaggttttggaaagttgtcaaggctctagcaacggagcccaggaccaagaggcttctgagcagttcggcagcccagtggctgaaagggggaaacgtctcccaggagtggccggacagtacctgtttaagtgtttgataaacgttaagaaggaggtggacgatgccttagtggagatgcactgggttgagggccagaacagggatctgatgaaccagctttgcacctacatacgtaaccaaattttcaggcttgttgcagttaactagaaacctcctgcacagttggaaacgtgttgatagtaacttgctttggagtggcctgtggggtggcaagaggaatcctaccagcggcccattagtagcacgatgtggaattatcttcgaaaacaaaaacctatgaatctgtcccccacctccccccgcctccttcccgctttttgagttacagggagtcgtagtgtggtcatttacaaggaggaattgtggtcatcagtaacaacagaaagccctcagtaaactcccgagggattgcaagctggctcaagctggcccctcagctctggactgcctctgcaaggtcagaagggttgtttgtggagtctgggctgggcagcactgcctagaatatcatgctgtctctgtcacccaagggtgtttcttgaggaggggtggctctctctgcctccagctggaggccctggtaccctgttctaggtcactcttcaagatggggcctaccttgcatcaatcccacaaagggagctgtatggtgggtggtg

SEQ ID NO: 10410 - DNA, 1099 bp, Homo sapiens
ctcaaaaaaaaaaaacaaaaagtaaataatctttgtgctggtatacctctgttaggctgaatttggttgtgcatagaattacacttgatttttgtagtacaaagttactagttttactcagattagtagagcatagcttttttccaatatggctggaaatacttttaagtgtgcatttagttttgaaagattttatttcttatacatattttatcttctagatgttgattttattagctccttaatgatatgtctgttagcttattgttcctactttaattaaccaggattgtacatttattctgtcgacttgcatctctaacttggtaccattctcttcatcccagtacatatttttatatcacttctgggaagtgtcctgatgattgtcattcacagtgtaagttattatttatattgacagctactgtgtgaagacattcacaggacacagagaatgggtacgtatggtacggccaaatcaagatggcactctgatagccagctgttccaatgaccagactgtgcgtgtatgggtcgtagcaacaaaggaatgcaaggctgagctccgagagcatgagcatgtggtagaatgcatttcctgggctccagaaagctcatattcctccatctctgaagcaacaggatctgaggtactgtatatacaaatgtcttcatggttttattgctgatatctgaagtccttagataactttgctaattccctgtttcagggctgttaatgcatttaaaaatctgcatccagcaattctgaatcttgaaattctctactcttcacagcttgctgatgtgtttacattatttaaccagtgatgattattgctgtcagcctatccttgatttgatacgtgatgggtattctcctaaagaattaaaatttatcagaaaaatcagtgttatgagatcatctcaatgtaaaacaaaacctgagggagaggttaaagttttctgtcagaaaaatagccttcattaatgaagataatgattttatttataaatttatggtaaaatgcagttcagtatttattttttaaaattaattccagatgtgatagtataaatgtttttttaaatgaag

SEQ ID NO: 10411 - DNA, 1121 bp, Homo sapiens
tgcctgtatatccttcacttagttaccatttgttggttttccttcatgtatgtgtgtatattttgctgaaatcatttgagcgttctttgcagacatcgtaacactttacccccaagtattttagcatgaaccacctaagaacaaggatagtatataaataaccaaaataaaattattcacactcaagaaatttaccattgatagactacatattgagatttgttcttgttatttccataatgccctgcgggacttctttttaaccctcatccaggacccagtcagggatcgtacgttatattcactcctcatgtcttatgagttttcagtttcctttaatctagaatcccctagacttttattttcttctggtcttttgatgtttttggtatgtatagttttatcgtattatgaaatagatgctatttaaacattttgccttttactgagtcaaataacttttttgtttttaaggtgggtcatgataactgggtacgtggagttctgttccattctggggggaagtttattttgagttgtgctgatgacaagaccctacgcgtatgggattacaagaacaagcgatgcatgaagaccctcaatgcgcatgaacactttgttacctccttgggtatgtacgcctcgcgaggtctctgaacattagattttggagtgccagacaaactgtgttttacataatcgtgtggactttgccaggtaagaaatgactgtgctttcagggcagaatagagaagacatgaaaatcttgtggattcctaccatttgttttaaattctcctttcccgttaactctttccatcgttagccttataataaaaacattactttctccactgcacaacattggttttggaaaccacaatttgtgaagaggttacttaccactctgatgggtaatttttctcccctattagtttgtttctcaaacaaaatcttcctcaacctttcccactggcaggtgtatactatcagatactagaaactcagaaaattgtatttgatttgagtaaacatcctcactatcatctggacttgaatctggaatttaagagagtgaatacagtcaagtataataaatgcactaaagtataatggaccaa

SEQ ID NO: 10412 - DNA, 4259 bp, Homo sapiens
ggcacacactaccatgcccggctaattttttttttaattttgtattttgtagagagggggtctcactatgtttgttgtccaggcttacgtgtgagttttaaataaaccatttctttttctttcagatttccacaagacggcaccctatgtcgtcactggcagcgtagatcaaacagtaaaagtgtgggagtgccgttgattgtgtctccttcggcccctcctccctcttttcctctggatgcactctgatgataccatggttaccccattgagctctgtttaaataaatattgtcctttcatgtaaattattctggatgtagattgagcttattaaatgttacacacaaagtattcatgcatggtgaatccaaattgtatactgtaaatttacatacgttgtctagaagtaccatagggtttaaaaacctgggctggcattggtcacaccaggcctaagaaggcagaagttgaatcaattgaactagggcactaaactgaatagttgacagtgtcattttatgttggattattaattcctgtttttctttctgctatctgttggtgcctgacttgatggcctcatttggggaaaagtggtggttattagggctttttctgaaatgtgtatctatgtaacatcacttaagtgtgcttaataaatcttctgtaaggattttagatgataaggctacaattcagaatcttctgaaccatctatgtaatgaatggggattatacattggaatttttgtcatgacacatttgccaaatcagtaggatatatttgttttggcagcctatcacgcagaggctagtggtatatttatgtaagaaaatgactgtaaatctcaagaaaaatctcagcagctaatagcaactcatttatttcattttggtcttaatgctttgtaaacaggtcaaaaaatactgtcatactctaagcttctattttccacactggacatacttctagttgtattctccatactattagactgtgtagtgatgtgacttccaagtagaatttaatctccccattgagtgtgtcatggtacaaatcactattcgtttttggtgttttttagggatgtgcaatgtgcattacataatgacagaaatactgagaaggttctgtgtgcccatttgaaaggagtgggaggaatacagcagtttgtttttcaacatgaatctgatattgatttaaactgtgtttcacttacaagttttaaaaaaatgacagggtttaatggagcgtgcataaaaatgtactgttttcaccttttgtttatatgtaaatgtttgtaagtatatgggcctatctgtaagtggataagtctgtatgtgtgtatcatacacatcaacctccatgtccttagtcctgggtttttgaaaaagtgctaaaacggacaagtagaataaatgttgctgtggaatgccatgctttagaacaaaccctttttgatcttaatgcttctgaaaactaggtctgactctggggatttttttccagccgaaggaaaatcacttccgttatgtccccctctaatttagccgctcgacattttacacaacccggatatgttgtatattttgacccaaagttacaggtaggtttaagagaatttttagccatgacttttggagcactattccattgtcagttattaataaagaattccattgcttagctaaccaacaggttttttttgtttccaagagagttatttgaaaagttaacagaacaatgagataacagtgacagtttaacaaagataaaattctgaactgcgttttattcatttgtgtactatgtgattttttaaatgtcccctttagtatttaatggaaaattggttcctgcaaaagacaaagggtgagagttagcgtcctgtagatacacacagagactaggccgtatattaactagaagcagctttatgtctagcttgtgtctttttgtttgtttgcttgtttgtttttagattcctgagagatgtctctggaagggaaagttttgagaactaatggctatttttgaggacaaaaattacatcttaagctaattccttaaatacatacagtaggtgaattttcaggacaatattgcctcacaaccctgcttacattgaaaagtctttttcccttagctcttctgactggatttttctacaaaaactatggaaaatatctttgttcttgtttgctgctattttctgtcctattttgagaaatataaatacatagaaatggtgcatcttaacatttgtttgtacatgtataaatgtcttgtattttaattcatttttagcatgaattgtttaagggtaagccacaacatctagaaatcactcatagatattgaacaataaaggagaatggtaccgatgcaggaggaagcaagcgtgtcttcccctgcagcacacagcgacttgcgttgacaaaggaggaggaaacgattactctgtaaacaaagttatccttacttgggagattgccacagcctgctgctgagttgagttaccagacatcctccatgtgagaagcagcgaacattgaatctcagggatggcccacaactgggtccacatgtaatgagccctgtttaataacgaaggggtgggggagagcagtccgtctacaacctggaatcagatttgcaaaatttcctgcactgctgtctgacactgtcctgttgatgccctttctgactgtgttctctgttttctctgtctgctgtctaaccctgtgccttgcctgggataaggacaatgatgaggttactggtttggattgtaagtagaggacttttattaattggtttagaggttcactgctgctttgtcactttctcaatcaaattggccacttaagaaataaagagctggtagaattgcatcctcagatgattattgactgtgtgtgtgtgtgaaaacagacattccagtgccacccaaatatatatctgtaacgtgcccaagaaatcctagctgcgctcttgagagtgcatgccatggagactggtttagacaccgcgtggagcctagttgcctgttgtcacggcatcttgcactttaggagactaagaccgtcctggttcgtctgtgtgtggtgtgaccaatggtgtgcccagagcactactctcaaaatcactagtgttagcaagtcgtcccgggctggggagcgttcgccgtagtctttggaagctttggctttagatttaccaagccccgcctccccgctgccagtgccctgctctcccgttcgcctctttctgtttctgtgtgaactttcccggtaatatcactcgttaaataggttttctttaaacttaattaaagaaaaactatttaaaggtaaaggatattttgttgacatcggtggctcgatcatccttaagcaactgaagttaaaattgttgaaggaaaaggcacttaaattggttactttcatgtccagctgtatataagtccagtgtgttcatctagatgacgcaaagaatctcctggtagagaagcgacatgtaaaaaactggtggaaaaaggttttggattttttttccagtggggtggggggagggcaagctggatttacaggtcacggctggactgaatgggcctttttatcttcccactgtatcatggaagtagctgcttgcttgtactgtccatccttcaggcatccctaaagctcactctgaagatgttagagacaaacacaaactcttcgagttaaagttgatcctgacactgacatgaaggcaagccttgatttcgtatgaacgttgctgaagtggtaattgaggaaaacagttccccagattgttaagagttcactgaagatattgacacaattttaaaaaatcagtaaaggaatgtatataatattgctctcgtgttttacagtaagatttgttgctctcagactgtgtaaaacaaaatttattcatgttttctgcatattaaaaaatcttattgtaccaactggtaaactattaaatgcctataaaactagatgtgatttttttttttttttttttttttttttttgtcttcctttgcacaggggaaatgctgatagaaagtggggctgtgtgtagctccagtcacaaagagtgacacgaatcggtgtcagggcagtaaggcctcatgagctgctttccttcagggcagcacccgaactggctttgctgtcccccttcccccgggtggaggagggagtgcctcagcctgagccttgccatggcatgcgtctgcggca

SEQ ID NO: 10413 - DNA, 1122 bp, Homo sapiens
ataacgctcctgcgggagatctcgctgaaaacagggatccaggtgggcatggctcacagcatccccgctgtgtccccgctgtgtccccgctgcgtccctgctgcaggctcccactcctggccagggccacaggggaagtggctttttcacggtagccgtctgtgcgcaagcgttggtgggttgggaggtgccaacccgctgaacctgggcctgaggcttcctgtggtgggggggctgccccccaggtcctgctgaaggagtacagcttcgacagtcgccacaagcccgcgttcaccgaggaggacgtgctcaacatcttccccgtggtcaagcacgtcaaccccaaggcctcggatgccttccatttcttccagagcgggcaggccaaagtgcagcagggtgtgtggccaggtggggctgggtggaggtgggggttccccatggcccgtcctgaccttgccacccctgggggtgccctgcaggcttcctgaaggagggctgtgagctcatcaatgaggccctgaacctgtttaacaacgtctacggagccatgcacgtggagacctgcgcctgcctgcgcctcctcgcccgcctccactacatcatgggcgactacgcagaggtaccctctgggctgtggcagcaaaggcctggcctcgtgttgggggatggggagtgagggggcccctgacggaggagtgggtggagtccagggagaccccaggaagtcgctggttctgcccaggccacccctggctccacccctctgtaactgtgtcccgagcgggagagctcaggagcaccctgtgctgcggtgaggtcagttctgggaggcgatggcaggggacccccccacagggcgtcagcaaggacgcctcctgagactccgtgagtgggcaggaagcatgccaccgagctcccacgtcctctgtgcccagtgcaggctgtggggttctgggtgccctgcctggccggggctggtggaggctgtggtggggttctgggtgccctgcctggccagggctgtttcagggttagcatgtcttaggatccctactccctgcaaagggactgttttttcttctgtttataaatgggtgggttgtttgtttgtttgtttgt

SEQ ID NO: 10414 - DNA, 1748 bp, Homo sapiens
ccctgtgacccacatgccacccccaccctccacagagcccccttgctgggacagccagctcacctccaaggacatcccctcctggcttctcccccttccgagtctgcagcgccgtgggcttctctgccgatgggcccgggttggggttaaggtgggcatcctccaggtacaacgagcctgaagagcccctttcagtgcagacggggctgcagagtgacactggctgggcacctgccccacgaccaatgacaaggatttccagctgaatgctttattcccatagggatctggacctgtgcccaagatataaatactacactttttttttttttttttaactgacattgtgaaattctccctatagcttttgccattcaagcaacattgtgatctttcttccccgccacgtgtgtgggaatgattgagtcctgtttgcaagctggagaggagctctccctttgctagtactttctctaaagtactagtctagtaaaatttattcttgttagaaggtcaacaaaatatctgtttagcttttatgaagagtcaccgtagcagcccccacggctggaaagaggcctgtacgttctggacgcgttttgttggctgggcttctggaggcactggcaaggtcaaactgcatttctttaagaacagttgcaggatctggctcgcctctgtgggaagccggcattacaggtgcttggtggatgggccgtgtcacattgccatctggggtcctttggggtttccaggttgtcaccatgctgtcccatttgggaatcccatacctgcctgtccccactgcgctggctgacccttgctgcctgctgcctcttgggagggctttgtccctgcctctgagctggtgggcaggatggctgggtggcccccagagaagcacagacctgagatggggtctccatgcccggtttgctgttggaatgatctgaacaggaccccaaatgcctcttccctctggtcatgcctcactatctctaggagctccatcctgtggcttccagagtgtgcacttccagcccacccgggcagtgctgagagggaggaggagaacaaggatggcccagcctcccctccctcccctagaccacggggcgggcagctcgggttcctggagggctgtttcccccacgctgtccctacatctgctctgatctaaaatgtctttccttttatgctgcgcccagtcttggggctcaaagatttgcccaaacctcattggccctcgtgactaggctcatctagatggtgctcacgctggtgtttgaggcatttccactgtgatctccacgaggggatgttttccgggacacatctctggctctgggaactgcctgactcactgaagaaactacttttcaggcactgtagggtcacccatatgcctccagctcagttgacgcttaaaaacaggtgcagaaaagctcgcgatggaaggtcttaatgagagtgtctgtctatgccaatcatgtaaaatgacgtttcttgaaaaagattcagtggttcagctttgtcagcatcatctcaacacaagcctgctggctctttttagcatctcatccaaccatgtcatcgtccagatgagaaatcttagcccaggtgaggggagtaacttgcttgaggtcacacagctggctgttggcaaagctgggattagaaccctcaacccagggtcccttcctctgcagcgcctacatggttggttgaataagtggctgcgtttcctg

SEQ ID NO: 10415 - DNA, 1191 bp, Homo sapiens
ccccggcagcccggtgaggcggcggcggaggcgtcccggcggccgagtgcccaaggaccggcccagcctgaccgtgaccccaaagcgctggaagctgcgagctcgcccaagcctaaccgtgaccccaagacgcctggggctgcgagctcggcccccgcagaagtgcagcacaccctgcggcccgctccgacttccgcccttccccagccgcgactccggccgcctcagcccggacctcagcgtgtgcggccagcccagggacggcgacgagctgggcatcagtgcctccctgttcagctctctggcctcgccctgccccgggtccccaacgccaagggacagtgtcatctcgatcggcacctccgcctgtctggttgcagcctcagccgtcccgagcggcctccacctcccagaagtctccctggaccgagcatctctcccctgctcccaggaggaagcgacaggaggagccaaggacaccaggatggtccaccaaacccgcgccagcctcaggtcagttctctttggccttatgaactcaggaacccctgaggattctgagtttcgggcagatgggaagaatatgagagagtcctgctgtaaaaggaaactggtggtgggaaatggaccagagggtccaggtctgtcaagcacaggcaagaggagggccacaggccaggactcttgtcaagagagagggcttcaagaggccgtccggagagagcatcaggaggccagtgttcccaagggccgcattgtgccaaggggaatagacaggctggagagaactagatcaagccggaagagcaaacatcaggaggcaacggaaacctctctcctccattcccaccgctttaaaaagggccaaaagctgggaaaagattcgttccccacccaggacctgactcctttacagaatgtctgcttttggaccaaaaccagggcttccttcagtttccacaagaagaaaattgtgactgatgtgtcagaggtctgcagcatctataccactgccacttctctctctggatccctcctatcagaatgttcaaaccggcctgtcatgaacagaacaagtggtgctccgtcctcttggcactcctcctctatgtatttgctaagccccttaaacactctaagtatttcaaacaaaaaggcatctgatgctgaaaaggtttatggggaatgcag

SEQ ID NO: 10416 - DNA, 1250 bp, Homo sapiens
ccagaattcctggctttgttggtgcatctcagtggcggtttactcttcccaagctgtgacggcagtgggctcgccagcatgaatttctactgcaggtggaggaggcgccagggagacaactgagggcgcgcatgaggtgtagacaggggcttattcccatcccagcacagtctctgcttctactgacggggcaaagatgtcttgtggtcagcgtcccagctggcatgcctctgcagggtttagaatatgctccttcacagactttccttttggttttacaccagcagctcaggtccatttgttccacggcctttcagcactcagcagtctcctgctacagatcagcgaagccattctggaaggaggtggtgtgcagtcaaaactgggtctttgatgtaaccaagagaaatacacactcgagtaaccttacagttttcacagacacacagagagaacccagaaaggcagctttaaagatttttacttctcggagttactggccttattagtttctctaaccctcctgcccactctcagtcactcagatcttgcaacatcttgagtgtgtcctgaatgatgaggccttttctttggagtttaagagtaagaatggatagtcaggacaggcccgtggcaggcagctgggcgtgattttaccctggacactccccacacatgtgggcacagggctgcacactttgtgtgttcctcttagtcttatgtgtaggagattttacatacatgtttgctgcttgatgataattgcagatacctcatttgtttcccactctcctctctggagagttaccaggtacccaggataatttgtggcgtcctcaggatgtagtctcctcctctggcccccttgtagtctgatcctgtgaacccctctccgttcttcagccactgccctttccagctgcatttgtacagcagcctcttcactggtctctgccctgtctccattctgcacactgcagcgggatgaacctttgttgttgttaccagcttaatttagatgtaatttgcatacagttcagccatttaaagtgtacacttgagtggcttttagtatatttacagttatgcaccagcaccgtaatcaattttaaaacactttgatcacccaaagaaaccctgagtccattagcaattctccctattccctcttccctcttagcctctggccaccactgatcttccttctctctctgtggatttgcctgttctggatagttcatataaatggg

SEQ ID NO: 10417 - DNA, 1353 bp, Homo sapiens
ctctgagctgcaaagggcatggggggctctgattaaggagaaagagcagtctcgccaaaagaagagccggttagataacttaccatctctccagattgaagttagtcgggaaagcagctctggttcagaggcagagtcctgatgcccctggggcctatggcagctgccctaaagcctgacattcttgcacagggtggggcgcgcagtaggaacctcccccgcaggagctggcgccctctcgctcctgctcacacagtcaccctccgctcttgctacttcggcaagacatcttaagaatgtgacacattttcaagggcatctctatctttcgctgcagagttgtagttctgggccctcgattcctttcccaccaccccacaggctttaccctttgagaaaaaggcagccctccagattttgtagacatttttcttaatatttttaacattgtgtcttttaaaagaaatgttttacacagttcatccaaagagcagagaactgaacttctcactattgccttggccctgacagctgttaccagcacccttttcccaagaaaagtcaattcccaggtgcttattggacatccttcgagggggaagaggagggaagcggccagctcacccttccgggaccctagtgtggggcgaatctcacggacctgacctcagaggtgcaccagtgccgcccaggtagataagagctgcagcattgactgtgcttccgttcttccctcggggattgctcatggcatgggcctcttacgtgctgtcagcttgatgtgaagatcaagttcagtgctgtgggatttttaggaacaaaaaactgtgacgtctggatttggggttgatttttgtgctggggtgggattatgggtcaatgttgaagaatttttaagtctgtattatgtttaaaacatgaatgatttgaaagtttaaatttttaatttttatatgtggaaattcttcctgttggctaaaggggaagctcaagtggtgtcgtcttttgtgctgttaaatatatattctattctttggaagaaggcagagagaggagtcttattatttttaaatgctcctagttgtatagtctgtctgttgtacatagagttcagcttgttttttggctccagtaggaaaaaaaatccatccatctgagatggggtcctgttgtttattatcactctagaagttatacattgatatttattctttctgtccccacgttgtggcacctgaagacatcttcaaaattggcagaaaagataatagttataaaaattttagttcatttatttttaaactcctttcagattattttaccattaggaggaggtagattgtttcgtcttcc

SEQ ID NO: 10418 - DNA, 1161 bp, Homo sapiens
tccccgtcctgagctcgggagatgttcagagtcacactgccgcccggtctgccacgcagaggtccaacttgccacccgcgtccctggtacctgagaccaccgacatcctcaggttcctgaccgtggcgcccttctacccagcccagtgtgcggccgccgcgctgtctgcacagctgggggcctctgagcctggtgggcttcctggactcttggcctcactccttgccccctccccacgacacccatgagccgaaaggatgtcactaaggatggctgattccccaagggcacccgctctccctccctccctgctggaggaacacgtcatatcagatgagaggaagatggcctctgatggacagaatttttctcttaactcagcttttgctactttggcaaaaactagcgaggggtagcagaaacctgcaccaaggattgtccctatgtcttggccactcctagagcgtgtgcagactgatgattttatatgtaaatcaagactcacatccctttcctagtcccccacatccaaagcccctcagcctgccttgcagaccaatgggctccatgttctgtagccccctcccctacgcctcacccctcctccctctcacaggttctgggcggccagtgagagaaacgcagtgggggaggcagggagtctggtgcctgcagagattctctgcttctttcctggggggaggtggggaggtcttagcaggagcgggccctgtacccacctgctgacctgctgtttggtagagaaataaaggttgtgtgactgggggaacggaggatcctcagcgtctgttttcctggggagtggtcccgccgtctccacctatggggcgtctgcctggggccctaccacctgcccataccacctgcccataccacctgcccacacccagtccaggaaacgctgagcaaaggtctggggttcacacatcaccaggattgctcccttggcccccaagacaaggctctggagagccacactcgagtggcaggtgcagcgcccgcagagcctcccagcttgggatgctcgctcctcacagggacggtgttgacaatttgtgcacgagttcaaggccttttgtgcattttattttatttgtttatttatgtatttatttgagacagagtctcgctctgccaccc

SEQ ID NO: 10419 - DNA, 1145 bp, Homo sapiens
cttcctcagctgacttctcttcctcctggtttcagatctatagctgtgttatgttgagagtcattactatcatactgttgagccttaacttcaactaagtcactcagatgaggctgatagattgagggggagtgaaacacgtgggcttctgaagttttatttaaggctttgccaagttgtgtctcaaaaggacagggaagtaatgacataaaaactgatacatacggtctttgttttagttaaatgaaagcaaataaaaaatatttttttatactgcctggcctgtacagaaatacttcttcactctggtattaagtacaaaatggagagtagtgaatttataggctagttatagcagatgtataagcgaatagatggaatatatgaaagctgatgccattgttcattttatcagtggtggacaaggtggatggagactctgtgcccatggagatactaaaacaagaagtcaggaatacccttctcaatggggctgccatcttctttcctaatcgacagacccgacggaaccatctcttcaccatgatggtaattattactaaaagtctggattcaatgtctgaagtctgtgaggatgaaatttgctaggctttgttacctctgaatatatcgtctgttgcaacgtcccagatgtgtattaatattatatgcagagctttgtgtgggacagatatctaaggacatggcactccactcagagtgggatgacacgtattcccaatctgtgtttcatgatcggatgtctcacaaagtgacagtgtagtctccttcatctttgtgacttgcctacaaccatcctttcttttccacattttacctttgtattataggcaaattcaaaacaaataccaaagctaactaaatagtatagtgaatgcccctgtcccccaaatgtacctgtcacctagcttcaacagtcataaattcacgctaatcttgttttacctacagtgtacctcacccccctttcctcctttccccactgaccattattatttcaaggtaacttcctgacatttgattcataaatatttcagtatatatctgtaaaactaataccaccaagtttttttgtttgtttgtttttagataggttcttgttctgttgcccaggctggagtgca

SEQ ID NO: 10420 - DNA, 3504 bp, Homo sapiens
tgctactgaggtgtcaggagtgcagctgggccgcttgacacctcgtagcagccgtctcattctctcgtcttgctgcgtcctgtctgtggagtcctcagtcactctgctgttggagagtgctggaggaaatgcacttttactgtgctgcactttttatagagctgcattgtcggtgattccaatttaaaaatccatattcaaaaataccctcacacatccctgcatcagtgattctaatgatcagctttgactggacctcagctcacacgaatctccaaggaaaaactctacagagcatcttttagagcaagagattcatacaggccaagtgatgagagggggagtcaccaaggcttcagccccaagggcatctccagcctcaggccggcaggtcctatgtccttgacacaaatgcttcttgctgaaatcctccctagtgatgctgcgagtgctgttggtcccagttctgtgtagcttgccctgccccatgaagggccaccagccaagggccctggccacgtgtgcgccaccttactttggaagtctctggcttgtgtgctggatgaggctgccagaacttgttgggcgttcatcgctgttagtacatatattaaccgtgaggtgttaaacttttcttttgaaggtttggccagtttctaaaaaatgcacatttaaagagaagcatctaccacggctttaaaacaaaacaactctgagatgaacaatatgtgttatactcagagattaacaatctcaatcatacatactgattctttcagacatttaataaccactacatttttttgcattaatgaagtttgactatatgtgtaaagggactaaatatttttgcaacagcctgttctttgttcattcttttctggatagtgtgtcctctgtattgcggtagatttatacattctgttgcctaaatatgtgtgtaaaatgagctgataaactggagtactacttaaaaaaaagtctgtgatttataagatgtatatgctttctatgtgaatataagcttgtgcacaatgtttaaaagaaaaacaatgaattagaagagatcccccgtcccccagtctgacatatttcatacagaatgtttaaaagaaaaactctgctagtcttggcaaacatttggccatgtgaggcatgtggtcagtttccattttctattacctggaaagggccataaggaagcaggcagggcttaggtagcttggttacctaagttagaaagtaagagaatcatgattcggatatgaattgaagtggttggtacatggatacctgttctttaaaaggaatgtgggagatgagtcaagggtgaggccgattgttctgcccatgccctaccataccaatttcaataacaatcttgcctgtcattgcactcagaatcttaagatcatgtttcaaatatgttgattcaaacttgcttctaagcctgagtccagggatagcaatggtactgaccagctatggactgggagaacattgagtcctgttttccattggcttcagggcgcatccatgtggatataggaaaagcctctttccacagacttaggaagccccccgaccacgcggacgctcgctgggctgcactcagcaggctgcttgagtgggagctgactccaacatgccctgccctggctgggactaggcatgcttccagcccttcccgtgctctccctgctgtcaacacttgcgtacaaacctgcctagctgttgtaagttttcatcagtagcttaagtactagtagcaaaaacttaaattcattcagaaagttgccacttctgaatgagtagagcaggaaaagtaaactttactgaaacataatttgctgcaacagtcaacattgttatgctgaatgtgctctcaactgccctttgctcatcgccagatttattatccagtgtattcctaacagtcttttgttgtcgttgtttttaaaacaaaggtacggaccatgtgctatatataaatcgaatggcttaaactaatttgctatgatcctctaacaccgaaatttcccataaacttaagtgcctacacttaggacttttgaactttcagtcatctttttcgtggtgtctcactgaacgatgtgttagaacatgtgttccatttggagttttgggcctgtgcacggtcaaccccaattaccaatttagttgaggctggattcgattgctcagttcacctgccacgttctctccaaggagtggggtctacgtgacctttagtcctctacctcagagccccgagtcatttctgaccaccccgttctgtgtcctcactcttgtccctgaatgggtccctgtgtggatctcagtgtgtgtgtggtttctccactcctccccgctcatgtcccacacctgccatattgaaccgtttctgcactaatcttctccacgggcacggagtggagggaacgtcttgggaaaggggagagcttgacctccatctaggtttcttttatctggagaaaaagaacacttttgaactatgtaatgcttcaccctgaaaggcaagctaacgctaacttcccaggtgacagtagcaggaacaaggaagggtaatgtttccatgacagacacttgcttcccttgggacaagtcccagaagaactacctgaagcaccaaagctccccaccccagcctggtggcagaggaagcaggtggcaccaactcaccaaagggacttgggagccaccttctcactctgtggaagtactttagtgagagctgactggcaagataaaaaccctgaaattcccagaagttacagatgccttaaagactttctttggaagatcattgcctgtactattccttttttgtgtggcataaataatatattaacctgttacaactgacaacattggttttctgcagctagggagtcttgagtcgagactgctcgccttgatgacttgctcttttttggcagatgtgtggagttggctgttacgacatccctgtgtgatcccagaggaggggcagtagctgggcagaaactgcaggcacacatttgggtggatcacctggcttccagccccttcggggtggtgctcagtgtggggtgatggtatcatagaggaccacggcgcttatcagcattgtttctttggagtctgtgtaatggaatgtatttttcaaatactgatatttgcattttctgtaacaattccttataataaaatgaagtaaaattgtgcatttaaagtggaaactttaataagacatttgtagttacttctaatgcagaagtaccaataagcattaaaaacaaattttagaaaactcctgacgtgaataagtttcttgaccagctgccctccagaaagtttgaattccaacatttttcaggaacatgctgttgacagcagtaaaagtagctattttatgtatgtatttttaatttttaaaagtttcagtaggtttttggggttcaggtggtgtttggttacgtgaggttctttagcggtgatttc

SEQ ID NO: 10421 - DNA, 2047 bp, Homo sapiens
tattacaaatcctatttactctcatacccttctccttagtccttcatatttctctgcctctattcttctatactgcagatttttctcacctattgtacaaagaaattgcgatgtatattttcatgtaatttgattttggaattctgtcaccttatgtagtgagttcttccaaaatataattttttttcaataattgtcaagttgttggcttttattgtattgaatgaaggctataatactgagtgccagagaagtggtttaggaaaatctcaggttgattccttatgcaaatgaacttttaatacttgaaaatcacatggccatggcagtatatgtatttggttctatctagattcttctgtgaatctaaaagcattacaggggtaaatgctttgctatttgacgtatagatcccgtcactaacaatagtacacttggatgtgattaatgtttgagcttcaatatatttcatatcatacagttttctaaaacaacttcagcaaatggtaaaatgaacatgtgcagtgttaaaggcaggccttaggctccttcatgtttgttgtgaggttgtgtgtgggaagtagtctttggcttataagggatagaacttgagacagtagcagatgggacatggtgtttgattgtgagaatcagtgagaattcgtgcatctctgctctgtggggtttggagaaatgctttggcagaagagtgaaagaactcctgccaagagcccagacctctacaaacgttgtatgtccttttttaagcagaaataaaatggttgaggatgtagtcacagtagagagtgatttttttctaagtccctgtcctctactctgaagcgttataaaaacctgtaaacattatacaaacccacaaaccttatagaaactcgtaagtgtgttgtgactggaaattgattcattagaacccagttttctttaagaactttgtgacttggttttttttttccttttccaaagactgtaaaaatagttgccccaaaatgtcagcactgcacaccctccagggacttggaatacaatcctttttacttttttttttttttttttaagaaactgggtctctctgtcacccaggctggagtgcagtggcaacgatcatagctaactgcagctttgacctcctgggctcaagtgatcctcctgcctcagcctcctgagtagctaggactacaggtgtatgccaccatgcctggctaatacaaaaaaattcttttaagagatgggatccctcccttttaaaatcagaacttgttcacatggtggttgcttgtggcaaaacggagttcaaattttgctctcctattgctataattctgctagcaatctgttgaggtgaaacttgggatctgactcttcagcaagcagcaaatgacctagtaactcagggacaactatttttgaactttaagtgccactttaatgcagttagtttgataaaaccatgtgggttttttttttagggctagctctacgggagtggaagtgagagccaggcatgagtgcgtctccacatgcttttccacctgccctgagtgtgttacatactgaaacaggcctacatagatgttacaacttcccttcctctgtcggagatgtcatctgtgcctttctcagtgttcatctgataatgtaaatttaaatgcctctacatttgatacgaaacccacattcaggtgacactgaacgaggtggcttttgtcccaccagtgcctcatcagtgtgaggcgattcctctctgctttaggaaaatgatttttccccctaaacttgtgccaaccatcaacaacatctccatagatcttatggattgtagaactgttggctgtttcctaaatttattccaagttctcgtagaggcatatagatttcagtctgtgcttgtatgggatagatgatctgagtggctttctggcctcttttttgagtttaaaatccatatgaggttgacgtgtcatactaaggtaacatgtttgtgaggttattccactagtactgtgatcacgtgggtgtcagtatcttt

SEQ ID NO: 10422 - DNA, 1219 bp, Homo sapiens
cctttccttcctttcaagggctgggtggggcctcgcatagatcagggccaggactggccaggaactcctcactctgtccggacttctgttctcccaaatcctcctggatgtaccagggcctgactccttggcccttccctctgggagttatagcttcccagcagcacgagacccagggtcacagctgcaggtccaggagaaggcttgcgtctccaaacagcaagaaaagggaaggagggagggcagccttggcacaggccccactaagccccactgctgacctgacacccctttccccaggtgccattgggacaatgaagaacccacactcccacctcgtctgggaggtgtcctacagcgtccgggaccggctgggctgccccaaagctttctgtgtgatccacggctaggcacccaccctctctggcccaggcctgctgagtggccctggcatcaagaagaggctgtgtcctcagttaccctggaaggatgtgtgtgttggagccacacggttggacaggttcccagccctaggtttgggccgcagggcccctggggccaaggaagaagacagccccaagtgggtgtccggggagagcctggcctgccaccagcttatgtgatcttgggcaagtccctgccctccctggaacgaagggccagggggctggactttcccacacaacttgctgggcaaagcacgatctgcagctttgaagactcaacagaccctggaccatacggagagcaggtggcccaggcctcagggcggcagtcccggctttgaggctcacgcgagggcctggtatgcagggaccactgctcagctgggcctcggaccttggggatattggacgcaacctggcaaatgaagctgggcgcccaagtctctgggtactccctggaggacactgtctcactgtctcgggttggctcccagcctggaggtcccagatggggactgttctgacaagctggcatcaccaggggtgaaggccctggctgcagctgtacaccacctgtgcccccaggctcaaggtctctggcaggtgcacaccagcccaactctgcagggcttctctccctgccaccaccccccaagccaggaccccactccttccccgaggctgagctgagccttttccaggggcagggcccaggagaccattcccagaatccatggggcagtagccagggctccggctgctggaggaagcag

SEQ ID NO: 10423 - DNA, 1321 bp, Homo sapiens
ggacttgggttggctctgcttggcggagcagggtggaccgagaatgttctgaccagctctcgtcctcaccacccacaggcaccacctgtgccgtgcccggcgctactgccacgacttgggtgagcgcgcaggggccctgcacgcccaggtggagcggttggtgcagcaggctggccgccagcccgactcccccaccgccctctaccacttcaacgcctctctctacctgctccgggtcttgaagggcaacactgctgagggctgcgtgcatgagacacaggagaagcagaaagctggcactgaccccagccacatgcccacgggcccgcaggtgagcagggcctggcccaggagcagccccaggcatttcacagccagggagtggaggccgggacttccccagggcccaaccctcagccttctgatgaaggtaggccaggctctgctcccatcccagggacccctctcctggcctcacccagctcgctctcccctggcctaggctgccagctgcttggacttgaacctggtgacccgggtgtactcgacagcactgagctccttcctgaccaagcgcaacagccccctcacagttcccatgttcctcagcctcttctcccggcacccggtgagtgttggggcctgccctgcttcctcatggtccctgctcagcccagcctgcacctcacagcccttgtcactccccaccaggtgctctgtcagagcctgctccccatcctggtccagcatatcacgggcccggtgcggccccgtcatcaggtgagagacttcccagctcccagcccagggcctgtctgaattaacccgcttaaccctcttctgactggatattgtgaggccccagagcgctgtcctggtgagcacgggcacagctgtccctgccccactggcttggctgtgggtacatggtctctgaagggggtggccgtgccctggcccctgccacacagtgaacacacaggagctgagggggcagggccagcctcactcccgcagccactgctgcccatctggccacacacaggatgcccctggtagtgtctgctctggtgccagggctgttgggggcaggctggaggaagatggcactaagccaataatgggcaggaattgtcccaacctgaggtcccacctctatccagctgggaggccttggtgtccccacctgcacacaaaggcacaggagcaggtagtcacagagcccagagcagcaggcagcctcacacgctgcccacagcagtgcccagcgggcccccgagccctcatgcatccctgagccgtgagcacccaacgtgccaag

SEQ ID NO: 10424 - DNA, 1859 bp, Homo sapiens
agtctgggagagaagccccgccggagccgcaccaagaccatcggtgggtccttggtcacgagagggactagagtggtggggtggggccagcggtcccctatccgggctcaacccctccctcttgcagacccccaggaacccccgtgggtagaggtgctggtggagatcttgctggccctgttggcccagcccagccacctcatgcgccaggtggcccggagcgtgtttggccacatctgctcccacctgaccccgcgtgccctgcagctaattctggatgtgagttgggacctttgggagtggaatgtgggctggggctcactgagcagcgagctgcaccaggggtgccgcttcagcctccagcctccctgccgggagcctgcggccggtgggaggggtctcaacgaggccttggcctggcctggccgcctctcctaggctccgttttcttctgggaaatggaggtctttggtcaaggctgagtggggcctggagaggagggcgggggctgcaaatgggtcagtggctggcacccctccccaggtgctgaaccccgagaccagtgaggatgagaatgaccgtgtggtggtgacggacgattctgatgagcggcggctgaagggtgcagaggtgttgccagcatgggccgggcgggggcggtggggagtgggacgatcggggaggtgtgtgacgcgcctgcctctaccacacaggacaagagcgaggaaggtgaggacaacagaagctcagagagtgaagaggagagcgagggggaggagagcgaggaggaggagcgcgacggggacgtggatcagggcttccgggaacagctgatgaccgtgctgcaggctgggaaggcgctggtgagtgggggaggtggaggggggggcggccggggagggctcgggtgtccccatgttgtgtgcctgcccgaggcctggctgaccgctgggcctctgtccctcagggtggagaggacagtgagaacgaggaggagctgggggatgaggccatgatggccctggaccagagcctcgccagcctctttgccgagcagaagctgcgtatccaggcccggcgagacgagaagaacaagctgcagaaggagaaggctctgcggcgcgacttccagatccgggtgagcctgggggcgggccgcacccacccccgcctccctgtgcgcccacccccgcctccctgtgcgcccacccccgtgttgctgacctgccctcctggctgcaggtgctggacctggtggaggtgctagtgaccaagcagcccgagaatgccctggtcctggagctgctggagccgctgctgagcatcatccggcgcagcctgcgcagcagcagctccaaacaggagcaggaccttctgcacaagacggcgcgcatcttcacgtgagcacgggggtgcagggcgggcaggtgtggccggcagcccccaggcgcaggagagccagagctctaggcttgctgtctgcacaggaaggagagagccaagcttccagcctgggcccctagctcgcaggctcactgctcagccctagaggcacacgtcacttagtgattcccacagtccttgcttcatccccgcgttctcccgacacagtgccaacagtgccctggagctggggtccatccctgcccttgacagtctcaagtggggctgtgccaacagtgccctggagctggggtccatccctgcccttgacagtctcaagtggggctgtgctggggtggagggggacagtgggtgcacctgtggcaggggacacccaacccagtcctcggaggtgtagtgtgcatgggagtttgtcaggctgggaggccttgggcagggcagaaagggaggaagag

SEQ ID NO: 10425 - DNA, 1265 bp, Homo sapiens
aaaaaaaaaaataaggggtggggggcaggtacctccaggggccagttagcgtcagtgggatgcttgtcaaaaaccccgctgcctgggaatttgagttttgttagcaactggcctctgatgactctgatacctcaccaggtggccccgtgtcaggagcaggtagaacaggatccaccaggctcaccccgcagaggaagtcacgatttcttctccctccatccttaggtctcgaaggccacattgcaggagatcctgccggaggtcctcaaagccgacttgaatataatactcagctcccctgaacagctagagctcttcctcctggcccagcagaaggtgccctccaagctcaagaagctggtgggatccgtgaacctattctcagatgagaatgtccccaggtgtgatggaggtgggcggatttgccctccctggggccaagggactgcatctggccaggcccagatttgtcgtttggcctgggggtgtcccggctgctcttgtcaccctggcccttgcctgtgaggcaagtgttccctgagtcccttgccctccgcaggctggtgaatgtgctgaagatggccgcctcctctgtgaagaaggaccgcaagctgcccgccattgctctggacctgctccgcctggcactcaaggaagacaagttcccacggttctggaaggaggtggtggaacaagggctgctgaagatgcagttctggccagccaggtgcgggcgacgcgtgtcctctctcggcccccttccctgtccgtgaagtgggctaggccactagtcctgaggttcccaccaggggcaccaagggctctgaccaggctctgtcctgcaccccctttagctacctgtgtttccgcctgctgggcgcggccctgcccctgctgaccaaggagcagctgcacctggtgatgcagggagacgtgatccgccattacggggagcacgtgtgcactgctaaggtgggtaatgcccgtgcagctcgacactgccagaaaggctagacgtggagctctccctgccaaaaaggggagcagggcacctcgggggcttggctagagctatgggtgtcccctccgtctgggtagtgagctgcctgaacccctttccctcggacaaattttttttttttgagatgaagttttgctcttgtcgcccaggctggagcgcagtggtgagatcttggctcactgcaacctccgcctcccaggttcaagcgattctcctgcctcagcctcctgagtagctgggatta

SEQ ID NO: 10426 - DNA, 1099 bp, Homo sapiens
agaaggtacatagaaggtgggactagggacctgaggcttcttgggagaagttgaagggggaagggaggttaaggtttgtgaagacgtagttgggccactctcctgaaccctcttcctcctgccacacaactcctggcagctgttacagtcttttgaagacctccccttgtgcagcatcctgcagcagatacaagaaaaatatgacctgcatcaggtgaagaaggtgagagtggggccagggaggtcagcagccccaggggtgggaggcttggggaatggggagttccagggcccctcatgcctgtgcctggaatccttttctaggcaatgctgagacctgctctctttgcaaacctgtttggagtgctcgccctctttcagtcaggtcggctggtgaaggtaagagctttggagggactgggggaatgtaggctggcttgggatgggtgggggacagtcgtgtgccctgctcataccctctgtccctctgtggggaccaggaccaggaggcactgatgaagtcggtgaagctgctgcaggccctggcccagtaccaaaaccacttgcaggagcagccccggaaggccctggtggacatcctctccgaggtatgagctccccagctgtgcgggcccaggcaacactttgttacagagacatcaagggggctcggatgagaatctggaacagcactgttccatagaaatacaaagatgtataatttgaagcgtttcagtgactttgttgaaaaggtaaaaagaaacaggtgtcatttagtaacatttagtgacatttgactttatctggtatatctaaaatattatttcagtgtgcattggtataaaaaagtgttgagatatcttacactctttttgtcaggtgtctccaaaatccagtgtgtatgttacacttaggcacacccctgttcagattagccacctttcaggcgctcagcagccctgtgtggctgtggctaccgtattgggcagtgcagctctggaactgtgcctggcacgtggcaagtatataaaacgtttgccattgttatcctggtcaaggctggccccttgtgggcctccactgccctacttgggaaggt

SEQ ID NO: 10427 - DNA, 1472 bp, Homo sapiens
ccggggaggacagttgctataagtggtgtttagaaggtgttgctataaggatagcaccggaaaaagggctggatgtttggtagatgccgagtggcacttgcctagcctgctcccgtttctcaaacagggaaacagacccagaggggaactgatgtggcccaggtcacatgggtgggtggcagcacagcctggatcccaggctccccactggctcttggccttggctgtcttgtctgcccccacctgccccacccactactactgcccagctgggatggatgagtcgcacggagctgatcaggcgcttgcactctgcatagccgggtaaatcttgtgtccccgcctcccatgcaaagatctcatcgtgatcagggctccgtagctcatcgttggcccagaaggacctggtgccactggttcctgctgcccctgcacgggtagccatgccgacctggcccagctgagaggggcagggggcgaggcactcctgaccccatcatctggtccagcctgggggaaaaggtgagggggcctaatgtcattggaaccctccatcttgacttctgtcctcagctttttgggactctgggaggagcccagtggaggtgtttgcctcccaggatcgcaggggctcagcagttggagtggggccatcccagcttttgctgtgtgacttggcccgtcactttcttcctgggggctgttttctctcaacatgattggtgttttgccagaacgggaggggatttgggggtgggcagcttttgggggtgggcagctggccctagctgatggggtctcggtgacatttgtgtctctgtagagtttggatcacgatgaggccagtgagtcggagatgagaaagacctcaaactcctgcatcatggaaaatgggcaccagccgggggcaggtagggctgacggcagaggaggggtggctgggtaggtttgggggttaagtaaggccttggtcaggtatctgtgccaggctggcccttggcctggcatcggggggactctatcctgaaccccagcagggagagaggctgccaggagagcagcgtcattcagtagaacttgtgaaacacagagggaagttgggagatctcaggaggtagtgagctctcctgtttctagaggaaagcaaatagaggctgaggagccgactagtatttattaagctggccatgaggggaagttgggaaaaatcaattctggttggagcagtaagatatccctggtaggggaggtcagagaggctggagcagtcagggaggccttcctagaggaggtgggaggagggcccagggaggctagagccctcctgggaggtcccaggcccctgtggctgccacagctgaccacccacccatgctggtcacatgttccaggtccaggcgatggaccccctgagattgcccaaaacttctcagcaccagatccccccaggcctcgtcctgtgagcctctcct

SEQ ID NO: 10428 - DNA, 1210 bp, Homo sapiens
atcaaaggaggctgtgtcgctggtacatgggctgtgccgtggacgtgggcacagctgagcccacgtgtgccaccagcatctcccctgggtgagcagagcaggtgggagcaccctccttggtggtgccaggacagcctcccctgccccagacccgcactgggagatggcagctggaggggcccccgcagcaggcctgccgtctctccgcagggggaaaggcgaggcccgggccaggctgaagcggtcgcagagcttcggcgtggccagcgccagcagcatcaagcagatcctgctcgagtggtgccgcagcaagacgctgggctaccaggtgagccccggctcccctccggctgctgggacgccccagctaaaagcttgaccaagcgtcgcccctgtccttgttctcccgcctgggcaggagcccgctgaggctggggttaaggggtaggaaccacggtaattatgccttccgagtgggtgcccagctgccctcccgcactgaccccactcaccctgttgcagcacgtggacctgcagaacttctcctccagctggagcgacggcatggccttctgcgccctggtacactccttcttccccgatgcctttgactacaactccctgagccccacgcagaggcagaagaacttcgagctggctttcaccatggccgagtgagtatggtggctcctgctggctaccagccccagcccagtccctgagcccaacttcttccccaggtggggcatgggggcgagtgggatgtcgggccgctgtctgcaaagctgaaggaccctggggccatgtggtctgtgtacctcttgtgcagatgggaagactgaggcctggagagggattttcccagagtcacacagcactcagtggtggagggggactccgttcctggggacctgccctttttgctaggtgcccagcttctgaggtgcactctgggagaccagccacagaccaggcatgaagggcagcaggacagggtcccccaaagctctgaatctgtcctctctggactgatggagagatgccgttgcttgcatgagccacagctgccagttagcaaggaactggatatgacctgggccacttaaaaggagatttttgcttccaataagattttccttcccgaaatggtgttctggcatttattgtgaaattgcctagcttcttaggtcccacctctagggtgaagatt

SEQ ID NO: 10429 - DNA, 1976 bp, Homo sapiens
gccaaagagcagccccaggaagaggccgggggtccgcttgcgattccccagccaggatgcccccaggagccttgccgtttggtgtgagcgcgctgtttgttctgtggcatgtgacggcactccccttcgagcccagctgtgttactgattaaaagtactgctgagctgtggtccgacagcactgatcacagccaagggcttggaggaaaaggaaaaattatgagagagagagagacattggtgctaagtaatgatcttcctaaagaaatgcttgtgtttatagcttccagaatgctaatctacaattttccctctggtgaattcgatacatcggctttacagggttacagtgattaccaagtgtttttttttatcaaaatacccagagttttttacttcctcacgcgattgtaggttcctctcctccctccctctgggccactgccaggaaacagagagaccgcttaatcagcagcttgacaaagaagacctcaagtcttgggaagaaacagtttaatcactcccaagtcctgggcaacagatgaccttcaagtcacctccgctctccggggagatgggaaggctctcctctcggtcccaaagtcctcctgttcttcccaggaggccccacaagtgtttggctaagcacaggctctcgggaatttaacacttttggggaaggaataggccctttgtgctgagagagagtttttattcacatcttttttaggggatttgctgcagatatttataaaaagtaactccctctgtaccactgacccatttatacataaaaaagatgtgttgaattttgcttggggtttgtcatttctgtttaggagatgggagttctgtgaataagagactttgcacaccttccaagtgaatatccactacattccacccctgttcctgcacttaaatcactggcctggaaagctgaagatggcatttgctgtcatctctgatcatctctgagtgtgcctgtctcccatctccatgttgtggaaggagcgtcaacagaaagttccccttgagatccgtcctctggatgtagaccgcagtgtttgtgataaacagtggcccaagacagcagggtttggggtggtcccgcacttggaggaagcccatcaaggaacgttggtttattttcacagctgtttggtggtaggactttcatagaaaaatcttgagattctatagagctccagccattagcttattctcagccaagaatcattgtataattgggttggattttagccatgcacttctaaaccttccctttaaggagcggatctgtgtcttcacctcatgcagccggctctcaacaccagtgcctgtgtgcctttgtggggtcccacgtgtcccttgggtggtatattggggggtgggcaggagatccctgggggtgtcaggaggaacatggcagagcctgcaggtgggtgagcagtattctccatggattggttggtccaggctgcagtcttgccctctctctcggattctcccactctggaaaccattcccttgctagctctctcgtctcttgtacgcttggggaggtgagacctattattaacaggacacataactgaaggttagggtttcaaacctgaagccaatctgggaacacaagggctctgtaaaaagcatggctatatgttactgagtcctcgcacacgttaaatggagctctcccgagttgcagacatggccgtacgctctgcgcatgaaacagagcagatcctgccagaatgcagaacaatttcttttaaactttaggaatggtgtccctcatgtctcacattcagaatgagacagactcgagtttttaaagttggttccatgatgttcttgtctgtggtctttgttgggggtggggggtgagagatcataagacagtttgtgagtttcaaacatgattttacctctaagacaaagcatgagaagaaaatccaggaaggtctcacaat

SEQ ID NO: 10430 - DNA, 1154 bp, Homo sapiens
ttttaaagcttggattgggtttgcttttagagcttttgatctcttatctcttggttcttggacttgctttgataccaaacagccctcatagtcttttgaaagaacaccttaaaaattcctaggctgggcgcggtggctcatgcctgtagtcctagcactttgggaggccgagacaggacaaatatttgagctctggagtttgagaccagcctgggcaacagagtgagactctgtctctacagaaagttttaaaattagccaggtgtagtgacacatgcttgtagtccccattacttggaaggccaaggcgggaggatggcttgagcctgggaggtcaaggcatcagtgagcgatggttgtgccactgcctggagatagagtgagaccctgtctcaaaaaagaaagaaagaaagaaagaaaaatccctaagacctgacctgcctactccctagaaagcaccaaataaggaaaagcactccggaagaatgaagctaagaaggctgtgctctctgaggcatccgggcagccttcactggagggacaaggtccaggtaggtgggatgacaagctgggaaggggccctgaaccagaggcaggtgatgtgggtggtggcaccagagagacaccagacagtgttaccgtaggtcttgactgtccaccttcattcctgaagttgatccagctttcttactgtcacgtaggtggatataaaatcgatctttagggttctgattttttgtttgtttttgttttttttgagacggagtctcactctgtcacccaggctggagtgcagtggcacaatcttggctcactgcaacctccacctcccaggttcaagcgattctcgtgcctcagcctcctgtgtagctggatgtacaggcgcccgccaccatgccaggctaatttttgtatttttagtacagacggggtttcaccatgttggtcaggctggtctcgaactcctgacctcaagtgatccgcctgccttggcctcccaaagtgctgggattacaggcatgagccactgcgcccggccggggatctgagttttaatcactcccagtgcaagcgtccttatctggtttgcagactgagtggcatttgtgctgccgaggctcttcctggcttgccctcctctctggctgttgctt

SEQ ID NO: 10431 - DNA, 1881 bp, Homo sapiens
gattgttcccaaatatataaatgcaaaattataaaatttataattttttacttacattgtctcaattaaataccgtcagtggccctatacagtagaggtacttttatgatccccattttctagttgagaagttaaatgacttggccaagataggcagtggcagagttgatgcccattttgggctgtatgcttcagaagcccttgccgtcagtctgttgggagcctaccctttacacaccattcttcttccccaggcctcagccggaccatcctcatgtgtgggcctctcatcaaggaggagactcacagggttagtggagcctcgtctccgtggagataggggaaggggcccctgctctgtacacattggggggtgtggcccagaggtgggtccattccgacctgggagtaggctctggagaagggttgggtggtcttggggatgtttccaggtgtgctctgtccttttcagagactgcatgacctggtcctccccctggtcatgggtgtacagcagggtgaggtcctaggcagctccccgtacacgagctcccgctgccgccgtgaactctactgcctgctgctggcgctgctgctggccccgtctcctcgctgcccacctcctcttgcctgtgccctgcaagccttctccctcggccagcgagaagatagccttgaggtaactgtgatgggccaagcccctctttggttcctggagtctcttgtttccaagagactcccagtatttctggtgctcacacttgccctttcttctttcctcaggtctcctctttctgctcagaagcactggtgacctgtgctgctctgacccacccccgggttcctcccctgcagcccatgggccccacctgccccacacctgctccagttccccctcctgaggccccatcgcccttcagggccccaccgttccatcctccgggccccatgccctcagtgggctccatgccctcagcaggccccatgccttcagcaggccccatgccctcagcaggccctgtgccctcggcacgccctggacctcccaccacagccaaccacctaggcctttctgtcccaggcctagtgtctgtccctccccggcttcttcctggccctgagaaccaccgggcaggctcaaatgaggaccccatccttgcccctagtgggactcccccacctactatacccccagatgaaacttttggggggagagtgcccagaccagcctttgtccactatgacaaggaggaggcatctgatgtggagatctccttggaaagtgactctgatgacagcgtggtgatcgtgcccgaggggcttccccccctgccacccccaccaccctcaggtgccacaccaccccctatagcccccactgggccaccaacagcctcccctcctgtgccagcgaaggaggagcctgaagaacttcctgcagccccagggcctctcccgccacccccacctccgccgccgcctgttcctggtcctgtgacgctccctccaccccagttggtccctgaagggactcctggtgggggaggacccccagccctggaagaggatttgacagttattaatatcaacagcagtgatgaagaggaggaggaagaggaagaagaggaagaagaagaagaggaagaagaggaagaggaggaagactttgaggaagaggaagaggatgaagaggaatattttgaagaggaagaagaggaggaagaagagtttgaggaagaatttgaggaagaagaaggtgagttagaggaagaagaagaagaggaggatgaggaggaggaagaagaactggaagaggtggaagacctggagtttggcacagcaggaggggaggtagaagaaggtgcacctccacccccaacc

SEQ ID NO: 10432 - DNA, 1116 bp, Homo sapiens
gggacctgagtctccccaaacagtgtcatcctggagtcgtcccagagagcttcctacttttgtccaaataacatcacttcctatgtgtcgtgacacaggagcacagtgtcagagtgtagcaaatgcttccttgggggagggtgaatttggggatcagctgagtcattgctgagaggcccagccatccttcttaccttccatccagggtctattttagaggataggggtttgattttgttgggagagctgagatcaggggttgggtttcttacctatgtgtacatatgtaaatggtcattccctgtttctgtctctctctggctctcactttcttcctccactctttatctctgccccttttttctccagagcttgcatggagatggtcccctgcggctgctgctgctgccctctatccaccttgaggccttggacctgctgtctgcactcatcctcgcgtgagtgggattgggctggctgtggtgaagggatagggcgtgccagaaacgagggtcaccattccttctctgccccaggtgtggaagccggctcttgcgctttgggatcctgatcggccgcctgcttccccaggtcctcaattcctggagcatcggtagagattccctctctccaggccaggagaggccttacaggtgaccatccaggaaggcaggaagggaataaagaggagaggggggtgagggggtgcaggtgggctggggcttctggcatgttgaccccccattcataactgccatctttgctcatgacacagcacggttcggaccaaggtgtatgcgatattagagctgtgggtgcaggtttgtggggcctcggcgggaatgcttcagggaggagcctctggagaggccctgctcacccacctgctcagcgacatctccccgccagctgatgcccttaaggtgaggaggcctcagctccgccttaggactcatcctgtgccctttgaccaagtgtgcctgctcaggaaacactgtctgctgtggctgtcttgccttgttgtttgcctgtggatgtgatttatgttttctctgcctccagctgcgtagcccgcgggggagccctgatgggagtttgcagactgggaagcctagc

SEQ ID NO: 10433 - DNA, 1204 bp, Homo sapiens
ctcccaagcaggaagccgaggaccagagctggcgttgaggagtcttttaccatgaaagcatgtccgtgcccggtgttgatgccccatagagggctttgcttcttgtgtctacaggaaaaagagacctgggcttagagtctgctgctgggaacggatgggatgtacatctctggctctcagagctggctcactggcctcttccttttttcctccacatccagggcaagctggcctcattttttctgtctagggtggatgccttgagccctcagctccaacaggtaaagggcagggagggagagggagagcccggggatctgagcctggattgtctcttgctgctcctcctctagcttttctgtcctgccttcatatgcccatctgtgtccttcggcctcattgtcccatctcaggtttccctcagagctctctctgatctccatctcttttgggtgtcagtggggctgggggttctgtggctgggctggattcccatctgaccaggtttctgtcctttctcccgcagttggcctgtgagtgttattcccggctgccctctttaggggctggcttttcccaaggcctgaagcacaccgagagctgggagcaggagctacacagtctgctggcctcactgcacaccctgctgggggccctgtacgagggagcagagactggtagggaccagggctgctagttagtggaacaatagtgaggaagcgtggcaggaaggaacaggaggggagcccagagacatggggcagttggtttttggggaaaatgggttagaatacaggcaggtcgtccaccagaaatgacagaggaggggatggaagaaagacagtgtacagggtagttgtgcttctgccagctcctgtgcagaatgaaggccctggggtggagatgctgctgtcctcagaagatggtgatgcccatgtccttctccagcttcggcagaggttttcgggactggcccgctgcctagggctcatgctcaggtgtgtgtgggtattggagggagcggaggcgtggagcaggagggattgatgagggagtgtcgccttcatcaggagaaaggagatgaaggtgggtgtgggagttatgccagggagcctgctctgaaggtctccctgctctgattctctttagctctgagtttggagctcccgtgtccgtccctgtgcaggaaatcctggatttcatc

SEQ ID NO: 10434 - DNA, 1136 bp, Homo sapiens
cccaccccaagccctcagagggagggcctgaagcagggccagtggaggaaaactggcccttccagcacccacccccacaccccctcttcccgtccccccagccgctccggagacagatgtccctgtggacaccaacctcattgaatttgataccaagtaagaaactcattcccctacttgaccctcttgggacaaagattcctataacattcaaatctgccctcatacctcttccttgcttttggtggggagaagcggattgtagcatcaaatcaagatgccttagccttgtgaggctgcctcttgctgccttttctttgtcccttcctgtaaatacctctggtcccactgctgttcgaacgcctctgtcccagaggcctagcttcggggagggcagggagtgggaggctgggacaagagtcagaagccctcacctcacaaccctctttcccaccaccaagctatgccacagatgatgacattgtgtttgaggactttgcccggcttcggctgaaggggatgaaggatgacgactatgatgatcaactctgctaggaagcggggtgggaagaagggaggggatggggttgggagaggtgagggcaggattaagatccccactgtcaatgggggattgtcccagcccctcttcccttcccctcacctggaagcttcttcaaccaatcccttcacactctctcccccatccccccaagatacacactggaccctctcttgctgaatgtgggcattaattttttgactgcagctctgcttctccagccccgccgtgggtggcaagctgtgttcatacctaaattttctggaaggggacagtgaaaagaggagtgacaggagggaaagggggagacaaaactcctactctcaacctcacaccaacacctcccattatcactctctctgcccccattccttcaagaggagaccctttggggacaaggccgtttctttgtttctgagcataaagaagaaaataaatcttttactaagcatgagtgtgtgttttctctgtagtgtttagagagtgtatggtgtgcttatccatgattctgttagcttgtgggggaggacccagtctctcttctgcacccaaaagccacctgacacggaggcta

SEQ ID NO: 10435 - DNA, 1203 bp, Homo sapiens
taatgctagaactacagaactttgtcactggaaacttggcctgacctccaggccacgaggtcccaaatccttatatcctgagaagagggacaggattgagaaggttctgaaatcgtcgcagggaccactaccattactaatttttacggtgtgccagatactctgcattactttatctaatcctcaacaactctaggaagtagttattgtcacccccattttacagacaagattaacataagttaaatgatttatttacccagctaccagatggcctaacaaattcaaactcagggaagaaatgagacgagacctgatgcctggttggagttagggtaaaggagatggtgctccattgatagtctgtcttgtaggtggccacagggcagccccatgagggctccagctactcttcgaggaaggactgtcagatggctctgaagcgagtggactatgcccgcctcaagctcagtgatgtggctcgaacctgtgagcagatgctggagaactaggccagggagatggacccagagctgagagggagaccatcacctgtgccatgggacagaacctgggaacatgtagggtggggagtatgagcaccaacataccctgctggtcaaagtaccctaggacaaaggggcaaatggtgggcatggaaaaactgaagcccgagcctgcccacagctatgctttggcctctccagcagggtgctcctgctctgcactccagaaacaccctgacaggctcagagaggagatggaaactgacatacccaacccacttcctcaaacacttcatgctgctgccccagccttcccgcagacttggcctaatgaaaatacatacttcttcattcggagagacaaaacaagaactagagttttaatgataataaaagcaataataataaaagcaataacaataaaaacaagatcagactctcactggggtaggcaagggactgaggaggtgaaaccaacccgtatggtgtcccagcacggcacctgctaaggagggagggtgggaaagcccaggccttcgctgcgggtacaggaggatgcaggagagggctgaggtgggggaggaacaactggtgtactgggagagagatttgggacgagggggaaccatcagcaaaaaatgaagccaggaatcacagtaagggcgcaagggctgaggccagttgtttccataaagaa

SEQ ID NO: 10436 - DNA, 2186 bp, Homo sapiens
caccttcaaaagttttccaactttcccggaaagcccccaggggtctgcttcctcatctcagagcagagatacctggagctaaactctaggttacttggagacccaggcgtccgggccctaacagctcctgcagaacctttgaccaaataagggcaaagttgcttctcttgcctcgcccgcccccctcccttcccctctccgcttctgcttttcctgaaggagagttctgagcatccaaaggctcctcacttacctcactgactccctttatttcctgggtttactttccccattaacactgacatctaaatctctagaggagtatgtcatcccttcctccctggttccatattctaagtttcagaatcatgatctttttctgcactaacgtcccacagtcctcagagtttctcacagttcattgatgtgtactgagtatataatttatacttagcccccacggcggggtggttctcagaagtggaagacaggtgggtctttggagaacacggtgggaatcttggtgcactgactaacttgatgggcgcttggttcctcttccagccagctgaggtgggtgtcctggttggcaaagaccggtcaagtttttacgtgaatgggctgacacttgggggccagaaatgttcggtgatccgggactcactgctgcaggatggggaatttagcatggatcttcgtaccaagagcaccggtggggcccccaccttcaatgtcactgtcaccaagactgacaagagtgagttcctgagtcttacccttcctttagctccaagatctctaatgtaccgccttctggtaatcttgagggtgcttttttgtgtgattccccaacatgaagggagtcagaccagtattgtgttccttgtctgctggatgctggaacacgggatagtccctccattctgtctcagttcctcatcttgtaattcgaagttgctgaactgcattacctcttaaattacttactgccttgagctcggattagaaactgttttctaggagtataggtagattgttggggtcttgaatcatcgagttcatcgtttgagttcttttgttagaacctggaggtggcatgcacatccacagccctttctagcctgaacacatgaatcaacagtctatgagcctttgacccctaagtttttagtctgttcctctccagcgtttaagcttgattttcctcttttgaaaagccttattgtttcagggtgactgacagcctgcctgtgtgtggtgggggggcgggttgggagagatgaggttgggttacagcccccagggctggacagctgctgaacagctggcagggggtggaattgtgacacctggatcctagcctcctttctctttcctcctcctccagcgctagtcctgctgatgggcaaagaaggtgtccacggtggtttgatcaacaagaaatgttatgaaatggcctcccaccttcggcgttcccagtactgacctcgtctgtcccttccccttcaccgctccccacagctttgcacccctttcctccccatacacacacaaaccattttattttttgggccattaccccataccccttattgctgccaaaaccacatgggctgggggccagggctggatggacagacacctccccctacccatatccctcccgtgtgtggttggaaaacttttgttttttggggttttttttttctgaataaaaaagattctactaacaaggtgctgtgtgatttgagcttgggtgtcagaatgggggataggcactgtgacttgcctcctttatcgtggcttgggagcagggaggttgaggtactacaaggtgcaggaatttgagcttctggccaggtggccctgcccctccacagtggcatttccaggcctaagtcctcagtgtgctggtcaaattggtggatgatggaatagagccatctggaccagagaatgggtgcaggcctgcaggcaaggcagggctagttgagtcatccttgtgggtggggctcccccttctgagtcatagcaaatgccggctggggctgtccccatgactataggttagtgtctctcagcattcccttgctccttatggctaaaggggtgattccaccaaagggttaagttcacctgtgtgagaatgatcttacccttccttagtccacaaagaaacaatttta

SEQ ID NO: 10437 - DNA, 1105 bp, Homo sapiens
gctaattcctcctgctttctccttccttccttcttctggctcactccctgccccgataccaaagtctggtttatattcagtgcaaattggagcaaaccctacccttcacctctctcccgccaccccccatccttctgcattgctttccatcgaactctgcaaattttgcaatagggggagggatttttaaaattgcatttgcaaagttcggtgtctgggctggcgagtgggggagggagggaatggggagtaggccccgcccctaccgtcctttgcaaataaaaatctagcggggcggggggggggaggagcaggaagtggcggtgcgagggctgctgcacagcgagcggagccgcggtccggacggcagcgcgtgccccgagctctccgcctccccccgcccgccagccgaggcagctcgagcccagtccgcggccccagcagcagcgccgagagcagccccagtagcagcgccatggccgggtggaacgcctacatcgacaacctcatggcggacgggacctgtcaggacgcggccatcgtgggctacaaggactcgccctccgtctgggccgccgtccccgggaaaacgttcgtcaacatcacggtactgcgaggcctgcgcggtccggggcactgctccggtttggaccctgagggagggacttgggtgggggcgggcgcggtctagggcgcgcagcgagaggccctgactgggtgcttgccctggaagcggcgcgaatggcggctgcacgtgagtgggtccctcagttgcccgtaggtcctatgccccaggcggcggcgcccatcccgcccgctaccccgctttccgcgacggggcgttacatccggggcacagggcggggaggggcgcggcgcccggtgcggcggcccacttccgcctctcccagggcggggcggggacgcgcctcagtttttactggggattgggattgagaggggacccggggatccttggacccccagctccccgtccggctgccagcccgcgtccctctaccattgtttctcctggtgcggaagggagccccaggcgcgtggtcttggtcccttgcccaccctctgtgggcttctggcccctcct

SEQ ID NO: 10438 - DNA, 1205 bp, Homo sapiens
gagggggaataaagggtaggggtagagaacagacatttctgatgcctcccagtggctacaatcagtattacacctctggtttatagggacgtcccaggaaatacttttaagggcctcaaggtagagaaggtgcggaatgatgtgtcttatctcctctccctcctactcctctccactccaggttctgggagccttacccacaaatgcagcagcacgaaacaccgcatcatctctcccaaagtggagccccgagctttaaccctgacctctatcccccacgctcaccccccagagcctcctccactgatagccccacttcccccagagctccccaaggcacacacctccccatcttcttcctcttcttcctcctcatcaggttttgcagagcccctagaaatcagacctagccctcccacttctcgagggggttcttcaagaggaggcactgctatcctcctcctgacaggactggagcagcgggctggaggcttgacgcccaccaggcacttggctccacaggctgatcctaggccttccatgagtttggcagtggttgtaggcactgagccttctgccccaccagctcctcccagtcctgcctttgaccctgatcgttttctcaacagcccccagaggggccagacatatggaggggggcagggagtaagcccagacttccccgaggcagaggccgctcataccccctgttctgccctagagcctgctgctgccctggagccccaggcagctgctcggggtcccccaccacagtcagtagcaggtgggagaagaggaaactgcttcttcatccaagatgatgacagtggggaggagctcaagggtcacggggctgccccacccataccttcaccccctccctcacccccaccctcacctgcccccttggagccgtcaagcagggtaggaagaggagaggccttgtttggaggacctgttggggccagtgaactggagcccttcagtctttcatcattcccagaccttatgggagaactcatcagtgacgaagctccaagcatccctgctccgaccccccagctgtctcctgctcttagcaccatcacagacttctccccagagtggtcctacccagaggtgagactcaggcttacctcctccctcctccctcctatttgtcttctgactccccaaaacaaattgtattaactcttaccccgtgg

SEQ ID NO: 10439 - DNA, 1137 bp, Homo sapiens
ataaggccccagccccactgctcatctatgactcagggtggctgggattcaaaaggggtggggaataggtgggggcgagggtgggggaagggttgaagaggaactggtggaaagattgggattcctgcaaagggactgaacagaggaagagttggggagcagactagccctccccccaccccagcctgtctcctggcagtgtctctatggctgctacgttcactcttccatcgtccccacattccatcggcgctgctactggctgctccaggtaaggacggaagagcccagggagccaccctcttcctgactctttgagggacacgggtctgaaagaaggaagtgaaaggatggctgagttctgagtgaggaaaggagcctgggaagaagagaaaggggcttggggatggagagagtcagaaattgggggcgaggttaggagggtgcccaggaagaaagtgaggattaggaagccaagcccctggacctcaggaccccatggctctgtgtgtccccttatactctcagaaccctgacatcgtccttgtgcactacctgaacgtcccagccctggaggactgtggaaagggctgcagccccatcttttgttccatcagcagcgaccgtcgagagtggctgaagtggtcccgggaggagttgttgggacagctgaagcccatgtgtaaggcagcagggtggggatagagctccaaggggagagtagaaacagggctcccagaggggccatggttctggacccaaagcctgagggctgatcatctccctccaagctgggagggtgctaggattcccggtgtgttctcaggtattagaatacggagaaaggactaaagcaacatatctgagcagtcttgaggctgctggcctctgttcacctggccagaagtcttgaagcatgtcaggtgcttggaggagccatcaaggtactctggggcctgtttcgtggggatcccacagcacttccccctaacttctctagttcatggcatcaagtggagctgcgggaatggaacagaagagttctctgtagaacacctggtgcagcagattttggacacccacccaaccaagcctgctccccgaacccacgcctgtctctgcagtggggggcttggt

SEQ ID NO: 10440 - DNA, 1160 bp, Homo sapiens
tggtggtcactctggagccttgtgaaggagctgagacatatgtgaatgggaagcttgtgacggagccgctggtgctgaagtcaggtagaagatgtgtcgcagattgagggttctggggcgtggctgtgtgtaggaagtctcaagggaggtccttctgggtgcatcctagaggaggaccctgaaatacatcagaaatagcacggggatataaagaaggaactgggaagtgaaggtcaaggagtcaggtcttggtttctctttccgccccagggaacaggaagaggatgccaagctcttgcaattccctttggttgacaagaatggggttggtccctgggtgtcagccaggggagcataggctccaactgccttcagacttggggtgatgaaggggagggtgtcacagcccctgtgccagattctctatgccttgggtgtagggatggatttggtgctgatgggaagcgagtttacttttccctcctcccatctctagggaataggattgtgatgggcaagaaccacgttttccgcttcaaccacccggagcaggcaaggctggaacgggaacgaggggtccccccacccccaggaccgccctctgagccagtcgactggaactttgcccagaaggaactgctggagcagcaaggcatcgacataaagctggaaatggagaagaggtgcgagggggttacccacgtgccccatggccgtctaggccgtccctcccgggcctctgggcccgtgtcctcctcttgtcagatactcaccaaggttgctcttccttccctccctgtccaatcccaggctgcaggatctggagaatcagtaccggaaagaaaaggaagaagccgatcttctgctggagcagcagcgactggtgaggggcagcaggggctggggatgggctgatgggcagatgagccgcaagcctgagtccgagtgcagtgctcaccgctgagccagagtgggaaatgggcatgggggtaaggggaagggtccaagaggaaaaagccaggagagagatgtgactacaggaagaatccattgtgaggaaggaaggaagattcctccagttgaccaggccttcccatactccagtttctcgtgccaagtttatgattttcaccatatccaagtaccacctgtgttggtat

SEQ ID NO: 10441 - DNA, 1182 bp, Homo sapiens
aaccctgtctctactaaaaataataataaaaaaaaaattagctgggtatggtggcaggcgcctgtagtcccagttactcgggaggctgaggcaggagaatggtgtgaacctgggaggtggagcttgcagtgagcggagatcgtggcactgcactccagcctgggtgacagagcgagactccgtctcaaaaaaaaaaatttatttattatgtgtatttccttttatatatgggatattttcttaattgattaagaagtcaaatttgttttagtgaatcaattttcccatttactcccgaattctaaatggaatatttgggaaaactcagttataccttgacattcaaagtaatgcactatttgaaagttagacattagttcagttttgcgaatattaatatagtgtctggtcaagttacttgttataataatttttagcaaatggaagggttagagtttcttagaaaagcagtaaatgaataagtcgtagcatttaattctttttaaccataggcccaagaggatgctgagaaacttcggtccgttgtgatgccaatggaaaaggaaattgcagctttgaaggataaactgacagaggctgaagacaaaattaaagagctggaggcctcaaaggttatgaaacattgtaatccatttgcttgaaacccaagtttctgccccaatgccatgaacaaaattagaatcagtaatagggaaaaaaacctgtaatttagactatgcatcttaagaatctttctttaaaatgcaaaaaactgccgggcgaggtggctcacgcctgtaatcccagcactttgggaggctgaggcgggcggatcacctgaggttgggagttggagaccagtctgaccaacatggagaaaccccatctctactaaaaatacaaattaaccaggcatggtggcgcatgcctgtaatcccggctgctcccagcctcgggaggctgaggcaggagaatcgcttgaagcccggtggcggaggttgcagtgagctgagattgtgcctttgcactccggcctgggcaacaggagcgaaattctgtctcaataataaaaaataaatttaaatgcaaaaaactgctttgagatggttttgctcttatggacatttaaaataatcacaataatgatgttttatcacaagtggctgctttgtcacaaagtta

SEQ ID NO: 10442 - DNA, 1246 bp, Homo sapiens
tgggagctcactaggactctgctttttttttttttgtttttgtttttgtttgttttttttgagagggggtctcgctctattgccaggctggagtgcaggggggatctcagctcactgcaacttccgaccccctggttcaagtgattcttctccctcagcctgccgagtagctgggattacagggacacgccaccacccccagctattttttgtatttttagtagagatggggtttcaccatgttgcctaggatggtctcaaactcctgacttcatgatccacctgcctcagcctcccaaagtgttgggattacaggtgtgagccaccgcgctcggccaggactctgtttttgtatatctgcacaggtctgcccaactcttaaagggacactacctaatctcttccaccctgccccttccgcctaaggcctaaaagtgattttaagtacatggcaagtactttatgatatggagatctcagggagataaaaggttgattgttgcctccagtagaataaaggcttaatggaatgttatattaatcagaatttgtgtccttcagtgcatattactcatttcttgtcataaatttgttgaattaaggttaataagttcccagaaattaagctttggtagatttggtatgctgagattgataaatcttcagtactttttcaagtgcagtgtttaataatgggcaccttgatagcagttaggaaataatgtagaaattcatgagagtgggcttgtcaaagtctacgtaagaaagatacttttccctcatatttccaaattgttctttggttgttatgaagattgttcccttagccttcaaaataacttcaagccaattagaatgatggtttaatattttcaaatgtcattgctattgagttccttcatacactgtgtgctttacgcatagatgtttcaaaggtaaatttctaaatgtatttgcaaaactaatgtagttggcccctgatagtgtggtgtaggaatggttttcataaacatttcagtagactgttttaaagcctggctaaaaattagtcagaaaaagaagtgggaaaagggtgttcatggagagaaaaaatatacaaagaacagagttaggaaagaaaatgatgtattgtaggaagtatgagtagttatgtggctgggcacagggggtgactgttacgaaataatgggaatgtaagctacaagggaaagccatgaagacatcacttagggaggggtgatgattg

SEQ ID NO: 10443 - DNA, 1209 bp, Homo sapiens
aagcaagcaagccaggtgtgatggcaggcacctgtaatctcagctactcgggaggctgagacaggagaatcacttgaacccgggaggtggagactacagtgagccgagatcacaccattgcactctggcctgggctggcctggatgatgagcaaaactctcccccccaaaaaaaaatcccagtccgttacacggtagctttggggaattatttttaaaatttttaattgttcttgctgtctccctttgaagtgactagtactctggtgagttaatctgctacatctcagctaaaccagtcaaagttcagaaaatctaggcaggagccacctgtagttatctcaccattgtttctccaggtgcagttagagcggatccggcaagctgactccttggagagaatccgggcaattctgaatgatactaaactgacagacattaaccagcttcctgagacatgacaccctcatggcaggattctagcctgcactttgggtttttaactcatctttagagcaacagtaattattatttaactcttaactgaagaaagagaagtcacaacaaaaggaagactggagaaatgcttacttctagagggagaagactgtgcggcacaggaaacagcaaacagtggggtgatctgcagcccagagaccttcaaatgcgaacactataaactccaggcttgattccaacaggcgtgggatcagatttggtgatggaaaaagcgctgtttccttgcctgctttctccaagacagattttcggaacacatttccctaccctaaagcgacatcccagtagtgtttggaattttctgttcatatagtgtttggaattttctgttcatagatattggaagagagaatttgctttatctgttgtctagagctcatcagtaacagtattcagttagcagacagaagtgtagtatgctgtatgaatattttatattaaaatatgaaggtttgagagcaggccattggctactgactgtattttgttttccttttaccattttatcttatcttgctttggaggaccttaaatgctactgaaacttacctgagaaccataggactgtggcaaacaaaaccaattcatgaagtgaattaatgatgaggatctgaaaacttggctggggctatatatactggaagttgaaggttaaaggaaaagcacaagaaactttggaagcactttttct

SEQ ID NO: 10444 - DNA, 1778 bp, Homo sapiens
tttgttcacataacgccaccatcaacttaaagtgaattgtctttgttataaatgaggtcactatggacttaccctaaagatcttctgtacttctctcttccataggacaaatgataagtactacatacctcatctcttgggttattattgtagtcttgcattcatggttatgaatttaaaaataaataccaattatggaaatagtactaaaggcttgccgcacatgaaacattattttaattggtttaaagtccctttataaagagtgctacatggtttagataaaggaaacatataactattgagttacaggggattttattaattataaaatgcaatcaatttaaattacgtaggtttaagactagtcccttggataagccccaagcgaatttgtcttcagattattaaaattagtgctgtaaatcagggtgggcaattcacagcctttctgaactgactgaactagagcttgcagtgaagtgttctgctgagactgagcaccttacagatatttttctccagaagatggtgctgggtaataaaatcatcacaattagggaatggttagtggtctctactgtggcaaatgccaactgttggaattcactttattgtagaaaaacccaaactgagactcttaagttttgtttagcaatgtgtttctggtatgaaacaaactactgtgtcactgtccaggtaggaaacaattctttcaactgggttttcagcataaatgggaactgatgtagaaggcaggatttagcccttctaggcaaaagaaaagctcagttgggtttcacgagtgttcctgtgcttatattcagtctgtgcctacatgttctcatgcatgtctaacctgatttacctcttacctgtaacctaccttatcatgtggcttttaattgacagtcactcagccatttctaagcagatatagtagtacctttcagaactcacattggcaagtgtaaaaagatgacttaaggtgaagtgaggacaaaatcacattctgcatactaacctatttttttctccctttaaggtgctaaacttgcacctcatgtccactcagtaacaagtattgggacgtagagcacagcctcactcagctctgaaaggtaatacagcttgtgaggaagtgagccagcagtggcctttgcaattgtggatcttgagctctgctctcagcagatttcaggtgtaaccatttgttaactgtactgaaggtgtgtcctcaagaagaaagtgttcaaattaaaaaagctgctgccaagtacactgtgtggtcttctcctttgaatcctagggttctatccctcttcagagtcatgtttctggtgctgctactttaaaacacagctcacaagaataactaacttgctcaaatatggagaaaactcaatagggttcagggaggttctggcagtgtgcagtgtgaaataatcctgagtccttgctgaacacaactgtaggcttgagttataaagcacattccaaattttaaataaaagcatttactcaattattataaaacaacatatttaaaaagatgaaccacaccaaaggtcatcaaaacacctttttataaattagataattctacctgttttacaatatgggtttaagccttcaatggtgttcagttcaggtgtgagtcagctcctggtggtgtcagaagtttacatgattgcggatatcattgatttgcttcaccatttcccttatatgttcacccctgtaaaattgtaaagtcactcacttttggaattataata

SEQ ID NO: 10445 - DNA, 1312 bp, Homo sapiens
ccctggggaacagtgtgtcccttgggaacttcctgtccctattttagcagaaatttaaacacttttctagcttagaccagcccagcagggggagagaggtggggagtgagggaagagggttaaaacctgatgagtttcatgctgtcagtggccccctttcttcccctgagtctagcttgtcctggagaacccttcagtttcccaatattgtttcttctcaggttggacaagaagacgaggctgagagtgacatcttctctatcagggaagttagctttcagtccactggcgagtctgaatggaaggatactaattatacactcaacacagattccttggactgggtgagtgcttgataaggtgggggaaccttttgggccttggaaggaagggtcctagttcaaggggagaaaaaagcattttaatgttcattacagatttttttttaactagtaaatattgttctttgcaggccttatatgaccacctaatggatttccttgccgaccgaggggtggacaacacttttgcagatgagctggtggagctcagcacagccctggagcaccaggagtacattacttttcttgaagacctcaagagttttgtcaagagccagtagagcagacagatgctgaaagccatagtttcatggcaggctttggccagtgaacaaatcctactctgaagctagacatgtgctttgaaatgattatcatcctaatatcatgggggaaaaaataccaaatttaaattatatgttttgtgttctcatttattatcatttttttctgtacaaatctattatttctagatttttgtataacatgatagacataaaattggtttatctcctccaaggcagtttgtctttttctattcctcccccttcaacctgcgtcacaaaagaccaagaacagatgtcggaaaagtttttttttcttcagtattgtttaaaagtttcaatacaaaataagttataaataaaaggcttgtatgtacaaggctcctcagagggaatgagttgtcttcaaccccatagaatgatgtgagtccaagctggctctagaggatcacagcccaagtatcacaggcctaggtttaaacaggaaaataattagcttaaattgtattctagtcatgaaagatatctgataaaagttgtaatcaatgagaattctacacattagatgaggtctcctgagtccagtttcaattagttcagtagtgtagtttgtcatgatgaccgcccctctttggcattgctggacctctgtcctgcagccttcaaacaactgccctgggaaccatc

SEQ ID NO: 10446 - DNA, 1198 bp, Homo sapiens
tcagaaatgtggaaggagattagagtcctgctttggggcaggtaaaaggagggcaggagaaggggagagtctgtttcctgaggcctaacacacccaacattatcacagaacattgtaacaagggctataggagttacgacccaggaactgtggatgaaaaccaatacatatatatatcataacaccacagcctcctagaggaaagtgaccgtggaagggtctggtgagagctggcgggagacaagagtgcattccacgcagcccaaaagccttgcgtgctttgagaacagcaggtggaaagtgggtaagcggccactagagggaattaaacagcttcggacagcggactcggcagcgcagcaagaaagctccggaatccggattcgaggcttcccgggctgcaccggagtctccagcagagggcgcgattccgcccgctggccttaggtcgtcagagcgccggcgcgggaagcgcttccgggcaggggcggggcttccggcggcgcctcaggtcgcggggcgcctaggcctgggttgtcctttgcatctgcacgtgttcgcagtcgtttccgcgatgctgcctctgctgcgctgcgtgccccgtgtgctgggctcctccgtcgccggcctccgcgctgccgcgcccgcctcgcctttccggcagctcctgcagccggcaccccggctgtgcacccggcccttcgggctgctcagcgtgcgcgcaggttccgagcggcggccgggcctcctgcggcctcgcggaccctgcgcctgtggctgtggctgcggctcgctgcacaccgacggtgaggtttagcgggccgggggtgtggtttgcgttcaacagagggaaaacgtagaccaggaatagggcctgcaaccgacctctgaggtctgggacatttttccattgattggcaaccagcgggctaaacccacgtatgatcatatttcccccacctcccctatccagcagtttcgttttcttttggtagggggtgaataaaattaaatactagggtacctttttccttagtcttattctatcgaaagtggacctttgggaaggcccatggtcgtggttgaaaatagcatagttatatcgtttggcaagtggaagaggattggaaattctcctggtttatagcggaaagtggtaatgcgttcattgttggaaatcacttttccagaatcaggc

SEQ ID NO: 10447 - DNA, 1185 bp, Homo sapiens
gacctgctggacaaattctaaaagagctagagctgtaacacttattcttgcatcttattaattttctatgatattttttccttcttcgtagggacttgggacaatctggctttgctgctttctaactgctaggcacctctctctaaccctcattgtcagagggaattggaggatatccacagtctgttcctgttctgatattctgagcagagaaaaggcactaacggttcctcttagctatttaattatcagaagcaagtaatctttccccagataatattttgccctagaagaagccgtgatttagctcttttattgtgcttacttggtccaaatacatctgtggggtgttttgtcatttcttaatgaatgaatcatagttataaccaggggccaagctgcccaagaggctcttcagagatcatggatgctctctttctggaagctgtggcctgatggagcagccccattccagggtcccatctgtccggagttgtgtatgtcaagtccggctcagtctttatttccaacactagccgtggtcctgtgcagtcaagctctcagctagtgtttagggctgtctgtcagaaatggttatacgtgggcaaaagaagatctgacagctcctatataccttatcttactgaattcttaaactttgaaccagttcttccacttactgacttgttaccactgctgactttctgaaaagttttccagtttttgttttttgttttttgttttccagtaggggattagaatgtttagtcctacttagtaagaaaaatattgtatttttaatcattcatagtgctggtaaaaaaaaaaaaaaaaaaaaaaaaattggggggtggccgggcgcagtggctcacacctgtaatcccagcactttgggaggccaaggcgggcggatcacctcatgcctgtaatcccagcattgggatgggaggctgaggtgggtggattgcttgagaagttcaagaccagcctggccaacatggcaaaaccccgtctctactaaaaatagaaaacttagctgggcatggtggcacacgcctgtaatcccagctaccggggaggctgaggcacaagaattgcttgaacttgggaggcagagtttgtagtgagccaagatcacgccactgcattccagcctggccgacagtgtgagacggtctcagaaaa

SEQ ID NO: 10448 - DNA, 1270 bp, Homo sapiens
tctggtccgtgctcctccagctgggccttcttcccctgaccttgctgatccttggtgaccacctccgaatgtcagaatccacatcgttaggctcacaatgtgggctgcttttgccccagtgggtccagttgccccaacacgctgtgtagtgctgaccagtgtttacgtgtggggtcggctccattcctcgctttctcccgaaacagatgtcaatgccaatcgcatcatcccgaggagacgtggagagtgtccgccgctgcctggctcacagcctcttcatgagcaccgccgagcttcagccagatggcacctatgccaccacggacacccaccagccagtggccatccacccgtcgtctgtcctcttccactgcaagccggcctgcgtcgtgtacactgagctgctctacaccaacaagtgctacatgcgggacctctgcgtcatagatgcacagtggctgtacgaggctgcccctgagtactttaggaggaagctgagaaccgccagaaactgagccgccccaggatgccgccagaatcactggtccctgggagcttggactacagttgtccttacagcaggcttccaggttggcgcttagagaagccttggaatcagctgaaggtgcctgacttccaggagcgtgaaagcatctttgctcaactcctgggactgaaccatatagacatggacatatcatttgtacctggaaacctcaaaattatgcttttggttcttactgggtgactttgacttaatttaacacctgagcctcagttttctcatctgccaaatgggagtaataataataatccttataaaattgggttcataaagtttagagaaaaggaatggaaagtacccagaactatgcctggagcacgcacgacacacgtacagtgagttgggagccgttaggctgaatgttactgcttgccatatgatgtgaagtacagcaatatcccaagttcttgtgactgagggagattttctggaagggccacaggaggttgcggagcttggatgttgcccttagttcttgtttaatgtctctctgaatgcagttttaaaatagaaaacaaaactgacttctgtagaagtttccagagggaggtgctgttatctcgtacctcctgggatggcgatccctactgaacgcttgtgtctcagggtggaccactctgtgtctgtctccaagcagagaccagtaaaggagcctcctggtcctcagtgcgtgaccctgtcagtgctttcaggagacatgtaagc

SEQ ID NO: 10449 - DNA, 1212 bp, Homo sapiens
ggtagctttccagaatgtgacattgtcctcagaaagatagacataggcttaaacataatggacatcctaaataggaattttcagattgtttttgaagtgaaaagtgttttaatgtctttaaatggaattgcataactaatggtatttaagtattttacatgttgctaataactttgaatatgattgttgcaattttatggaacctgggtctatgggactgctttttaagcagtttaaaaaaggttttcaaagtttaaaagccaatcttagcatgtataatccttatgggattcttaagttttatcctatcttgtttttgctcaagaacgctttatcagtgacgtttgttagaattttgttttttgttttttttttttaaattgtttttgggctagaaatgagtttctctagttttatttgttctccctgagttggagttatgcaatgaatggcatttttgtggtaaaatactaatcctaaaatctgttaactcactgttcatttaagtagggaatatctgtatacattaatgactaggtaaaacaggaaatacattttgaatatacagcctaaaggcaggcagttacagggtttttgatttctccgattttatagggtgcaagttcccagtggcaggatgccctgctgtgtgactgactacactgtgtcctgagcagtggtaatttcaatcacctctcatcagtttggccagccctacaaccaccattcctagccctgtgttgcttgacaggatacctgtgcttgaatggacataaggaaaagtccttactttctccccaatttacctctcaatcttagttcttccagaacacacttccctttcacaatgcaaataaactgaaagtgagatttgatacatggaattttgagaccaaccaactaaccttacacataatttgagggattcctggattcttctagtgatactgaaaagcacacttgactaaagcatagtgttttttgtttgttatggaaatacggtatacgttcatttaaaaataaatggacatacaaattgcatctccttaggagatacattttatatacatttcggtgcgtttttttccagtatggatttctatttgtttctctcttcctcttgttttttctgtgtcactcttgtatgtcctcatatctttcatacctcttgtgtagtctctagaagcagaacacctaagtcctgggtctgga

SEQ ID NO: 10450 - DNA, 1200 bp, Homo sapiens
gacggggctgcccagggagtatgtgcccagatgataggcctggcccacgccgccgcccccgctgagtgacgcaatcgcaccacggggctgcgctccccactctgatgctcaggcccgtggcctcactgggacgaacggtgggtggggggctcaccctggtgctgcctcccgcacaaggagacctggacacaacagacacacatcacaaggcgaacacaaatggacacacatacctggccacgaacccacacctcctcagacactcagacaccactccaggctcatagccccgtcttgatgcagagaagccacccacgtggggtgtgccaggcacccccagatacaaatgcagccacgcacagacgtaacacacaggtgccaggccgtgtgctcctggaggctggctggctgtctctctcacacagatacacgtgcgctccctgggatccgggaggccctgggcttcctgtgtgtagccctggcatagacttgctcgtcagggtgttcgactctgggatgctgggccgggcagacatttatgctctgagcagcaaggaccattgggatggaggtgggcacaaagactgctgcttccagggtgtgcggccctggccgtgtgtctgacatcccataaatgtgtgtgtggtgtgactacgggcaccacaaactccgcagccttgcctctcttttctctgtggctgggctggctgcaccatgggcagggttgaggactgccccccaccccgcccaagccaatgcagacactgacctcaagaccagccacaccaagtctgtgcactgcccaccacccccttcaacccctcctacaccatgctccggggcctggggcctccttgcctggcttcttcctccagctatcctcagggaagctggagattcaagtcatgccccagaagcaaggtgtaagcatgggggcgtggggaagagggcaggagctgaagttccaggggagcccaggacccctggggacctgtacactagcaggatgggtcttgggagttggcatggggagattgtaagggctgtatctccgcgattactggtactggtgctccacccataggggccctgttctctctggggtcccacactggggtcatgagagctagttagtactcagcctgacccctaggtctggtcctgccagcctgggatgggggtcaatgtatgctacacatc

SEQ ID NO: 10451 - DNA, 1133 bp, Homo sapiens
gttttcgagacagggtctcactctgtcgcccaggctggagtgccatggtgcgatctcggctcactgcaacctccgcctcccgggttcaagcgactctcatgcctcagccacccaagtagctgggattacaggcacccgccaccgcgcctggctaatttttttttgcatttttagtagaaatggggttacaccatgttggccaggctggtctcaaaatcctgacctcaggtgatctgcctgcctcggcctcccaaagtactgggattataggcgtgagccaccgcgcccggcctaacttttggttttgtctgtgctaacctttccatttgcctgttccagagaatccaggagtcctgccaaagtggcaccaagtggctggtggagacccaggtgaaggccaggaggcggaagagaggagcacagaagggcagtggatccccaactcacagcctgagccagaagagcacccggctgtctggagccgcccctgcccactcagccgcagacccctgggagaaggagcatcaccgcctctctgtccggatgggctcacatgcccacccattacggcgatcaaggcgggaggctgccttccggagcccctactcctcaacagagcccctctgctctcccaggcaagtgggatagtgcttcaccccggggctggtggccttttaacctgggcacaatccctgctgtctgacctcccagacaccaactgggccctaggggtttcttggcaccccctgtggctacctggagccaggggcaccctgagcagcgtcatattgtattattattattcttactgttaaatgtgtgtcctgctttagcagatatccagtgcatgtatttgctcatcagaaaatgagaaaacaggctgggcgcagtggctcacacctgtaatcccagcactttgggaggccgaggcgggtggatcacctgaggtcaggagttggagaccagtctggccaacatggtgaaacctcatctctactaaaaatacaaaattggctgggcgtggtggtgcacgcctgtaatcccagctccttgggaggttgaggcaggagaatcgcttgaactcgggaggtggaagttgcattgagctgagatcgcgccactgcactccagcc

SEQ ID NO: 10452 - DNA, 1321 bp, Homo sapiens
tccccttctctctagtggtgacatcgtctctctcattcatgactgaggaagtgcctgcaggtaatgcccacctcccaagagtctttctcactgtccttctcctccatctcatgcatgagcaagttaaagaaaaagcccacagagctgatgggcacagcagagtaggtagtacctacttgccgcttgaagccagagctgctaacctcactgaccccgtcattaacagcacgctgggggccccaagtagctacagccaccttccagcaccccccaccccgcagtgagcagggaaaggcatccctacttctcctaccttgagcacagtgaaaaaggcagctctgtcttgaaggaaacaagccctgtctgaccgccaaggcttcatactcaaggatgtctatgcttccccgtgagcttcctggaaaaaacccccgggagtcgtcagtacccctgggccactgctaacaagcacctaacaaggggcccagagccccctgctccagccacatctggacccatcagtgactgcctgccatagcctgagagtgtcttggggagaccttgcagagggggagaattgttccttctgctttcctaggggactcttgagcttagaaactcatcgtacacttgaccttgagccttctatttgcctcatctataacatgaagtgctagcatcagatatttgagagctcttagctctgtacccgggtgcctggtttttggggagtcatccgcagagtcactcacccactgtgtttctggtgccaaggctcttgagggccccactctcatccctcctttccctaccagggactcggaggaaggcataggagatatttccaggcttacgaccctgggctcacgggtacctatttatatgctcagtgcagagcactgtggatgtgccaggaggggtagccctgttcaagagcaatttctgccctttgtaaattatttaagaaacctgctttgtcattttattagaaagaaaccagcgtgtgactttcctagataacactgctttctcataataaagactatttgcatttgacatctgttccctttcaccggcaacctccaacctcccccgccctcccacaccactctgggctatagatttgtaatttgtggtttggggtctggccctcatccacctctgctccgagccagtctgcccccaatcccaccccagggagaacatgtagaaagggaaaggtttctcaacttagttcagaccaaaacacattgtaaaggcaaagaaggtttttatttaagtgacaacatttgagagctaaaaaccagctcacatcaaaatcaag

SEQ ID NO: 10453 - DNA, 1217 bp, Homo sapiens
ccgtcagcggccatgggggacgagacaagcggcggagacagccgacgccgccggggcgaatgaggctttgggagctcctgggaccccaggctccatcgaggctgcaagggaccctggggctgtgtgggtgaacggggctgtgggggagcccgaggtggtggggcttgccggggctgtgtgggtgaccgggtctggggaggaggagaccgaagatagaagtccccggggctgcgagagaaaaggtcgcccgggatctctgggccatgagagcattctgcacctgtggctgaaggtgcaggctatgagggccgcctcgggatgtggggaaggaagtagagtcgagctccatcccgtgcctgcaggagagggacctgtcgaaaggggtgttcctggccgagcttcctgggtagagacaagccgcggcggtcttacagggccctgggtgaaggaacaggcaagggggatccctcgggccccctcagggcccacagctctgggcttaggggcagcttacgagagagccttaggcttctgtggacagggacaggctgggagggtgcctcctgcgagtgtgcctggggctttggcgtcaagttctgaaatggccccgcacctgtggaggggagaagctgtgggggttcctgagactggggaggagataggctatgggtttgtctcaggcccttgtgaaaaagaacagactatgggcgagcctgggaccgtggggtggactggggctgtgggagcgcccagagccatggagggagagctcggctgtggcggtgctgcaggtctgtgggggagaggacagtccccgcagattcctggggctctgacacatgaagcagtctgtggggccacccctggcgtatgggggaggggacaggctgtgggggtgtccgatgctgtggaggaggagcctacttctgtgggtgccgcaggtgtgtgttacaggagacaggctgtggaggagacagactctgtgggtatgcccggcccgtggggcacaggatactctgttggggtgccctgtgctgctgaagaggaaactagatgtggaggtgacccagggttcagggaaaggggacagcctgtgtgggtggagacaggctctgggggtgatccagggtcacggggagctgcgcagactgcagagtcatcatgtcctggggagcaggcagcaggttctgggggtgccccaggcctgtgggggatac

SEQ ID NO: 10454 - DNA, 1252 bp, Homo sapiens
ctagggtcagaattacgtctgggaggcccggtgcttagggcccctaggttagaggacttggagaggagagcggctttcttgagaatgtggttaggagccagggagtcagacctcagcggccatcccaaacccaccaccttaggtgtgacctctttaggtattttacttttctgtgcttctcagtccacctctgcaaaatggctatgacagatctcaccccataggatggtcaagaagattgaataaagtaatacacgtaacagcgcctaaacaggtgtcgggcacatagtgctcagaaaatgttggctcctattaaagtttgacccctttgcttcattcccacccccaggaatggcccccagaacatatacaacctttacgagcaagtcagctacaactgtttcatcgctgcaggcctttacctcctcctcggaggcttctctttctgccaagttcggctcaataagcgcaaggaatacatggtgcgctagggccccggcgcgtttccccgctccagcccctcctctatttaaagactccctgcaccgtgtcacccaggtcgcgtcccacccttgccggcgccctctgcgggactgggtttcccgggcgagagactgaatcccttctcccatctctggcatccggcccccgtggagagggctgaggctggggggctgttccgtttctccacccttcgctgtgtcccgtatctcaataaagagaatctgctctcttcagccctgtgtctgtgcttgagtgggggcgagcacggggctgagactagaggtcggcctctgcctggaaagtcccgatgtctgagcggaagtggagcgaagtgtggcgcggaagtgaggcgaaggctttccccatcgactgggcgcgccgagcggtctaagcgactgcgtctgatggggcggggagccgccgggttgagcctatccgctgcggggagggcgggacttcctgcgcgggggcccgagccgctcagtctccctgctctccgtggtcccggctcgcgtgtagcggcggcggcggcgtctccgtgaggaggcgcgcggggccatgacgtcagcgtccacaaaggttcgacctccctcgcggacagcgctccctggcggccacgggagggcgggccccccacttggctcgcggctcttccgccccgggcggggggcgggcgggagccgagcctggggtggggctaggggctccgggcgggacggggagggcgggcgccggccccccgtgacgc

SEQ ID NO: 10455 - DNA, 1252 bp, Homo sapiens; identical to SEQ ID NO: 10454

SEQ ID NO: 10456 - DNA, 1252 bp, Homo sapiens; identical to SEQ ID NO: 10454

SEQ ID NO: 10457 - DNA, 1172 bp, Homo sapiens
gaaggaccgaaagaaccgaaagttggggccaggagctggggctggctttggggtgcttcggaggcctcggccaactcctggggatggggaaaagagatctcgaatcaagaagagcaagaagcggaagttaaaaaaggcagaacggggggatagactcccacctcctgggcctccccaggcaccccccagtgatacagactctgaagaggaggaggaagaggaggaagaggaagaagaagaagagatggcaacagtggtagggggtgaagccccagtccctgtgctgccaacaccccctgaggctcctaggccccctgccacagtgcaccctgaaggagtccctcctgctgacagtgaaagcaaggaggtgggcagcactgaaacaagccaagatggagatgccagctccagtgaaggcgagatgcgggtcatggacgaggacatcatggtagaatcaggtgagaggttcgggctggggcgaggggtttgagggtgttgtggatccaacagctcaggcagaataccaaacaaacctttttttccccaggtgatgactcatgggatctgatcacatgttactgtcgaaagccctttgcagggcggcccatgattgagtgcagcctgtgtgggacgtggatccacctctcctgtgctaagattaagaagaccaacgtccccgacttcttttattgccagaaatgcaaggaactgaggccagaggcccggcggttaggggggcctcccaaatctggagagccctgatggcaccaactttagcctggaacttccaaatgacaacatgatttgggaactgagcctcagggtcctcagcctatcccctggagcttggatactgtctgcacttcaaggcaggaattctcaagggagacttgtttgaaaatgagtgtctcactttcccaccctatccttcctccccactctgtggacttgaaattgaatccattacggttggggatgggaggctgtctgtgtcccgacacataatctctgtctcttggacctgccaccatcactttctgggtcaggattggaattgggatggaatgggacagttgtctataaaactctagtgtaaatattagcactcccctccctcatcttttcttctatttcactccccatttattttcttctacaccggttgtattttt

SEQ ID NO: 10458 - DNA, 1141 bp, Homo sapiens
gagctgaggatgccttgtttttctttgtcaacaatgtcattccacccaccagtgccacaatgggtcagctgtaccaggtatggtgactgggaagtggtggaggctttggagaggaatcttggaagagcgtgaggggaagaaagtgttgttacatcagtagttttggactagcttcctggcttgccttaaagtttcataatagccgtgggttgggggtttggacagaacagtaggagtagagagaaggaaagagaacagtgagctagagaaactatctgttcgggactcttcccagtccccctccccattccaaagcagcagaaaacagtttgaggcctttttgcccaggactgcagagattatactgctcgtgtggtaggccttggagtcagtgaaggagtcaggcaatggtttgtggttctagaagaacgtgtctgggtcgtggttggtttaagttactggagcccagttgctgaacagttttctgctttcatcccaggaacaccatgaagaagacttctttctctacattgcctacagtgacgaaagtgtctacggtctgtgaagctgctgcccctgagctggaggggggtctcattctacaaagagagaggtggcccccctttcttgacctcctcctccttcaagctcaaacaccacctcccttattcaggaccggcacttcttaatgtttgtggctttctctccagcctctcttaggaggggtaatggtggagttggcatcttgtaactctcctttctcctttcttcccctttctctgcccgcctttcccatcctgctgtagacttcttgattgtcagtctgtgtcacatccagtgattgttttggtttctgttccctttctgactgcccaaggggctcagaaccccagcaatcccttcctttcactaccttcttttttgggggtagttggaagggactgaaattgtggggggaaggtaggaggcacatcaataaagaggaaaccaccaagctgaactgaattttgccttgtgttgctcccctcgtcccgctgattttaagtctttccaaggtgtcagtgggtttcagtggtggggaaagaagagtactgggtacaagctggagggatagaagtatattttggtttattctgttcat

SEQ ID NO: 10459 - DNA, 2159 bp, Homo sapiens
ttaggtcccacatctccagtgatgctgccttacaagagtgttgtgagggtatgaactataaggtactctaccaatgcaagttattgtcaccccaggttcaccgctgatgttcgttccgtgctgagccgaaaccttcaccaacatcggctctggtgacagctgctccccctccacctgagttggggtgggggggaaagggagggcgagcccttgggatgccgtctgatgccctgtccaatgtgaggactgcctgggcagggtctgcccctcccacccctctctgccctgggagccctacactccacttggagtctggatggacacatgggccaggggctctgaagcagcctcactcttaacttcgtgttcacactccatggaaaccccagactgggacacaggcggaagcctaggagagccgaatcagtgtttgtgaagaggcaggactggccagagtgacagacatacggtgatccaggaggctcaaagagaagccaagtcagctttgttgtgatttgattttttttaaaaaactcttgtacaaaactgatctaattcttcactcctgctccaagggctgggctgtgggtgggatactgggattttgggccactggattttccctaaatttgtcccccctttactctccctctatttttctctccttagactccctcagacctgtaaccagctttgtgtcttttttccttttctctcttttaaaccatgcattataactttgaaaccaaagcggccttaggtccttctctggggttttgggaagtgaagagaggggactttgttcacatgcaccctgtcccacaggcagagggggaagagactgctgttggactcaaggggcagggggaaaggtggcgttgagtatagggatagaataatgcggacaccagatgcctgggatacaataatgctgacaccagatgctttggcgggaagggccgagtgacaggatgggcgcgctggtggggagtggaaggacaccttcggagaagcaggctatggaagcacgaaaggagaaaccggctatggaagcacgaaaggagaaacctggacggccaaagggcgtagagctggagaaaccgggcttcgtccggggcactgacgtggacaggttaagcgggcgctgcccccaggtggctggcgccccgacctccgctgtccgggaaggcgtcggtccccctcccagctgtcgcccagccggccccgcctccccggcgccctcccaagccggccctacttcgcgcacccgccacgtgacgctccgccctctttgagatcacatgatttaactcaagtcccgcagtgttcctccgcgctggcgtagtccctacctttccaacctcctctccagtccctattggtctactcattttggcacttaagcgttctgtagatctctccaaacatctgttttctttttgacttcttatttctggagatcatctccgccacttgggtactactttgttttggtgtcaacggccgccttcagcgtagcaacacggttcgtgaatagctaaccttgtaattgtccctgctgttcctctacgttgttaacgaaaggaacttggagaaccaagtctcgtatgatgattaccatcttttactcctcttcagccccagcttccttgaggggacggttggggaataggtttagagtaattttcgatgagcaaaagccaaccgtctttgctacgtcgcctgcgtagcccacaaattgattccaaagcgattacgctaatggcgtgagggggccggtcagttggtggtgctacgctagcagcgttagcgccgctgaggtagtggcgtatcttagcggggggggcagtccccgatagtcgggggcggggttggtgaatagggaagtggcgcaaattcgtggatcgctccgctgaatccgcccgcgcgtcgccgccgtcgtcgccgccccccgtcccggcccccctgggttccctcagcccagccctgtccagcccggttcccgggaggatgaagttcgtgtacaaagaagagcatccgttcgagaagcgccgctctgagggcgagaagatccgaaagaaatacccggaccgggtgccggtgaggacagtagccagggccgagggcgcgggacgcttacgctgacgccacagcctggc

SEQ ID NO: 10460 - DNA, 2159 bp, Homo sapiens; identical to SEQ ID NO: 10459

SEQ ID NO: 10461 - DNA, 1169 bp, Homo sapiens
cagcatcacctgacatccgaattctcaggtcccaccccagacctggtgaatcaatcagagctggggctggggctccacaatcggtttaacgagctctccaggtgattctgatgcacgctacagcttgagaaccactgcttggtggaaagagctctcactgggactgaggtaagaagcacagtgcattctacccactttgcgactgaaggctgtccctgccttttgctttggagttcatatttcttgcctccctttctgaaatccctgaggggtaaagcggggcgggaggggaggtgcggggagtgcatcctggggatggtggtaactgcacaatctgctgaggccctgagttcaggacttttcccctgctaaactttgaccacctccttgctccaccctccagctctagaccccaagtcaaatgttgaaagaatgaaattgggtggtggccccagcaggggtgacagagactcctgtcttgctgtctcacttttcacatggccttttccccaatcagacagctattaaaagaaacaaccccaggaagtttctgcgcagcgttggagatggggagactgtggaatttgatgtcgtggaaggagagaaggtttggggactgctatggggtatagagttgactaggcttacgggagggtggcctggaggtcatcacaggctaagaccctcctggggccagctctgacccgttctgcgggaatgggactgtgttctctcaccctgatgtcctcttccttaatgctagggctaagggatgtcctaagtatgtccctgtcatcggtcggcagtgtctgggtttcttctctagttcaccaagcacttcgacatccgttctccacgtggggccctgtcctagacttcccgagtccgcctctggagtaaaaaggtggatgctggctgccaggcctttctccacccagtcgtatactcaggagggtgcagtagcaattatttcaaaaggacatgttgctccttcccaaatgggtgcaagcacattccactgcctctccagggagggtagaaagaagttagaggagctaaaggaaagctggagaggggtcttcccctgaaagaaggggaagcaagttgggaaatgcacattggctgttggagcaggttctcactattcccttaccaccttcccagggcgc

SEQ ID NO: 10462 - DNA, 1111 bp, Homo sapiens
cttgtggtttcctgtagcagtgactggtttgtgtgtggatgggggggggcagtgtaacagatgggtggggccttgtcctccggtctccaccctccccccccccaattagccctgcccttttgctggatcatagctgctcacctaattatagccctggctatatgtggggaagaggggtggttggtttcagtggcaagtaacacctgagtcctccccactcccaggaagtaggccttttctcatctctgagatttgacattccagctccctagagccttcctttcccaagccaccactttagctttgatttatgggggagaaaccagctattccaccctcccatacacacaccagttcttgagtatatttgagcccagtcagtattttaagttcaggaactttgactttattttaggtgggtaatggaataaagagttgggaaaatgtttctggagagaaatgggatagattggaggtcctgttgacctccatgcttattcacttcagttctcttcttggctctagttggaatcgaagcctcttaaaatggcagatgacttggacttcgagacaggagatgcaggggcctcagccaccttcccaatgcagtgctcagcattacgtaagaatggctttgtggtgctcaaaggccggccatgtaagatcgtcgagatgtctacttcgaagactggcaagcacggccacgccaaggttagaatttcacctccgcatcttgccttccccatgcctccagtatctttggcgctcccagcagcaagctgccaacagtgctgactttcctttaactctgcttttactgtctgattgtttttgtttagcgctcagccttcatacccattcagacaactacacctgctccccagtcttcagcctcttctgtggttacccttctgtccccgcatcattctctggcagtccctccgtttctccagctttgtgccaatctcttcaattcataggcctttatgctctagctattcagttgctccttccttattcttggttttcactttttctttcttcccttgagccgttgttaagtggttgcttccatcacgttgcccagggtttctccaattctacgccttcc

SEQ ID NO: 10463 - DNA, 1568 bp, Homo sapiens
ctccttccctatctgcccccagctgattggcatccaggatgggtacctatcactgctccaggacagcggggaggtacgagaggaccttcgtctccctgagggagaccttggcaaggagattgagcagaagtacgactgtggagaagagatcctggtatggtgcctccctccctgcttctgtgctcagctttgttctgtacgtttcttcctgagctcagacatctcttggctatccctcttgcttctccagatcacggtgctgtctgccatgacagaggaggcagctgttgcaatcaaggccatggcaaaataactggctcccaggtgagtgtgacaaatccctcactgtccccttcacattttgttgtcctcagcagagctgctgtagtcttaattgtttcaggcttactttctgcccctagcctggctctgtcctccctatccttcctgttgaaggtattatcctgtcttactaatttctctctcctacctagggtggcggtggtggcagcagtgatcctctgaacctgcagaggccccctccccgagcctggcctggctctggcccggtcctaagctggactcctcctacacaatttatttgacgttttattttggttttccccaccccctcaatctgtcggggagcccctgcccttcacctagctcccttggccaggagcgagcgaagctgtggccttggtgaagctgccctcctcttctcccctcacactacagccctggtgggggagaagggggtgggtgctgcttgtggtttagtcttttttttttttttttttttaattcaatctggaatcagaaagcggtggattctggcaaatggtccttgtgccctccccactcatccctggtctggtcccctgttgcctatagccctttaccctgagcaccaccccaacagactggggaccagccccctcgcctgcctgtgtctctccccaaacccctttagatggggagggaagaggaggagaggggaggggacctgccccctcctcaggcatctgggagggccctgcccccatgggctttacccttccctgcgggctctctccccgacacatttgttaaaatcaaacctgaataaaactacaagtttaatatgaagcccccaactcagctgcttatttgaattaaatgggtgtatttggaagccacaaaaagactgaactctgccactgagttcactggaacccgctgtctatcactttgacttgctgtggacctgccagccatccccccaccctccaagcaaccttgacctattccagacagttgggtgggaggcaacacaaacagcagcagccaggggcagtggcaggtagattttattggcctgggacacacaggggataccctcacccacgatggggtggggggtgtggtgttgaagatataatctgatggtcacttgtggtagaatcgcgggttctggctgtgttggatgaaggggagccgagggccaggttggctggtagctgcaaagcccgactggtggtggtgatgaaaagagggctttgtcactgggcatactctcccttccactt

SEQ ID NO: 10464 - DNA, 1248 bp, Homo sapiens
aagtgaagggtgtagctgagcaggctttgggaggaagagcatttcaggtagaacagctagagcgaagttcccataaggtgggagtatttcctaggtacagcaaggcttgtgtggttggaacagactttgcaagggggaggtgatggggcgagaggcttcactcccttattttttcttgtctgacagattccgggaccccaaatcccagcggacgcaccaggctcaggtggcgttccaggtgtgtgtgcgccctggctcctacaccccgggacccccttccgctgcccttggagaacctcctgaccctcacttcagtccagccgaacttgagtgggtcactaaggagaagggggccacactcctctgtgccctgctggtacgggtggaatgaggggtgagacaccactactacaagcacagtcgggccgcgggcccatggactctgagtggcgactgcctccacctcattcccgtgactcgtggcatgcgcaggtgctggagcttggcagccgcgcaggagcatgtaggcaggctctcagatgtaggtggcaagtggcacagctccatgtccggaggcccagcactccgtctgatgggaggagtcgtgggagcccagctccaggccctggtacccctcttcatgcactgatttggggaacatgactcccttttactcccctaccccacatcacttaatttatttccgtttttgtttctggttactgtgaatcccagaggagtctctccctgtgcccacatgaagctgctttttccggggccaccgggcgggagtggggaagggtgggcgcacggaagatgggggcctctgtacagttgttactgactctgatttctaaggagccaataaacaccgtctcagagcctccgcctcggcctctctctcgcgcgcccctctccggagcccgcgtcccctggggtgccaccaggtgggcccgcgaaattaaagagagctgaggatgccaaggccagtctgcagccgtcgtcgctcacgttcccggcgacggggtttgtacgccgcgggcacccgtcgcagcgcgcttccgccttctttcacctgtgaggtcggccgccgccgtgactccggaaggactcggccgggccgccggatgtgacgcaggggccagggcgcgtcggagccgctgagaaagcgcagagaaggcgggtaggaagggcagtcgtccgcgctggctgggcagggagcggcagcagcgagccggggaccccggc

SEQ ID NO: 10465 - DNA, 1248 bp, Homo sapiens; identical to SEQ ID NO: 10464

SEQ ID NO: 10466 - DNA, 1218 bp, Homo sapiens
tggagagagaaggcagagggatagggagaaggaggagggagcaagatgtggcagacagagatgaggagagaaaatgggggagacagtgatggggaaagacaggagagagagacagaaggcttaagggggaaatttggggaaggcatttggagagagagaaagaaatgagaaacaccaaggagagagatacagaagagaaagatgtaaaaagaccgagggtgagagactgaaggcaagagctggggcaagctggaagaggcccacaaaagatgctcccagggagcactacggagaggagagagatgggggggcctccagtgggagggaaggagggagcggagctggtgggaggaggccaggggcccagagtaccctcaagaggagagggtgactgaggcagatcttgttgtggggagggggagggggcagcaaggccatggtagctgagcccagtctggcacaggaaaaggagatcctgggggaatcagccccgagccacctccaggtgatggaggaatagaggagccttagagaagctgaaaggcagggggcatgactgggtgtgtgtggtaaggattcctgtgtcctcatctctggaataaattgacacctgcagagagccacccgcgggctggcgcctggctctgaaaaccccgcgtcagcaaacagctctggcggctggtgggggggcggggggggggcttgccgaaatgacctgggtgtctgcccctccggtctgatcttctcccttggctggcccctgctgccctgagcacccaggcatcagagcagcaactgtagggggggtggcaaggggaagggtaggtgaatggatgggttgggatgggaagagaagaaagctcagtgttgcccccaggacatgggtcacaatggcttgcaaagatgaaaaggtggtggggtccaaggttgcttgaaattgctggaggggggcagtcagtaggctcctgtgatgtctcttcaagcccacctcagcaccccctctcccaagccagaggcctggtcactaaggctaggctttgattggccaacaggcagggcttttagcgttcttggtgcccccaatctccccctcctctcaacatatatacttcttcctctatgttaaggttggggggaactcttgcattctgactcacgcctttgccctccccttcatgccctgaatggaccaccaaaccaagccagccccttcccgtc

SEQ ID NO: 10467 - DNA, 1493 bp, Homo sapiens
cacagaccagggaccctaggcctggcacccctcacccaccgaccagggtgccatgtggagtggaggcccaaggcctgagtcggaggagacaccaggaccctcccagcagctccagctccagttctagcctcgggagcttgctcttcccagggacaggaaggagatgtgctgtgtgcgggggtgctgggggttccctggatccagcagatgccctaaggagggccactgcccacccccagcctctacggggtttcttggaaagtctgcattggagaagtgccgcggggaaggctggcagagggtggggagggaatgtctgccagggctagctggggagggaggaggggaatccggtcttgccccccagggatgggagtgacatgtcccctgagctccaggccagtcctcagcaggcctgggagctgggcgctgctgcttccggtctgactgtgtccttgtccctgaccccctggcccacctgcccacccctccccacacagatatccgtgaccctgggaagaagcctgtgatgctgtttctccatggcggctcctacatggaggggaccggaaacatgttcgatggctcagtcctggctgcctatggcaacgtcattgtagccacgctcaactaccgtcttggggtgctcggtgagggtgggcagccaactctggggctcgggggagtctgggaggtgggcctggtgggcagggttcctccacatccagcagaatggcttctgggctggactgagctgcccagaaagggggcaggggcgctgtgacacctccagggagccctcttcttctctactcccaggttttctcagcaccggggaccaggctgcaaaaggcaactatgggctcctggaccagatccaggccctgcgctggctcagtgaaaacatcgcccactttgggggcgaccccgagcgtatcaccatctttggttccggggcaggggcctcctgcgtcaaccttctgatcctctcccaccattcagaaggtaccagcagtgtcccagcctgttccacccttcccaaccctgccaactcccccctctccttcaggccggtactcacagcctggcctgaggtctgcctgtcccgccagggctgttccagaaggccatcgcccagagtggcaccgccatttccagctggtctgtcaactaccagccgctcaagtacacgcggctgctggcagccaaggtgggctgtgaccgagaggacagcgctgaagctgtggagtgtctgcgccggaagccctcccgggagctggtggaccaggacgtgcagcctgcccggtatggggtgggagagggctgggtccaggccttcaaggttccaaggaggctgaggtgagaggtgcctgtgggcataccatttggcaaggagggatgggcttctggcccccagtaagtggcctcctcttgcaagccttccttcagtggaggtgctcaatcagagcaggtgagcacagggtgccatgaag

SEQ ID NO: 10468 - DNA, 3219 bp, Homo sapiens
gccaacaaggtggccttctggctggagctcgtgccccacctgcacaacctgcacacggagctcttcaccaccaccacgcgcctgcctccctacgccacgcgctggccgcctcgtccccccgctggcgccccgggcacacgccggcccccgccgcctgccaccctgcctcccgagcccgagcccgagcccggcccaagggcctatgaccgcttccccggggactcacgggactactccacggagctgagcgtcaccgtggccgtgggtgcctccctcctcttcctcaacatcctggcctttgctgccctctactacaagcgggaccggcggcaggagctgcggtgcaggcggcttagcccacctggcggctcaggctctggcgtgcctggtgggggccccctgctccccgccgcgggccgtgagctgccaccagaggaggagctggtgtcactgcagctgaagcggggtggtggcgtcggggcggaccctgccgaggctctgcgccctgcctgcccgcccgactacaccctggccctgcgccgggcaccggacgatgtgcctctcttggcccccggggccctgaccctgctgcccagtggcctggggccaccgccacccccaccgcccccctcccttcatcccttcgggcccttccccccgccccctcccaccgccaccagccacaacaacacgctaccccacccccactccaccactcgggtatagggggtgggtggggaggccctcctccccggccctccctggcccggccactccgaaggcagggaggaggacttggcaactggcttttctcctgtggagtcgtcacacgccatccagcagcgctaaggtggacatgggattcctccctgcgatgcgtgtctttcccacgcagagaagcccagtctcttctctggatctgggcctttgaacaactggggggcgttttctcccccccattgggacaccagtcttcggtgtgtggaatgtggtattttcccgcgtggaggtgtgctttctcacaacggggtgtgttttcccatgtgcagggtgaggtttttttttgccaccctggacacatgttggccccctcaaagaatttctgtggggatttgtaccccagaatcctgttcccccatcccttctcccacctcctcccctctccctccccctggagaccctggaagtggtgtgttcacatacagtgacccttggccaccagaccacagaggatggagcctgggaagcagcgaggaaatcacagccccctcgcccctgcctcccttgcccctaccccggcgaagcatgttccccccgacgccccccttggcacaagtcagatgaagcacgttctgccggggaggccctcaccttccagagaggacagacacagatttcctgctgggggagggaggagtccacgcatcctgatgctgcctggaagcttattttcccgtggccaggacgcatttctctgagtggaaacaggttcttgcatgtggatgtgtgtttccccaggcagacggcccctctcttcccagcacttccctgcctcccccaggcctcaggcccagcacccagttcctcctcacatggcaggtgagcacagacttctagttggcaggagctgaggagggtgaacaaaccccgagggaggcccggcccttgctcccgagttggggggagggggtgtggcaacgtgccccccgcagaggccacgcatgtttgaccaaagccctcattgtggtccgaggacagccttttccccaggcctcagagcattgctcatccgtgccaaactgggtaggtggatttgagcggaaagactcccaaaatgtgccaagaatttcccagtcccaggcagggcaggggaaactaagggcaagcaggatacagggcgagggatgtggcaggtgagggggctcccgcctgtgccccttctcctcaccatgtctcccccaccctgcctcagttctccgttccccttcatctccgtccccctctttgaagctgtccccatctcagtgtcagaccagccttctcctcagctgaccaccctcctctgacccacgccccctccttgtctgaaagaaaggagccttgaatggtggagggaggcagtggggagaaaggtctcaccggacaggttgggagaatgaggtcagcggtgctggggaacagatggagggggcagtggggacagggcttgggcagacaccagcaggaataatttgaaatgtgtgaggtgactccccggagggccttgggcttgggcatttgggaaaagaatgatgtctggaagggcttaagggacacagtggacgaggggagagtcctcatctgctggcattttgtggggtgttagtgccaaacttgaataggggctggggtgctgtcttccactgacacccaaatccagaatccctggtcttgagtccccagaactttgcctcttgactgtcccttctcttcctacctccatccatggaaaattagttattttctgatcctttcccctgcctggtctagctcctctccaaacagccatgccctccaaatgctagagacctgggccctgaaccctgtagacagatgccctcagaattggggcatgggaggggggctgggggaccccatgattcagccacggactccaatgcccagctcctctccccaaaacaatcccgacaatcccttatccctaccccaaccctttgcggctctgtacacatttttaaacctggcaaaagatgaagagaatattgtaaatataaaagtttaactgttggttgtgcctgctctgttgtggggagggcggtctctaaagaaacaagccctggggaagtgacgagggaggaggggtcttttcagtgaccagctctgaggtctgagaggaagggggagtgtgtgctggggtctggttgccatggtaatgggtctgtttggcaaatgaatgtcaggacccgtgtctatgccgagactggagcctggtgtcgttctataatggaaggacaaaggctgatgggggcagatgtcaaacaggccagaggcccagtgggctggtgtaggcagctagctcagcagaggtatgtgaggtgagaggcatggcctctgccaaggcctggactcaggcgagagggtcagccacgggtccaggactcagggtagccccttggcacactggaagggagtggcctggcaccattgtgacccgttcac

SEQ ID NO: 10469 - DNA, 1203 bp, Homo sapiens
ggcacacaacaatgagctggagcccaccccagggaacactctgcggcagacgtttgagaatcaggtgaaccgcattcttaacgatgcccgagacaagactggctcctctgctcagaaatccctgtctgaatacaataacttcaagtctatggtcgtgtccggagctaaaggttccaagattaacatctcccaggtgagaagccttgtttttccatatacggggccgctgtgaagtttgggaggaggaaggaaggtgtttgtatgtattagggtcaggagaatcacgggagttgggggaaattttgggaactgttattcttaaggcagagggaattcagtatacaccacctttctgtttcccaggtcattgctgtcgttggacagcagaacgtcgagggcaagcggattccatttggcttcaagcaccggactctgcctcacttcatcaaggatgactacgggcctgagagccgtggctttgtggagaactcctacctagccggcctcacacccactgagttctttttccacgccatggggggtcgtgaggggctcattgacacggctgtcaagactgctgagactggtgaggctttcctcaggggtcttccttgggctgttagcagggactgctgcaggctgagaaacccctaacaggtggggagcggaaatgctcaggctcctattcccagggtataattctggcccttgtggaaagaatagagtctcaagagtaggcaaacacccttgtttggattgctgtgcagcattgcacagtgcagggacagagcttccggggctctgccggcctgtcccatgggagtggttcctgctgggctttttgtccgtctagtggtagacactgagtttgcattcaaaggcctcagacacagagagtactagctgactcttctgacagtcaggtaggttaaggccccagcctgggtctttgggctttatcatccccttacttccctccaggatacatccagcggcggctgatcaagtccatggagtcagtgatggtgaagtacgacgcgactgtgcggaactccatcaaccaggtggtgcagctgcgctacggcgaagacggcctggcaggcgagagcgttgagttccagaacctggctacgcttaagccttccaacaaggcttttgagaagaagtgaggaggcgggcaggcgggtggttctcgcccctggg

SEQ ID NO: 10470 - DNA, 1103 bp, Homo sapiens
gaacatgggaggtagaggttgcagtgagctgagatcgtggcattgcactccagcccaggctgataacagcgagactccacctcaaaaaaaaaaaaaaaaaagtctcactggaactgtgaggggcagagcctggtgactgactcgtttggccctcaaagaggctgtagttggaggcgagagctggggaagagaccagaggatgccaagtgctgacctcactctcactgcaggaggaagaggtggtggacaagatggatgatgatgtcttcctgcgctgcatcgagtccaacatgctgacagatatgaccctgcagggcatcgagcagatcagcaaggtcagccatcccctctgccaccgccttcctcctcccactcccacactcccctccctgcctactctgagcacgctgtcttcccacaggtgtacatgcacttgccacagacagacaacaagaagaagatcatcatcacggaggatggggaattcaaggccctgcaggagtggatcctggagacggacggcgtgagcttgatgcgggtgctgagtgagaaggacgtggaccccgtacgcaccacgtccaatgacattgtggagatcttcacggtgagcccgtgtgtgctgcctagctgcctttcgtggatctctggctctcaggcccctcattctgtgctgtccactcaggactttttctgcctgattccatttctgagtgtgggatatcctggctcctgacaccctccctggatctgggtggcgacagaagcagggaagagagcagagttgctcagtcctggccctcccctccacttccctcccctgtgccaggtgctgggcattgaagccgtgcggaaggccctggagcgggagctgtaccacgtcatctcctttgatggctcctatgtcaattaccgacacttggctctcttgtgtgataccatgacctgtcgtggccacttgatggccatcacccgacacggagtcaaccgccaggacacaggaccactcatgaagtgttcctttgaggaaacggtaacagtggaatttctgaatagggcagaaggagggagtagtgtgagaagaagggcacacactttgggcagct

SEQ ID NO: 10471 - DNA, 1218 bp, Homo sapiens
acaccccaaccagtccttcttacagtcccagctccccagagtataccccaacctctcccaagtactcacctaccagtcccaaatattcacccacctctcccaagtactcgcctaccagtcccacctattcacccaccaccccaaaatactccccaacatctcctacttattccccaacctctccagtctacaccccaacctctcccaagtactcacctactagccccacttactcgcccacttcccccaagtactcgcccaccagccccacctactcgcccacctcccccaaaggctcaacctactctcccacttcccctggttactcgcccaccagccccacctacagtctcacaagcccggctatcagcccggatgacagtgacgaggagaactgagggcacgtggggtgcggcagcgggctagggcccagggcagcttgcccgtgctgctgtgcagttcttgcctccctcacggggcgtcacccccagcccagctccgttgtacataaatgccttgtggcagagctcccggtgaacttctggatcccgtttctgatgcagactcttgtcttgttctccacttgtgctgttagaactcactggcccagtggtgttctcactcctaccccacccaccccctgcctgtccccaaattgaagatccttccttgcctgtggcttgatgcggggcgggtaaagggtattttaacttaggggtagttcctgctgtgagtggttacagctgatcctcgggaagaacaaagctaaagctgccttttgtctgttattttatttttttgaagtttaaataaagtttactaattttgaccaaaagtatgtacatcgagtgcttcattggggttcaggagacccccaggcccctgcctcctgcctgggctgctgcttgatctgttagggggaggggaccaggaaaatgggagggtaccttacagtcagcccacacacagcccctgctctgtgccaggcactgctctgtactgagtttgttatagtcacaacagatgcagctcttgtcctctattaaggtgatattgaccataacagctttttaacttgttttactgattgtcataaataatttggaaaagtgtagaaaagtataatgcagagggagaaaaatgatcacccataatcccaccactaggaggcatactttctttggtattttttcctatacttttcttgagtcactaaca

SEQ ID NO: 10472 - DNA, 2425 bp, Homo sapiens
agctggaggacattttccagcaggagttttccaccccttccaggtgaggcttgaaagccctccttgaaagaagggctggggccttggggatgtggagagaatactgctgccttttcttccatagggctgtagttggggaggaggaagctagagctgaaggggaggactctgcaggcaggtgccaaatccttggaagctgatgggagagtctttacctgggaccctgaaatgttctacctgagtagtcatgtttatctttctggggagtgggcctttcgcaggtcctcagaaggacccatcatgagccagaaaaaagggagtcagttagaatttgtattccagggagtagtaggtatttctgtgtgccccagctgcatcatcttttgtgtgactccacccttggcctactcaggaagggcctggtgttgcagctgatccagtcttaccagcggatgccaggcaatgccatggtgaggggcttccgagtggcttataagcggcacgtgctgaccatggatgacttggggaccttgtatggacagaactggctcaatgaccaggtgagaaagggtagagaaacaggcctgagaggggattcagggagcagggtgtctggggccctctgcatgggggagccctgtacccatgccgcaccctccatggcaagctgcctcccatcttctccccaggtgatgaacatgtatggagacctggtcatggacacagtccctgaaaaggtaggcccaaccagataggtcagtacccagaggaacttctgcagttttaagcagctttttaagctcctttcatctctttcattttacacagagagggtctctgtttcagggagagaggtggtagtggtagtgtattaatttcaaatccgtaatcttgggctctggatttatcagttgttttcctttctgccagtatttagtgtttttcgctatggccagccccaaggattgggatgggttcctattgtaactattgtaaaacaagatttaaaaaaaaaaagaaaaagaaaaaggccaccgggcatggtagctcatgcctgtaatcccagcactctgggagaccagggcgggtggatcacctgaggtcgggagttcaagaccagcctgaccaatatggagaaatcccgtctctactaaaaatacaaaattagccgggcatggtggtgcatgcctataatcccagttactcgggaggctgagggaggagaactgcttgaacccgtgaggcggaggttgcggtgagtcgagatccacgccattgcactcccgcctgggcaacaagagcggaattctgtctcaaaaaaaaaaaaaaagacaaaaaacaacttcggctgggtgcggtgactcattcctgtaatcccagcactttgggaggccaaggcgggtggatcacccgaggtcaggagttccagaccagcctggccaacatggtgaaaccctggctcaactaaaaatataaaaatacaaaaaagttagctgggcatagtggcgggtacctgtagtcccagctactcgggaggctgaggcgggagaatcgcttgaacccgggaggcggaggttgcagcgagtcgaaatcatgccactgcactccagcgtgggcgacagagcaaggccctgcctcaaataaaaaaaaaaaaaaagcctggtttgttgactcatacctataatctcaatgctctggaaggccgaggcaggcagacagacagattgaggccaggagtttgagaccaacctgggcaacatagtgagaccctgtctctaccaaaaaaaaaagaaaaaacccagaatttgtttttactgtcagtggactgaggaggggagacttagtgggagagtctgaggtcttttaattccattgagcttttttgtgtcattggcacaggtgcatttcttcaatagtttcttctatgataaactccgtaccaaagggttatgatggggtgaaaaggtggaccaaaaacgtgagttttgaattcacatccacttgtgtaatgccttgcctctaaagaatgagagtcttgttttctctgagccctttccctgaccgtgttcattcagtctttcaaagattaaacgtctcttgtgtgtgtaggcactaaggatacagtgttaaataaggaaaacttgcccttaaagttaaattgcagctagtgataagtgctgtgggcagatcaacacagagtaacgtgaggctgggcgcagtggctcacgcctgtaatccccagcactttgggaggccaacacgggcggatcacctgaggtcaggagttcgagactagcctggccaacattgagaaaccccatctctattaaaaatacaaaaattagccctgtgtgatggcaggtggcctgtaagcccagctattcctggaggcggaggcaggagaatcccatgaacctgggaggca

SEQ ID NO: 10473 - DNA, 2425 bp, Homo sapiens; identical to SEQ ID NO: 10472

SEQ ID NO: 10474 - DNA, 2672 bp, Homo sapiens
gtacactcaggaaccagactgagttgaaatcctgtctttgccacctattgacagcacgatcttaagtggattttagcctctgcctgtttctcagctgaatgtgagtttaataatagtgcatgccccaaagttgttggttaggaatcaatacatgaaaaacatttaagaatggtgccgggcacagtggtaactgacatatgagcacctgcctctctctgctcagatacagaaggtggtcatggcactaggagactacatgggcgcctcctgtcacgcctgtatcgggggcaccaacgtgcgtgctgaggtgcagaaactgcagatggaagctccccacatcatcgtgggtacccctggccgtgtgtttgatatgcttaaccggagatacctgtgtgagtaattcggttctccaatcccctgggtcactttgctcttgtgcacgctttccagtctttcagcgtaagccagagtcattcccaaggatgctggtttctctctgggggaagagctgctctgtgatggagcccatgcgtgtcatctgagcctctggcttccctgccagtgcagccctggcagtgtcctacttcccagggctgttgtctgcctggcgggaaggtcctgggcaaaggatcagtctttgtactctgagagcagactacttggctcctctctgttttttatcagcgaagttggatatatctctcccacatttccctaatcatatgctatatattggctttttttttcttctctagcccccaaatacatcaagatgtttgtactggatgaagctgacgaaatgttaagccgtggattcaaggaccagatctatgacatattccaaaagctcaacagcaacacccaggtgagggcagtcttgcttgaatagctaatgattcttgaaaaatagtaagtgccaggggaaccatatactggattcttgagcctttttatgcatctgcttcagttttaggtgtggctagggaagggagcaggcctcaggaaggaaccagcactctaagactggcctttttttccactaggtagttttgctgtcagccacaatgccttctgatgtgcttgaggtgaccaagaagttcatgagggaccccattcggattcttgtcaagaaggaagagttgaccctggagggtatccgccagttctacatcaacgtggaacgagaggtggggcccagtgcaggaggcgggcctggtagtgagttgttgggtatagcccctgactgatttttgtcccccaacctccaggagtggaagctggacacactatgtgacttgtatgaaaccctgaccatcacccaggcagtcatcttcatcaacacccggaggaaggtggactggctcaccgagaagatgcatgctcgagatttcactgtatccgccatggtgtgtttgcccgctgccagcctgttgtgggtctgcccgtcagaagtgtcctacttgaagccagggttcctggaacccaggtgcctacctggtctgctgcatatttgttttctcttccagcatggagatatggaccaaaaggaacgagacgtgattatgagggagtttcgttctggctctagcagagttttgattaccactgacctgctggtgagtagagggaactgatagcaaaggcagaagggaggatccaaggtgattccctctccaaggggacatcagtgcctctcaggaaagtagcagcttggaatagaatctggcatgcctaaggcctttggggaactgggatgcttatttcctctgccttccttggctgcccacatggatgcctaagtgtcttccctccgggatagagtgtcctccgtgcacatgctgaagagttgtctttcttgacgtaggccagaggcattgatgtgcagcaggtttctttagtcatcaactatgaccttcccaccaacagggaaaactatatccacaggtaagcgtagatctggaacactcccctaccccttcacacctggccctccctgggcttaaagctcctgatattcctcatccccttccttgttttccagaatcggtcgaggtggacggtttggccgtaaaggtgtggctattaacatggtgacagaagaagacaagaggactcttcgagacattgagaccttctacaacacctccattgaggaaatgcccctcaatgttgctgacctcatctgaggggctgtcctgccacccagccccagccagggctcaatctctgggggctgaggagcagcaggaggggggagggaagggagccaagggatggacatcttgtcattttttttctttgaataaatgtcactttttgaggcaaaagaaggaaccgtgaacattttagacacccttttctttggggtaggctcttgccccaggcgccggctcttctcccaaaaaaaaaaaaaaaacactaatccatttccctaacctagtaacctccagatcccagaggctctcctcacctcagctgagctcctttgaaagtgattcaagggactatgtcactcagcctcatttgctggaccaaatctggagggagaacccctaaaacccctaagtgaggttgcccagggggttgtccccaggtggggggaagcaggggagagaaaatggtagccatttttacattgttttgtatagtatttattgattcaggaaacaaac

SEQ ID NO: 10475 - DNA, 2672 bp, Homo sapiens; identical to SEQ ID NO: 10474

SEQ ID NO: 10476 - DNA, 2672 bp, Homo sapiens; identical to SEQ ID NO: 10474

SEQ ID NO: 10477 - DNA, 2672 bp, Homo sapiens; identical to SEQ ID NO: 10474

SEQ ID NO: 10478 - DNA, 1484 bp, Homo sapiens
tctagaaggcactaaaacctcgtcttacttctcccagctaagggccaaagctgccccgtgaggaacctttgtccataagggaacctttcttgagctatgctgaagggtaaccctggctctgtctcttgcaaccaggaaaccggagatcccctgatggctgggacctttgtggtctcctctctctgcaacggcctcatcgccgcccagctgctcttctactggaatgcaaagcctccccacaagcagaaaaaggcgcagtagagccagctactggagtcattccgtttccactcattcacccaacctcagggttctccccatctgagccagcctgctggtgtgacttactcatcctccattcctctgcacttgcagactttctgagccagggttttcttttagtggaaacaaatggttgatggatccagatccttagaaaaggagaggatgggggtagagtctcccaagccaaaattttgacatttgagtgctttcgtaagccctgtacatgtactattaattcagtcattcagccaagcctcctcctctagcagcaatttccagctgtgtaacactatcctgggcaaatgttttaccctgtcctccagcctccctgcttcccttctggccctggaagactgagtctggacggcagagtggagggactgggaggctgtggctgcctccctccctcagcccggctgggactgtctcccggaccccagtgctggggtgggggaagggggacggagaatgactcaggcagggccccagggtggggtgaggaggttcctgctctggcaggtctaggcggaagggagtggagatggggctggttcctgctgcagtgaggggaacagatgggacaataaagactggagactcagttgaataatacaaaactgtttaatactaccaaaaatataattgtatgttgtgcggctctccctggctatcatgggaggactgcaggctgcctctgaactgtagtccaacaggagaaagggttgacagcctggggtaggggatgctgctggattaaaaaaggaggatgaggcccgtcccgtgaggtctgcgtccatgagggttagaggtgggttaggggcatgggggcaccagcaaggggagggttgtatggagtgggagagccagggggcaggtagtgggtataggtgggcagcagttccccctggagcctagggtcactctgagggagggagcacggtgagggggcttccagtttgcagtgggaagagctgcagagagaaacaagaggttagagggcacttccctgggttggaggtgagtctggccagttctgggcagacagggtagagcgtgccacccacccagccctggctacccagcccgctgggcgcagcaggcatggaagccgaccccgggatggagagcccgcggccctgttggggcacgctcgggagcgggcttgcgtgctgcacggctgttttcctcttggggagtca

SEQ ID NO: 10479 - DNA, 2372 bp, Homo sapiens
ctggcgacagggatcccccaacccgaggggaagaaagccggaggcggccgactgggggccggggtaggggacccccacctgccccccggcccacttcgagatacaattcttcatctattagctcaggtaccagacagctgggttcatgaatatgggccaaaaggaaagatgatgggcacctgactgccaactcctcctcttcttcctctgaccagtgctgaaggatccagacagtaatccctacagcctattggacacgtctgaaccagagcccccggttgattcagaacctggggaaccccccccagcaagtgccaggcgccgccgctcccgccgccgccgcactgatgaagacaggaccgtcatggatggaggcctggaatcagatgggcccaacatgacagagaatggcctgggtgagggtgtgcctggggtctggaaagttagagatgggtaggaatcgagggtgggaggttggatgtgtgactctggttttttcctaccctacagaagatgaatcaagacctcaacgtcgtaatcgcagccgccgccgccgtaaccgtggtaatcggactgatggctctatcagtggagaccgccagccaggtcagccaactctggacaccagaatccttcctcagagctgagagaatgggatgctcacccctgtgaaaatcaggggttcgggttcagtgggtgtcttaggctggctaccagaattccatctgaaagtcttaatctcctgccttccccagtgactgtggctgactatatctcacgagcagagtctcagagccgccagaggccacccctggaacgcactaaaccctcagaagactctctttcaggacagaaggtaggcaggcaagatgtgctttaccccatcccttttttgttgttactctggggcagggggcacaaaaaatttcacaaatctcctactgaattgcagaggcagctgtgtctgatggagtttagaccagtgtaaactttgaataggatagagaagaaagtgtggttcacattttctggatcccaagtaagagagactggatcatgagatcagggaaccaacctctggatcaccaaatgccaggagggcttggatggtagggaatgtctcccacctgaatttctactcaccgcttcttgcttttctgttttctttcccactttcccctcagggtgactctgtcagcaagcttcctaagggcccctcggagaatggggagctctccgcccccttggagttgggtagtatggtgaatggggtttcataaaacctccaacctgcacccctcccttctccatctcgcttgctgcccaacaccatggccctcacaggcccaactgacctgcgctggagctgctcttatctaggggggaggggggtggcacagcagcttgggtaccccccaacctccaggagctagtggaggggtgtgtaacagggtcataccccctccctcttgtccaccctacccccagggtaaggggagcctctctccttccccatcagactggatgtgcctttatcctctaatgccccaatctctctctgaacacccccattctccacctgttggtggggggtgctcctcgacccacccagatttgaccgttcagggggcctcccctgctatccctcctcccatcctgtaccccccatttctggggcctcatcactgtggaagacggggatagtaagagataagtgggtgggaggcacggggaaggttttggagtagaaccaggggtgtgtatgaaggggggtgacaaggtccccctggggaggggaccaaccttgtctggtggatgagaaggcgtatttatttttcactgtacagtatttaaaaagagaataaaaaaatccaaatggctgtctggctcctgtgccttctttgtccccagtttggtccatttgtttctctaggactgacctgccctggcccctggctcttgttttctgttcctccacatctgacttctcttcattgtctcttgtcccaaagatggtcttacttctgggaattcctgacattcctaaactccccaggcccaggttctccctcctggttcagaggaggggggcttgtgccttgttgcttctcccctcccccaagtttgctggtagagggagttgggccactcctataccctgagtcacagcacaggctaggcagggctgctcagagctggagctgttcctgtagaagctgagagccaaggcaggctgcttaatccgattacctgaggcctggggcttgggctgggccgttgggcagagtggggagcagggttccctcacagcagcctctggagcccggggtccggccttcttggtggtgttctgttctggctccaggcttttt

SEQ ID NO: 10480 - DNA, 1211 bp, Homo sapiens
tgtgttcaaagtttggcttctgaagggcaccaggagagagatgttgctattcaaatctgagggtccagtctctgcggggtggtatgagggtttgcttgtgaatggtggccagtacccgctttaaaaggcaccatgctagcacagctttaagcatgagtacgaatgcagaggtaacagatgtgtgccttgtcaggactatgcatggttgagaagttggaaatgtaattggaggcaaaataacagacctccacaaggtcgggcttcactgtgccctaggaccaggagggggctgggagtcatggctagaagccagacacaactgcctgtttccagtttgtctcattttgcctccagaggaaggctctaagacatccctgtggctctgtgatcagtcccagtgcagaacttcagagtgggtagaggggtgtgtggggatagttgaggttatggtgggaaccttgggccctgctgaccctgtttcctcctccctagcctttatcctcctcttctacctcgttttttatgggttcctcaccgccatgttcaccctcaccatgtgggtgatgctgcagactgtctccgaccatacccccaagtaccaggaccgactggccacaccgggtgagtgtggaggctccccctgccagctactctaactgctcttgtgcccccaaacctccagaaggaactcatagttccttccaggagtttgattttgatgacccaatccccacgtgcttggaagttcttgaaatctgtccaccttcccatttactgcagttgggagctgtgtgatttgggcatgtggcagatagccacaggagatcaccctcccatgaagacgatctcagatattcaccgctgtccccactctggtgttccctgtgtccattttcttccctctgtgtgcagtccctcatcttatagatacccccaacttctgcctttgttggctgtaggcttgatgattcgccccaagactgagaaccttgatgtcattgtcaatgtcagtgacactgaaagctgggaccagcatgttcagaagctcaacaagttcttggagcgtgagtgtgggcctggttatgtgtcagttcaagacttcgggcaggggactggggaccttggaagtggaacatctggcccctgagtctctccctcccacctctttagcttacaacgactctatccaagcccaaaagaatgatgtctgc

SEQ ID NO: 10481 - DNA, 1520 bp, Homo sapiens
ttgcttgcaataggtgtgcgtcagaagcacccaggacttccatttgctttgtcccggggctccactgaacaagttggcctgcactggtgttttgttgtggggaggaggatggggagtaggacataccagcttagattttaaggtttttactgtgagggatgtttgggagatgtaagaaatgttcttgcagttaagggttagtttacaatcagccacattctaggtaggggcccacttcaccgtactaaccagggaagctgtccctcactgttgaattttctctaacttcaaggcccatatctgtgaaatgctggcatttgcacctacctcacagagtgcattgtgagggttaatgaaataatgtacatctggccttgaaaccaccttttattacatggggtctagaacttgacccccttgagggtgcttgttccctctccctgttggtcggtgggttggtagtttctacagttgggcagctggttaggtagagggagttgtcaagtctctgctggcccagccaaaccctgtctgacaacctcttggtgaaccttagtacctaaaaggaaatctcaccccatcccacaccctggaggatttcatctcttgtatatgatgatctggatccaccaagacttgttttatgctcagggtcaatttcttttttcttttttttttttttttttctttttctttgagactgggtctcgctttgttgcccaggctggagtggagtggcgtgatcttggcttactgcagcctttgcctccccggctcgagcagtcctgcctcagcctccggagtagctgggaccacaggttcatgccaccatggccagccaacttttgcatgttttgtagagatggggtctcacagtgttgcccaggctggtctcaaactcctgggctcaggcgatccacctgtctcagcctcccagagtgctgggattacaattgtgagccaccacgtccagctggaagggtcaacatcttttacattctgcaagcacatctgcattttcaccccacccttcccctccttctccctttttatatcccatttttatatcgatctcttattttacaataaaactttgctgccacctgtgtgtctgaggggtgaacgccagtgcaggctactggggtcagcaggtgcaggggtgagtgaggaggtgctgggaagcagccacctgagtctgcaatgagtgtgggctggggggcccagtgcccgggttccgggaggggaacaaaggctggagactgggtcagtctgcgggctgcatgacaacaagggagggggtggctccattcataactcaggaaccaaccgtccctcctcccctccggccacggctggcacaaggttctctccctcccctgcttctaggactgggctgcttccccctcggcagcctctcaccaaggattacgggatttaaatgtctgatttagcaaggctgagcctccagggtggccatctgctccatcagaaagtggcaggatacctgggttcccaagggg

SEQ ID NO: 10482 - DNA, 1151 bp, Homo sapiens
ctggcctcatcttgggcctgtgttatctcctaggttggctctgactgtaccaccatccactacaactacatgtgtaacagttcctgcatgggcggcatgaaccggaggcccatcctcaccatcatcacactggaagactccaggtcaggagccacttgccaccctgcacactggcctgctgtgccccagcctctgcttgcctctgacccctgggcccacctcttaccgatttcttccatactactacccatccacctctcatcacatccccggcggggaatctccttactgctcccactcagttttcttttctctggctttgggacctcttaacctgtggcttctcctccacctacctggagctggagcttaggctccagaaaggacaagggtggttgggagtagatggagcctggttttttaaatgggacaggtaggacctgatttccttactgcctcttgcttctcttttcctatcctgagtagtggtaatctactgggacggaacagctttgaggtgcgtgtttgtgcctgtcctgggagagaccggcgcacagaggaagagaatctccgcaagaaaggggagcctcaccacgagctgcccccagggagcactaagcgaggtaagcaagcaggacaagaagcggtggaggagaccaagggtgcagttatgcctcagattcacttttatcacctttccttgcctctttcctagcactgcccaacaacaccagctcctctccccagccaaagaagaaaccactggatggagaatatttcacccttcaggtactaagtcttgggacctcttatcaagtggaaagtttccagtctaacactcaaaatgccgttttcttcttgactgttttacctgcaattggggcatttgccatcagggggcagtgatgcctcaaagacaatggctcctggttgtagctaactaacttcagaacaccaacttataccataatatatattttaaaggaccagaccagctttcaaaaagaaaattgttaaagagagcatgaaaatggttctatgactttgcctgatacagatgctacttgacttacgatggtgttacttcctgataaactcgtcgtaagttgaaaatattgtaagttgaaaatggatttaatacacctaatcta

SEQ ID NO: 10483 - DNA, 1171 bp, Homo sapiens
ctgtcttggcctcccaaagtgctgggattacaggcgtgagccactgcgcccagccacgtataattcttacaactaggaaagtcccttccccttcctgagcttcatgtagcttatttgcaaaatcagaagattataaaggattaaagaaaataatgtgtgttaactggagcagagtagacagtgcacacaagttccctaccccagtctctttccaacccacaccttttctagcatcaccccagattggccccatctgatggaaagttctggccagaagctacaacagtgtactctggtgccctcctccctgccccctagtctggaggccgcctcgcctattgaaacatttgaaggaagggtgcgttaatcacgctttctagcctcttggggcacctctcgctcccagtgactctgccttgcaccccgcagactggagcttggggctgctttgatgagtttaaccgcatcaacatcgaggtgctgtcagtggtggcccaccagatcctgtgcatcctgtctgccctggctgccggcctcacccatttccattttgatggctttgaaataaatctggtgtggtcctgtgggatcttcattaccatgaatcctggtaggtggcagggagtggatgggactcctggggtgggaagaactgggtgttcaggggaaataactgcgcatcctcctcttcccccttccatgcgaatgtatatagctaagtgaagtctggctaaagatagcaaaggggagagaaggataaacacaactttccgggagaaggggaagcaatcttactgttttccccaaagggattaataaccacttatgtgtgtatatgtagccctcatcttttaagatacttagctttcttctccctttaggctagctccaagagttctggtctctctgccatctcttttgcagcaggctctagggtctctcattactgtttcctaggaacaactctgggggaagggtctaggacagcacagggataggaaagggtttaggaactgaacaaagaggaacagctgtgatttctattaggactgatgagagctatacacacagaacctggagagatgggaaattgacagctctgtgatttgagtttgaaacaaggccatgcagaaagtaaggaaaggaccagagataagagagaagaccaaag

SEQ ID NO: 10484 - DNA, 1186 bp, Homo sapiens
gcagaagggccttgcctgcctgacctctaccacctacagctgaccactaccctggcttaggaaggaggccttggtgggtcacaaatagcacctccctgggggcagtgtcatcagcagccacagaagcttgcggaacattgcatcatggagactgggggctagaggcctgagtctctgaggcaaggggaaggatgggggccggaaggctagggaatatagagattagattgggaccccaagtgtttgggtccataagggcagagaactatgattaagggagcagaaaacataggtccctgaggagcgagtctgaggtgagggccaacttagctctgacccctgatggacacctgattcttggccttggacttatgctaaaagacctagcttcttgtctatgagggttgggaagggagtgggcctgtatcaccttcttaggccacataagaggaaggaggtgatggggaaacaggatattgccttggggttggcagggaggggaggcttgcagtggaggctacttccaggcttaggcccagagtcagagttcttgcaggggaggatggcccctccctgttgggcccgttcatctagtctggctacctgtgctgctagccaagacctgcctgcacccgcctgggggaagaagagggggcagagtccagagggtggggttgactgtctggtgtcttgataaggttggagaggacacagagctgaaggaagagggtctgcatgccctggtgctaggactcaggctggcttgtgtacagatgtcagggcagctggggcgactcaggccagggagtctcagcaggagcgtcctgtcagaagagggatcacgggtttggggtctactgtagacttactcagatgccatatcatggccccttaccaactgatcgagcctgcttcccaaaggggaaggttggatgaccactttggggatggctttttctggttgccatggaaacaagattctcccatcatatctgaccaccagagccaggtttctccttaatgaggggggcagggagcccaggaaaattctccatcctggaagacccccacctctaactgacttttttcttttaggttccccccagggcaacatgccagccccgtagcactgcccaccccacccactgtggtctgttgtaccccactgctggggtggtggttccaa

SEQ ID NO: 10485 - DNA, 1450 bp, Homo sapiens
cctgacggccggagtgtcggatcctagatggggaccctaggtgggagccgcggggtcacatcggggtcaccccgggctgagctcgtctgaccggctcccgcgcccctcctcccccggccaccgctgccgggctcacctcgctcccattggttccggccaggctgttactgaggcggagacacgggtgatgattggctttctggggagagaggaagtcctgtgattggccagatctctggagcttgccgacgcggtgtgaggacgctcccacggaggccgggtaagcggccgctgcgttttgggtcggcccagtggctccggactggaagcctggcagcgcagccaccccgtccctctgaccggccttttggttccctgccacacacgtcctgactcccagccacactcctgggcctctagggagtggttgggccgggcctccctttggggaaagctaaggccgggccctttgcacaaatgacaaattggtggatgccacagtccgcccatcccagcccctgggccttgactgtgtgctggccagctcgtctcactccttttccttctctctagaattggctgtgaaaggactgaggcagccatctgggggtagcgggcactcttatcagagcggctggagccggaccatcgtcccagagagctggggcagggggccgtgcccaatctccagggctcctggggccactgctgacctggtaagggaaactctggggccgagctggctggatgtacactggcagctctggttttgcctccagtaagagcataatttcttatccccaactcaggctggatgcatcgggcagtggaccctccaggggcccgcgctgcacgggaagcctttgcccttgggggcctgagctgtgctggggcctggagctcctgcccgcctcatccccctcctcgtagcgcatggctgcctggaggcaggtgagaagttggggccctctgtctccaggcacacctctttccatctctgtatccctcaatctgtgtcattctccatgggttcctgtcattctgtgggcttccgtgcatcagccccctcctgcctaggtaggacaagactgctcctttttgccgtatataacagactccttctctctccagatgctcagccagcattgggcagcccccgcttcctgctcccctacccccttcacatggcagtagttctgggcaccccagcaaaccatattatgctccagggtgagtggatatttgaaggttctgggagtgggaggtaaggctggggccttgaaagagtcccctcaagcccaacccccacccacacccccaccccttctgctctgtagggcgcccactccaagacccctccatgggaagctggaatccctgcatggctgtgtgcaggcattgctccgggagccagcccagccagggctttgggaacagcttgggcaactgt

SEQ ID NO: 10486 - DNA, 1099 bp, Homo sapiens
ctcctgccagcaccgagccaaggtcctgcccccactggagcaagtgtggaacttgctacaccttgaggtgaggctggcactgggtgggttagggaggagagccaggctgtgcctgcacccgtgccattttctcttctctctttttgttctcagcacaaacggaactatggagccaagcggggaggtcccccggtgaagcgagctgctgaacccccagtggtgcagcctgtgcctcctgcagcactctcaggcccctcaggggaggagggcctcagccctggaggcaagcgaaggagaggctgcaactctgaacaggtgtgggtataggggggccagcaggcagtaagtaggcaggacttgggaatgggattctcacactctcttctctcctagactggccttcccccagggctgccactgcctccaccaccattaccaccaccaccaccaccaccaccaccaccaccaccacccctgcctggcctggctaccagccccccatttcagctaaccaagccagggctgtggagtaccctgcatggagatgcctggggcccagagcgcaagggttcagcacccccagagcgccaggtgagcccctgcctgttgcctttcacctctcacctacaagtcccacgctctctattcctcatcctgcatccctgtttatctcctataggagcagcggcactcgctgcctcacccatatccatacccagctccagcgtacaccgcgcacccccctggccaccggctggtcccggctgctcccccaggcccaggcccccgccccccaggagcagagagccatggctgcctgcctgccacccgtccccccggaagtgaccttagagagagcagagttcagaggtcgcggatggactccagcgtttcaccagcagcaaccaccgcctgcgtgccttacgccccttcccggccccctggcctccccggcaccaccaccagcagcagcagtagcagcagcagcaacactggtctccggggcgtggagccgaacccaggcattgtgagtgacaactgagggtggagggggggatgggtggagcttgtcttgaggcagcccgagcaatgctcctac

SEQ ID NO: 10487 - DNA, 2611 bp, Homo sapiens
aacacaccgtggaagttcgcacccaggtgcagcagccctcagatgagaactgggatctgacaggcactcggcagatctggccttgtgagagctcccgttcccacaccaccattgccaagtacgcacagtaccaggcctcatccttccaggagtctctgcaggtgagatgagaacgtggccagaggcaggtcctgggacggggctgcggtgggagggctctcgaaaggtctctgacccaggcctgcctaccctctggctgaacaggaggagaaggagagtgaggatgaggagtcagaggagccagacagcaccactggaacccctcctaggtactgtgcaggtgtgccccttctgttcctgcttccttcccctccctctgctctccaccaacctgtgctcttcgccccagcagcagcgcaccagacccgaagaaccatcacatcatcaagtttggcaccaacatcgacttgtctgatgctaagcggtcagtggggctgaggccagggaagttggggcaggagtgctgctaggacctcgtggcgggggcggggtgtagcctctcgtcgcacttccgcaccgcaggtggaagccccagctgcaggagctgctgaagctgcccgccttcatgcgggtaacatccacgggcaacatgctgagccacgtgggccacaccatcctgggcatgaacacggtgcagctgtacatgaaggtgcccggcagccgaacgccaggtgcgctccacgcctgtgcgcgctgatgctggaagcgcgagaggaggggctggcggcggcgctcagccgtcagccaatgagggcagagggcggggctatcggggatcgcagttccgacctggccagccatgccgttctctgtcgacccctgcaggccaccaggagaataacaacttctgctccgtcaacatcaacattggcccaggcgactgcgagtggttcgcggtgcacgagcactactgggagaccatcagcgctttctgtgatcggtgcgtgccgtcctgcgcaagtcagactgccgcgtccccgccctcggtccccagttcccacctgacctgtggccaccccgcaggcacggcgtggactacttgacgggttcctggtggccaatcctggatgatctctatgcatccaatattcctgtgtaccgcttcgtgcagcgacccggagacctcgtgtggattaatgcggggactgtgcactgggtgcaggccaccggctggtgcaacaacattgcctggaacgtggggcccctcaccggtgagagggtggggcaggtgttggcgtggtgtggcgcctcagcggcaagggcctgggaggctggggcttggagagccgccagcagtgagggaaggggcttgggcctaggtgtctgggggctgtttgagagtcctgttgtgatcgcctttggcccgcagcctatcagtaccagctggccctggaacgatacgagtggaatgaggtgaagaacgtcaaatccatcgtgcccatgattcacgtgtcatggaacgtggctcgcacggtcaaaatcagcgaccccgacttgttcaagatgatcaagtgaggaccctatttgggtgggagcccacctccactgactggtcccttttcttgttcttcctgtctgactccaccccatttttacctctctccatccttgtctgcctgtgccccgagtgttactgtgttggggaggctaactaggtccttgctgtcatgaccttttctagtggtccaaatagacaaaagccacaggaaacttcgcctataacagatgcccaggacagaggatgtgacctagacatgaagcggggaggcccctaggggagggccctggggctgcccacccctctgcccttgctccagccctgcctcaggcctcctccttgccggtggtctcaacacaaccccactgctccccaggttctgcctgctgcagtccatgaagcactgccaggtgcaacgcgagagcctggtgcgggcagggaagaaaatcgcttaccagggccgtgtcaaggacgagccagcctactactgcaacgagtgcgatgtgagtgggccggctctgctgctctccctgagtgtccacagtggccctccctccccctgactgcactgtcctccctgccccaggtggaggtgtttaacatcctgttcgtgacaagtgagaatggcagccgcaacacgtacctggtacactgcgagggctgtgcccggcgccgcagcgcaggcctgcagggcgtggtggtgctggagcagtaccgcactgaggagctggctcaggcctacgacgccttcacgctggtgagggcccggcgggcgcgcgggcagcggaggagggcactggggcaggctgcagggacgggcttcgggagcccggccgcgcctttccctgagcccccgccggctttctccccccaggccccagccagcacgtcgcgatgaggccggacgccccgcccgcctgcctgcccgcgcaaggcgccgcggggccaccagcacatgcctgggctggacctaggtcccgcctgtggccgagaagggggtcgggcccagcccttccaccccattggcagctcccctcacttaatttattaaga

SEQ ID NO: 10488 - DNA, 2093 bp, Homo sapiens
ttttttagcaaatatgaggaaaaaaggaaaaaaaatgggagacgggggagggggctggcagcccctcgcccaccagcgcctcccctcaccgactttggcctttttagcaacagacacaaggaccaggctccggcggcggcgggggtcacatacgggttccctcaccctgccagccgcccgcccgcccggcgcagatgcacgcggctcgtgtatgtacatagacgttacggcagccgaggtttttaatgagattctttctatgggctttacccctcccccggaacctccttttttacttccaatgctagctgtgacccctgtacatgtctctttattcacttggttatgatttgtattttttgttcttttcttgtttttttgtttttaatttataacagtcccactcacctctatttattcatttttgggaaaacccgacctcccacacccccaagccatcctgcccgcccctccagggaccgcccgtcgccgggctctccccgcgccccagtgtgtgtccgggcccggcccgaccgtctccacccgtccgcccgcggctccagccgggttctcatggtgctcaaacccgctcccctcccctacgtcctgcactttctcggaccagtccccccactcccgacccgaccccagccccacctgagggtgagcaactcctgtactgtaggggaagaagtgggaactgaaatggtattttgtaaaaaaaataaataaaataaaaaaattaaaggttttaaagaaagaactatgaggaaaaggaaccccgtccttcccagccccggccaactttaaaaaacacagaccttcacccccacccccttttctttttaagtgtgaaacaacccagggccagggcctcactggggcagggacaccccggggtgagtttctctggggctttattttcgttttgttggttgttttttctccacgctggggctgcggaggggtggggggtttacagtcccgcaccctcgcactgcactgtctctctgccccaggggcagaggggtcttcccaaccctacccctattttcggtgatttttgtgtgagaatattaatattaaaaataaacggagaaaaaaaatcctgtttcgctaacggctggtggtagcaggttgagtaccgggagggctgcaagaccgtgattgatggggaggactgcgcagaccctggcgagggtgagcccctccccggaggcgcctgtggaatgtccagggctctggtccgctcctcgggatggggggtgcctaatcctagagccgcattccaggataaggggggtggggagaggctgggccgggggaggggcaggaaagagggctataagggcagcggcccaggcgggcgggatccaggcgggccatggcggatgtccccggggcacagcgagcggttcctggtgacggcccagagccccgggaccccctggactgttgggcctgcgctgttcttgtaacagcccagaatctgctggtggctgccttcaatcttctcctgctggtgctggtgctagggaccatcttgctacccgctgtcaccatgctgggcttcggcttcctctgccactctcaggtgagcgtgcgccccggggtgtgcgtgtgagtgtgagtgttggtgtgtggtgatgctggcggtggggtctatgggccacaacttcaacccgcctgggctgtttccaccccgtgcacagtatcgcctggtcggcttgggcctgacgcctcttctcccacagttcctgcgctcccaggcacccccttgcaccgcgcacctgcgggaccccggtttcacggccctactggtcaccggattcctgctcctcgtgccgctgctcgtgcttgctctggccagctaccgccgcctctgcctgcgcctccgcctagccgattgcctcgtgccctacagccgagccctttatcggcgtcggcgcgccccgcagccgcggcaaatccgggcctcaccagggtcccaggccgttcccacatcaggaaaggtctgggtctaatgaccctcgagtcaagaacaaccctgacggctgccctccctcttattcggcccaaggacttgaagcccg

SEQ ID NO: 10489 - DNA, 2093 bp, Homo sapiens; identical to SEQ ID NO: 10488

SEQ ID NO: 10490 - DNA, 1063 bp, Homo sapiens
catgaacaaaggtggaaacattgctgttggcttcggcagtatctgaatttactgtgagatggagggtttaaatctaaccccatggaatgcaggagtccatgaattatctaaatcgatcattttgatctttaatcaactctgcaattatgtgtaccttgtttgctcaattaaaccctgaactatttgagaatgaaagctatgctgttcctctagtgcaagcctcagggcctgtcctgtgcctacaggatgtccccattctgccaaaacctgtccctcttccagagactcctacttcaatgtctcttgctagaaacacatccctttcctcacacatccagtcactcatcaagtgtaatctgtctcctaaatatctctggaacctatcttcttttctccaagttaccatcacctcttgtctaaactgctacggaaacttcctaacctgttctcccatttccacttctgacttccatgctgcaatgagagtcagctatgaaaaacaaacctaaacatcgaactttccttagcttcttcagtggcttccaactgcttttggaataaagtcctaaattcaaagatcttgtataaatcaggctcatctcgcaacacccctctttgttctctatggcctagacacactggctttcagttcattacatgtcttgcctcagaccctcacacactgtcctctctgcctgcaacactcttcctttcactttccacctagctgatcctaaatgttccttcctcagggaggtcttttctgatttcttggtgggtcaagactttctgataaatcagttagcaccatgcattttccagagtttttattacaattgtaaaattatggctgtaataggctggctgcgctgctagattgtaagctcacgagggcagagatcttgttcacatcttgctcactgctatattctcattgctgagcacacagttgcagctcaataaattttgaatgaactccaatgttaagtgaactcatccgtctatacctagtgggggggatgttgtgtcctagtaggcaaggaaggaccaagaaataggatgt

SEQ ID NO: 10491 - DNA, 1185 bp, Homo sapiens
ggattactgtgaggtgtgccagcagggtggggaaattattctgtgtgacacctgccctcgtgcctaccacctcgtctgccttgatcctgagcttgaccgggctccagagggcaaatggagctgccctcactgtgtgagtacctaatgccagcatctgatggccctgaggaacccacccatctctttcccccttggtttcacttaccctcttcctgcccccagatggctggacttcttagtaacagatgtccgagtgtctaggatcctaatgtattcctttctcccacaatcaacatttctgaaactggagtgtccttttccttagttcccaccagtcttctctgcacttctaggattcaggtgtcctgtctttgcctgtatcttccagtttcattccttaatttcttccatctgtctgtgtgtctatccttggccccctaggagaaggagggggtccagtgggaggccaaggaggaagaagaagaatacgaagaggagggagaggaagaaggggagaaggaggaggaggatgatcacatggagtactgccgcgtatgcaaggacggcggggagctcctgtgctgtgacgcgtgcatctcctcctaccacattcattgtctaaaccctcccctgcctgacattcccaatggtgaatggctgtgtccccgatgcacagtgagtggaaacatctcccctctgtatttactgtcaggcctgatcccttcccccatccctggggcccacatgtccagcttttcatttctctgcactcccccacccttgtgggacccctatcttctcatctaacaatgggttctttctgcctctttctttcctcctccttgtacgtgtccatcccaaagtgccccgtgctgaagggtcgagtgcagaagatcctacattggcggtggggggagccacctgtagcagtgccagcccctcaacaggcagatggaaatccagatgtcccacccccccgtcctcttcaaggcagatcagagcgagagttctttgtcaagtgggtaggactatcctactggcactgctcctgggccaaggagcttcaggtactaggaccttttctttccctctcccccatgacctcatttcctgccatcctctccctctcttactcctctgtttgttgggttcccatactctttgttttctctcatttcaggcctg

SEQ ID NO: 10492 - DNA, 1692 bp, Homo sapiens
tggtgggtgtgggaggcctgagaaacctgtgataggtccctgggatgggagggggactggcttgggggacattggaaacttaggctttgagttgggggcatggttgtttgtcatcagagaacatctaggagcaggtggacagaactaccgggtacaagaaaaacctgatccaactctcacctcctagctcctggggcccaacaattctgcttcctcctgtccacccgagctgggggcctgggcatcaatctggccactgctgacactgtcatcatctttgattctgactggaacccccataatgacatccaggtgggaactcgcatcctagaacccctgcaccatttagcaaggagatgtgggttcatggaggagggtgtcatgttccggggtcagaaataaatctcttctgggaggagagaaggcccttcttcagcagccttctttcctgaggcagctctatgggcagcttctccccggccactcccctgacccacccgccactttctcttgcccctgcaggcctttagccgggctcatcggattggccaggccaacaaagtgatgatttaccggtttgtgactcgcgcgtcagtggaagagcgaatcacacaagtggccaagagaaagatgatgctgacacacctggttgtgcggcctgggctgggctccaaggcaggctccatgtccaagcaggagcttgacgacattctcaaatttggcactgaagagctattcaaggatgaaaacgagggtgagaaccttttctgcagctctgtgaaagcaggcccctgctctctcaggagtacttatcagccccctggggagagaaaaacaactcttctctgcagcctttgaaggaaggagagccttcttttagtagcccttggaggaaggttggcctctttctttgcctgtagggttaaaacaaacaaaacaaaaacctttcaacattggctcccggggaaaaagccttctctagggctcctgtgaaaaggacgcagagtagaagctttcccatcagcctttctaaactttggaacccaaagttcccgtttgttttccctctcaccaggggagaacaaggaggaggacagcagtgtgattcattatgacaatgaggccatcgctcggctgttggaccggaaccaggatgcaactgaggacactgacgtgcagaacatgaatgagtatctcagctccttcaaggtggcacagtacgtcgtgcgggaagaagacaaggtgagaggctttgggggccagacattatctatcccaggccatctccaaaaggcagtatcctttactcagccttgaagtaggagggtctgtcccccttaaaacagtagtggacctcaaacaacttcttcgtctaataggtgagactggacttcagagagaaacgtaggcacagacagtactggtaaacacagaagggtaccttctgagacagtgcaggagaaacactgtcagagggattagaggagagatttagaaaacatgaggagagcacattgcaggtaagagatggcatggaacatgcgcaatgtccagaaaatgtatgcagagccacgaagctgcaggagtggggagaccggattgggctgacgcagcagagtagggatttccttgcagtggaaggattagcaaagaaggagacccccagtgttcattcattctgttgcccttcag

SEQ ID NO: 10493 - DNA, 1099 bp, Homo sapiens
gagggactgagtcgccagcaggtgttgacccgcattggagtcatgtctctcgtcaaaaagaaggtatcagtcttcctgtcacccaaagaatcaagctggctgcctagtctctgtccttcctctgcctctgtccctgagttgtaagcttgcgctggtgtgagacggaggagactggagcttcctgtctgtaagcgcctggagctgacacctaaccctcccaccctgccaccccaggtgcaggagtttgagcacatcaatgggcgttggtcaatgccggaactgatgcctgaccccagcgccgattctaagcgctcctccagagcctcctctcctaccaaaacgtctcccaccactcctgaggcttctgctaccaacagtccctgcacctctaaacctggtaatcagaagtcaggatggtgggagagacagaaagggagccaggagtcagggcgggagaatctctgtctttatcactgtgccttcccctgcagctactccagctccaagtgagaaaggagaaggcataaggacacctcttgagaaggaggaagctgaaaaccaggaggaaaagccagagaagaacagcagaattggggagaagatggagacagaggtgtgtggctccctggattcccctgtggagcgggaggggagggggcttggaggccaggtacctgggagccctctggctcatcctgaccccattgtcctcttccaggctgatgcccccagcccagccccatcacttggggagcggctggagccaaggaagattcctctagaggatgaggtgccaggggtgcctggagagatggagcctgaacctgggtaccgtggggacagagagaagtcaggtgggtgcatggccttaggagtgatgggggattagaatttgggatttccctcttctggggtcaggggatgagggtaacatcctcccttcctatcccctaccccctcccacagccacagagtcgacgccaggagaaaggggggaggagaagccgttggatggacaggaacacagggagaggccggagggggaaacaggggatttgggcaagagaggtaatgggtggaagggaccggacacctgggt

SEQ ID NO: 10494 - DNA, 1120 bp, Homo sapiens
gaatcagccttgcctggcctttaggaacttttgtggggaagagagctttgaagagaggagggggactttagagagggatgaaaatgagccctgggagggaggaagggacgaggaggggtggctgcatgttaccgtcccctacctctccccacgtggagggtggagcagttatgagggaggaagtcaactgctgttcagcctcagaataaaggtgccgttcactggctcagttacctcctgtgtaccggcatcttgtgttgggaatgttcccccctccctagggaccaaggaccacccctacaaaaagagtaatggttgggtgatactccctcaagccaaagaggagctccccaacctgttctagggacccaggtaacctagaagggtgggagagaatacaatgggccagatgtggtggaagcccagctctggggctcaggttcctggaagacttctactaccctccctcctcaaggcctggatacagactaaatttgtataagtcaggcaggggacctagtcagggtcttgggagctaccttgtcgttgggaccagagcaaaatagtggagggcaggctagggaaatgtgggcacatcccccctcccaggaggggccggggagagtggcagtttgcatggcgaaccccccacttcctctttgctgccccttcactttcttgctgcccctttcccagtctctcttcacacccactcctggtctgtcctgatcccctcttctgtatcaggtttattggttgtacatataaattatactttcctttctgtgtgctctgttattttttatggggggggggagtttttggggggagggataagaaaggttgttgctttctgccttttctttttaaaaaaatcctacaactttttccttttcctcatttttatctcttagattattcactaaaactgaggttcttccagccccagctatgtcatggcctctgtagagaaggagggtgagcagcagatacctacgtagcctcaggttgacttcagagagagtgggacttactggacagaaatgtagtgggaggagcgcctatcaagattcaaaactgccttccagccatccttttgatcatcctttccaccttcaag

SEQ ID NO: 10495 - DNA, 1224 bp, Homo sapiens
ccctccaaacctcaccagtaacaggagactgcagcagacccaggcccaggtggatgaggtgagtgtggggggagtcaaaagcagtaggagggaccctgggggttggcgtataggtgtaggggcccatgttggtttgggagtgatgacagttcacgcctgtgggtttgcggacaaagataccatgccccatccctgtctccctgtcagcacgcacttggaagggcgctgggggtgttaatcagctttgctagcctggggtgtgccagcctgggcaggtgtgctctggtgatggacagagcgcctgaggttccatagagggagggtgttgctatgacatctgagatgtcaccagcatgcccctgatgtgtgctccttgcatgtccccaggtgtgctaggcatgttctgtgtgtccttggcatgttaacctggcagtatcagggtgcatgttccatgtgtggcacggtgggcacatgtttgaggattgccctcactgaggtgggccttggcacacccccctgcctcgtgggcccttctcccaggtggtggacatcatgagggtgaacgtggacaaggtcctggagcgagaccagaagctgtcggagctggacgaccgtgcagatgcactccaggcgggggcctcccagtttgaaacaagcgcagccaagctcaagcgcaaatactggtggaaaaacctcaaggtaagggtggggacaggaaggaggacaggtgggtgaatggggtatcatagtttgtcttactgatcctcgcctctcacccccagatgatgatcatcttgggagtgatttgcgccatcatcctcatcatcatcataggtgagtagggtgagaatggccggggccctttccctggagaggtttccccagtggattctaggttttgaaggtcattaatctagtttttactcttcagccaaaaacacatatagctgctaatggcaattctgattcatctagagccaaaaactttgatgttatttagcctgcattttgcctagttcttggcagtcttgttaacatttggaaataggaaagctggtgtatccattgaggaccctttaggcctaagagcccagtctgagaaccctggaattgaggagtgggagaaaggaaaggaccaggggcttgagacatgaccaggaagccaaccaccccattatttgagagcttgcggtctcagaggctcagaggattagggtctgtggc

SEQ ID NO: 10496 - DNA, 1228 bp, Homo sapiens
ggcgcttgtaatcccagctactcgggtggctgaggcacgagaatcgcttgaacccgggaggcagaggttgcagcaagcccagatagcaccattatactccagcctgagcgacagagagagacctgtctcaaaaaaggaaaaaaaaaaagaaaagaaaaagcaagataattcactgggggaatttggggaaactttcctaaactggaagccaagcgtgagcccttctcattccgcctcttccattgggttcccatgacttacgtcacaggacatcgagccaatgggaactaggcatgggcgacgagcttgcccaatggggccggggcgggagatttgaaaagtccttggccagggcgcggcgtggcagattcagttgtttgcgggcggccgggagagtagcagtgccttggaccccaggtgagctggcctcctgtcgcaggccttgcgccgggagtgggcagatgatcaggtagatcagagggtccgttgggctggcctgcgcgcacgccgcagggctggaaggaggtagggacgatagcagggcgggggcggtgagaccagcgcccagattggggctagtgtgctgacctgctcccttttaccagctcgggctagcgcttccggctcgatcggtccaacccctccctctctctctctttttctctgcttctcacggctgtttcccttctccgcccagctctcctccccctttctctctaaggatggcccagaaggagaactcctacccctggccctacggccgacagacggtaaggcccttccctccgtccctgcgcccccatgaccccgcatggcgagttcctgctgggaaacttgagatcctgcaatgagcaatcctttaagcactttcttccccgttatgctccaaagtacgggtcccaagtttgacgacagaacccgctctggtcatttgtagccacatcctgtcaggtgctgccaacgtgaatctgaccagccagtgactcccagctggtgaggacctctgcagggctcgtcacatacaaatgatatctgggactgagcaggcagggcctggccttcaggccatgattcccaatccatatcctgaaaaaaaaaaaactagacagcaaatagaaatagactctaaaaggatataaagttacagtttaaaaggcccagggcaagtctaaattacaatttggaattaatgactaaattgaggtaagaatctaaatggatctaaatt

SEQ ID NO: 10497 - DNA, 1203 bp, Homo sapiens
cccagaggaaggagggtactggatgggggctgcccgagccccagggaaatgacgacaatgatcagaaggtaaactgggactccagggacccaggacctgacctgcgccctgagcctctggctaggatcccagcactttgctctccatcctcccaggttcacctcattttctttggctcttcagtccgctggtttgagttcttgcacccgggacaggtgtaccgactcatagctcctggccccgctgtgagtgtcctacttcatcatacctttccccagaaagcttttttggggttggggtctaaagagggcatgccagtgcctggtcattctctaggcctcctggaagaaggctggatttagatacaccagaaagcctgtgtgtgttgacacacttccttctccatgctccagaaagaacaaaattgggtcagaatgttttgtgaacctcccactggactagcacacactcacaggcagtcgtcttcccatttccgtgcagacaccaatgttgtttgaaaaggatggttcatcctgcatatctcggcgtcctctggagttggctggctgtgcatcctgcctcactgtccaggacaactggactctggagcttgaaagctcccaggatatccaagatgtgctggatgcaaacaagtcattgcctgaatcctcactgaccgacctgctcagtgacaagtaaatgtccaccaagcccctctggttaatttggccactctctcttctcccaagctagctgggtttggtgaagacttcattttctgctgcaggaggtatttcttttgttattgttgtttttgtttgtttttttttgagacggagtctcactctgttgcctaagccagagtgcaatggcctgatctcagctcactgaaacctctacttccctggttcgaaggattatcctgcatcagcctcccaaatagctgggattataggggtgcacgccaccacacccagctagtttttttgtatttttagtagagacagggtttcgtcatgttggccaggctggtcttgagttcttgaccttaagtgagcctcccacctcagcctcccaaagtgctgggatttaggggcgtgagccaccttgtgcgggttttgaatgatctgccacaaccctctttttcccataggccctgttactcttagtgtgcagtgtggcagagctcaggttttttcagga

SEQ ID NO: 10498 - DNA, 1118 bp, Homo sapiens
cgtgagggaaaaggactctggcagagtggcagtgttggggtctcttgtgtcacattgcctgtctctgcacaagccaggtccctgcccagctggtgtggcacagagcccttcggcctggtacagcctatgtgctgacagaactgcgagtgtccaagatccgtggtcagcgccagcatgtttggatgaccagtcagtcctcccgtctgttgctgctgaaaccagaatgtgtgcaggagctggaactggagctggaaggacccctcttagaggctgaccccaagccactccccatgcccagcaactcggaggacaagaaggatccagaaagtcttgtccggtattctagactcctatcctattcggtgagcacagggagagatcctagagcttgaggggccagaaatgtgggttttcaaagaggaagaaaatagtggtcaactggacctcggcctgtttgcagggagcagtcactggcgtgttgaatgagcccgctggcctctatgagctggatgggcagctggggctctgccttgcctaccagcagttccgtggccttaggcgggtgatgcgacctggagtgtgtctgcaggtatgtgagatcagggctgataacaaaaagagacctctgcagcttctcttaccttcataggctccttttctgcagcagggtggttatatagaaatatagaaattaaaagtgtgtgttagggggcacttttgctaaggataacttggacagaagcttaaataaaaaggagtagagtcttgggcactgtgaggaggagttgtggccagagcatctccttcacagaagggcctttcagctggaggaggagatagctgaagcacagatctggggctggggtgatctcaggcgacccggtgagaagcctcagccatgtctgttcatccaggagccacccagcccacagcaagactgagtggagctcatgggagatgaaggctgaccgcagcgggagtgggttgtaatggaaagtgaggccagcccacgtgggagaaattgctttccgtcttcctggaacccaggcagtggcaaagtgcggttaactctgcctgggttcattgagttggggtcttcatctctgctttttcatttt

SEQ ID NO: 10499 - DNA, 1318 bp, Homo sapiens
gagccctgggcagcaccggctcgggggcacagctctggcccagtgcttctcccagcttggggaacaccctccagacctggaccttcctgagaacttggtgcgggccttcagcatcactcaggggctgctgaaaggtgagtgaagacccctggggagatagcgcacagggtgccaggcgtgcagcaggcgttcaccatctgagcagtggggcaaaagggactccaatggacgatgtaccccagatcccctgacattctgacacacactcttgatggactgactccggaaggtggggtggggctgtcaggtttgggtcccgaggttgctgagctttcttctccttcctccagaccgcctcctctgctcaggccacgatgtcagtgacggaggcctcgtcacatgcctgctggagatggcctttgctggaaattgcgggctacaggtggatgtgcctgtccccagggttgatggtaaggaacctggggtctagtctcaggcccgggctgccttctctaccctgcagaccccatttccaatatattaaagagtggagtgccctccagtcccctttccctgagtcttccctgactagcttttctgtgctgtctctctgacagctgaactggatggaactggctgacacccaccatgttcctgactgcacccctctgagacttcccatccctgagatgtccatgatgaaacatcctcagtcctgccgtcctagccctcatcctccctgatccctaccctactctctggctgcatccctctgaccctcaccctggcccttcctgcatttccctgatcccgccccaactcccttggcccttcttgcatccccctgactccccacattgctctcccagtcctgtctgtgctgttcgctgaggagccaggcctcgtgctggaggtgcaggagccagacctggcccaggtgctgaagcgttaccgggatgctggcctccattgcctggagctgggccacacaggcgaggccgggccccacgccatggtgaggaagtgagggagagagcggtgtgcagtgggcagtcagagtggggtggccgcggtccatccctctcccactgtggagggggccatcctttctcctagcccgtgggagatttgttcctcttcctaggtccgggtgtcagtgaacggggctgtggttctggaggagcctgttggggagctgcgagccctctgggaggagacgagtttccagctggaccggctacaggcagagcctcgctgtgtggcagaggaggaacggggcctgagggagcggatggggcccagctattgcctgcccccc

SEQ ID NO: 10500 - DNA, 1178 bp, Homo sapiens
tgtgacctttcatcccagggctggggctgagctgaggcgcttccggaagcggccagacaccttcagcctgggcgtgtgtaatggctgtcaactgctggctctgctcggctgggtgggaggcgaccccaatgaggatgctgcagagatgggccctgactcccagccagcccggccaggccttctgctacgccacaacctgtctgggcgctacgagtctcgctgggccagcgtgcgtgtggggcctgggccagccctgatgctgcgagggatggagggcgccgtgctgcccgtgtggagtgcgcacggggaaggtcaggcccaaggaaggctgggggagggcccgagggttgggggcaagggtgggcatgaaggaccttggctctcacttccctcctccttccatcccaggttacgtagcattttcttctccggaactccaagctcagattgaggccaggggcttggctccactgcactgggctgatgatgacgggaaccccacagagcagtaccctctgaatcccaatgggtccccagggggcgtggctggcatctgctcctgtgatggccgccacctggctgtcatgcctcaccctgagcgggccgttaggccttggcagtgggcatggcgaccccctccatttgatactctgaccacctccccctggctccagctctttatcaatgcccgaaactggaccctggaagggagctgctgactggccacaggggctcacctgggccccatggcttttcacctaagtgggtcctgccccctcccccatgaccttcaggagcaccccatattatttccaaaaatatcttggacagacaaggaccaaaatgccaaaatctcagcggactcgataatctgcctgctgatgttccttctgtggctgtgtctattttcagttctgctctaacatggcatgccctttctcagcccaggaaacagcatgtggttcagagaaaagagcgacaaggaaaagttaggactcctgaggtccgaacaggggcttctgttgcccacttcacaacacccagtgatcaccggtgtgcaattgcctccttggctctgagggatgttttgcgctcccttttctcatcattggggttagcgggtgcagacaaattcagcaatagtatgcagatcagcccctcaccacctcattgttctc

SEQ ID NO: 10501 - DNA, 1283 bp, Homo sapiens
aggccagcctgggcaagattgggagacactccccaccccgccccatttctacaagtaattaaaaatttagccgggcgtggtggcgggagcaggagccactcaagaggctgaggcaggagtatcacttgagtcctggaggtggagactgcagtgagcggtgatcgcgccactgcattacagcctgggcgacacagcgagacctgtcaatcaatcaatcaatcaatcaatcaagaggaggctggcgggagcatgctcgtgaccaccgggggcgacatagaccctaaccctaagtccaaccccaaggcagaccccaccgtcccgccaggcgcactcctaagagcgcggcttccggagcaaagccgctgacccccgcccccagggtcttggcgccgattggccaacgagagcgcagggcggagccaaatcttaaaggatccgggagctaagccagacccgggtggcggtggcagctgcgaaacccagggagccgatgccacgtgacccaatgtggacttcttttaaacctttctaatgcccataacccagcctcagacccatggagcccacgagagactgcccgctgttcgggggcgccttttccgccatcctccccatgggggccattgacgtaaggtgagaaggccggggcgcccaggggcggctgactgggtgggttgtgggaagagaccggggtcaaccagggtctgcctcgcctcactccagcgacctccgaccggtcccggacaatcaagaagttttctgccatcccgtgacggaccagagcctgatagtggaacttctcgagctgcaggcccacgtacggggcgaagcggctgcgcggtgagggaatggcccccggctggccaatggcaggggcggggtcggaccagtgggcggggcccgcggccgacggttaatccgggcggtgagaccacgcacgggccgggagccaggcctgcaacttaaagatgctcccggggaggcgaccagagatgtcccttcctgaccccgcttccctactccaggtaccactttgaggatgttggtggcgtgcagggggctagggctgtccatgtggagtctgttcagcctctcagtttggagaacctggccctgaggggccgctgtcaagaagcctgggtcctctctggcaagcagcagatagctaaggaaaaccagcaggtgagggcccgagagtgtgtaatgtcctggaagggcggtagcggggacgcagagatccaggtaagcatcctgactctgatccccttaggtagcaaaggacg

SEQ ID NO: 10502 - DNA, 1312 bp, Homo sapiens
cctctgagctgtggcccctctgaatcccagggccacagagcagggggcccagtcacccttcctccttgtccccagaatatcctgcgccagacagaagaggggtccagccgtcaggagaatgcccagaaggccctgggtgctgtcagcaaggtgggcagtggggaagctgaagcagggggaggtgacaaggtggtagagagaaatggtagggagcagggggctggccgctggggtggtgacacagctccccttacctagatcatcgagcgttgcagcgctgaggtggggcgcatgaagcagactgaagagctgatccggctcacccaaaggctgcgcttccacaaagtcaaggtacatcgctgcccaggctccccatcttgccctgccccatgttgctgctgccacgctagaacctcctctgcctccgcttcctcgcaggccctgcccctggtctcctggtcacggcgcctggaattccagggagagctgactgagttagggtgccggagggggggcgtgctctttgcctcgcgcccccgcttcacccctctttgcctgctgctctttagcgacctgctgctcatcactcagcctaagaggtgagtcctagggaaggaaggagcccaggctggagtgggcaggaggggtccagcgggacccctgctgtccttctgaacgacctcatccctgggcagtgggcagcggttacaggttctggactatgcccatcgctccctggtccaggcccagcaggttccggatccatctggaccccctaccttccgcctctcccttctcagcaaccaccagggccgccccacccaccgactactccaagcttcttccctgtgagttgtgtttccctcagaaaacaaccttgggacacttatctgacctctcagacctcccccacttccccagtctctctcttctgtggctcctgcctcagccccagaggatcttttgggccaactgtgacacttcccaatatccccaccagatcagacatgcagcgctggctgggagccttcccaaccccaggcccccttccctgctccccagacaccatctatgaggactgtggtgagtatccccctagaggggatgagggaagaaaaagcgagtcttagaggaatatgggggagaagctaaacagaatcactttaatgtcacccacccccaaccagactgttcccaggaactgtgttcagagtcgtctgcacctgccaagactgaaggacggagtctggagtccagggctgcccccaaacacctgcacaagacccctgaaggtgagaaagtctttcattta

SEQ ID NO: 10503 - DNA, 1205 bp, Homo sapiens
agagaaggggtttcaccgtgttggccagactggtctcaaactcctgacctcaggtgatccgcctgcctctgcctcccaaagtgctgggattgggggcatgaaccaccgcacccagcctgaagttactttggaaacaaatatatttgtatatgacagcttgtaaaactgtagtgagaagagcagaatcatatatttctcagtgaaaaagaaacaaatcttataatgaagcacagaagaggctttaagaattactgataccatcttgccttttctcctttgttggtaggaaattagtaaataagccaggtttgatggctaaagagtgatttctggagttttttaaaagttaaaatcttttcttattaggcatccacctaccccaggtttgggaaatggtattgaatgttgggctttcccttgtgttttagtgattatttaaagcttgggagtgtttttttcttatttttctgcaggtggttatcactaggctaaaactggacaaagaccgcaaaaagatcctcgaacggaaagccaaatctcgccaagtaggaaaggaaaagggcaaatacaaggaagaaaccattgagaagatgcaggaataaagtaatcttatatacaagctttgattaaaacttgaaacaaagagcctgtgttttgtgtgtggtgatttaggacactccctagttttcagtggatcagtctcttacctctgatttgttggtctaaaatttttctgaaatcaggactgatgagattttttttatagtgggcagcagcatttgaggatatatcagaagctggaggggtgtcattgagaagaagaaggcctacaagaaaagctagttggaaacacttcctcttgaacctgtcttttaacttgcttactatggataggttgctatatggacaggctatattttttaccttactgcgtaaaagtttgtattgccattggataggaagtcttgctttcaataggataagaagcttctgtgactttatagcttctagatgacttcttcaagctgttcctccagattgagaggtctcgggttcaggttatctgatagacccatgggccccctttaccttgttttctgcacaagtgctggatgagtgccatcaaaccaaaacctaacacgtctttgagttaaaatataaactaaactgcagcttcgtcaggatgaagtgaaaaggtgtgaggt

SEQ ID NO: 10504 - DNA, 1198 bp, Homo sapiens
tgctcccacagggcagtaaacggctttgaccccgctcctcctcctcctggtctgggctcctcgcgtccatcgtcagcgccgggtatgctgcctctcagtgtgtgagtgcctagcctccaggtgggggctcctgccctcctccaacaacccaggacacccacgcctcacccctcggtgcctgggcccagccccgtgcccctccgtctgcctccgcacggctggcagagggcaggctgcatgcagtggcggctactgggccctgcccagccccggaactctgcgcgatatcaatactggctattttctcttctcgccgtagtgccgttggtttcacatgattgcacttttgtgggtcgcaaggtgatacatacgtgtattacttggtcactggatgcagaagtacccattcatcacacctgccccatagcccccactctgctgtactgataggatttagttgtgttttaggacattgcaaatcttctagaagttctcccccaaatcaggtcaatgtgtgccctcctgagctcccacccaggcatctccagtgctcatgatcatgtgtcccccaactccacccctcacagtttgggcctgtttctggcaaagagtcaggaaggttactgaattagggaacattttctgcaccttctgattttacttaagcagctaccattccatggacttgcctcccagagcagcacaatgcccgtctgagccccacgtggcaggagcctctgggacggggcacacacaggcccagcctctgtgctgtctcctcctccgtgcgcctcagactcggggtgagggaggcgggcagcctctcgccagccttcccgtccttcagttcaacgacatctttggagtgtttttgttttctcttccaagggccgtcccgttgtgttaggaagggtgagtggctggttccagggtgggccggtgccagctccggggtggactgaacagcggcggctgtccctgtgcatcctttgattactctcatgctgcatttactgtttacatttgttttattgtacataggtttgtaaacattattgcctgagatatttgtatataacttgggctttgtagcttttatttattcagaacgcatacggcatgttaatgactctgatggtgtcctcctctgggcagctgtataggatcatcatgtggttacaaaaaatacttccctcaa

SEQ ID NO: 10505 - DNA, 2249 bp, Homo sapiens
tcgtaccgccacccccacaaggtcgtgtgtccgaggagggggtgcaaggggaaggttccgtggcattgagtggttgaacatattgacagccatgtgctcctgtctgtttacccacacacatctgcttcctgtgttctccaggcggggtggccccatcagcttctcttccagccgatctggccggcgccagctgcaccttgaaggagcttccctggagctctccgacgatgacacagaaagtaagaccagtgatgtcaacgagacgcagccaccccagtcagagtaaagttgcaggaagccagaggaggcaatacagtgggacagttaggaatgcacccggggcctcctgcagatttcggaaattggcaagctacgggattccttcctgaaagatcaactgtgtcttaaggctctccagcctatgcatactgtatcctgcttcagacttaggtacaattgctcccctttttatatatagacacacacaggacacatatattaaacagattgtttcatcattgcatctattttccatatagtcatcaagagaccattttataaaacatggtaagaccctttttaaaacaaactccaggcccttggttgcgggtcgctgggttattggggcagcgccgtggtcgtcactcagtcgctctgcatgctctctgtcatacagacaggtaacctagttctgtgttcacgtggcccccgactcctcagccacatcaagtctcctagaccactgtggactctaaactgcacttgtctctctcatttccttcaaataatgatcaatgctatttcagtgagcaaactgtgaaaggggctttggaaagagtaggaggggtgggctggatcggaagcaacacccatttggggttaccatgtccatcccccaaggggggccctgcccctcgagtcgatggtgtcccgcatctactcatgtgaactggccttggcgagggctggtctgtgcatagaagggatagtggccacactgcagctgaggccccaggtggcagccatggatcatgtagacttccagatggtctcccgaaccgcctggctctgccggcgccctcctcacgtcaggagcaagcagccgtggacccctaagccgagctggtggaaggcccctccccatcgccagccgggccctcatgctgaccttgcaaattcagccgctgctttgagcccaaaatgggaatattggttttgtgtccgaggcttgttccaagtttgtcaatgaggtttatggagcctccagaacagatgccatcttcctgaatgttgacatgccagtgggtgtgactccttcatttttccttctcccttccctttggacagtgttacagtgaacacttagcatcctgtttttggttggtagttaagcaaactgacattacggaaagtgccttagacactacagtactaagacaatgttgaatatatcattcgcctctataacaatttaatgtattcagttttgactgtgcttcatatcatgtacctctctagtcaaagtggtattacagacattcagtgacaatgaatcagtgttaattctaaatccttgatcctctgcaatgtgcttgaaaacacaaaccttttgggttaaaagctttaacatctattaggaagaatttgtcctgtgggtttggaatcttggattttccccctttatgaactgtactggctgttgaccaccagacacctgaccgcaaatatcttttcttgtattcccatatttctagacaatgatttttgtaagacaataaatttattcattatagatatttgcgcctgctctgtttacttgaagaaaaaagcacccgtggagaataaagagacctcaataaacaagaataatcatgtgaacgtggaatctgttttctcaccttctgttctcgatttcccatctgtgatctgactggagggtgggtgctacacaccaacttcaaatgatggcgccaggccctttttgctgagggcgctgtctcccaggtcagacgacagaataattctcaggccagtcctggctccaactcttgttcctgccagtgcctcacaggatgcacacgcactaggaagggaaagaccacccaaaggcaggagctggcccacctgtcaagggagtgatttaggagggctctggtcaccagccaatgaagctcactgctgggttaggacattttcaggggtccaggacatttcaggctgcattttcaggcagacacgcattgaagatg

SEQ ID NO: 10506 - DNA, 1242 bp, Homo sapiens
attataaaacagccttatctgtggatgcacaaatacggatattttgtgagccaatattttttttttcatcctttcagaaggtgttaatcataccttgggtttctgtagtgcctttcattatagggagacgggaggtctcggagggcttttgaaatgctcaagacttaagcctaatacttgtagagcaggcccacagcattttgcctgttgtctggaagcccttgtggtctctgcaggctcagaaggcatggtgttggtctgggtggcctgggagctgtggagtttaaaatgtccgtccatggtggttggggggttgcgtcctgaagacagaccacaaactcctattgagtgccaggcattgtcctaggtgctttatatgtgctttgtttcaattaatcagattgccacaaggaacggaagcttttcaaagacagatgtcctggccatcaaagggcagcttttacacaaacgggactaagtgtggataagtctgcagggcacgtctcggcttattctgtgacactgttgcatgcagagagagcagggggtatcaggagcgtttgcttggaagactgatcacataaaagccgtgtcctattatagccaactcggagggacggttgttctgaatagtacttgaaagaagtgagctgcctgggccagtcctgtagatacagacgttcacctcaaagatatctgctctcatgaggtttgacttgcgtagcacaacttagtgagctcagtattgcattcctgtctccttactccaaaaatggatttctattgtaaactaagaagtagattttaatttgcgttttaaaagttatatcattggccgggcgcggtggctcacgcctgtaatcccagcactttgggaggttgaggcgggcagatcatgaggtcaggagatggagaccatcctggccaacatggtgaaaccccgtgtctactaaaaatacaaaaattagctgggcgtggtggcgtgtgcctgtaatcccagctacttgggaggccgaggcaggagaattgcttgaaccagggactcggaggttgtgatgagctgagattgccccactgcactctagcctggcaacagagcgaaactccgtctcaaaaaaaaaagaaaaagttacataatttatgtgaatttccccccacatcaaaaggccttggctaggtgtgtattcagccccaaatacattattttgtgccagttctcccctctgatggagagaagggact

SEQ ID NO: 10507 - DNA, 1165 bp, Homo sapiens
cgcggcggctgcgcaagttccagcagcgtgagaagaagggcaagtgcaagaaggcctagcgccgaggcagcgggcgggcgggcgggcgggcgccagggcggggccgagcgagagcgggcgccttggcccggccgccgcggacttggcccgcgagggctttcccaggtggggggagggagggggcggggccgcacggcgcggggggcgggaccctcggcggcccctccccctacccccaccctgcgcgctctgggcgggagccgcgtgcacgcggggcggggtgcgccgccggccgggccctggagaaatgacgagacgtagctacctcacggggctccttccagagcagagacgcgcttccctgggcctgggcgcggccgccgtggaggggctgggggcagcctgccctggggcccgggggcgggcgcagaatcgcacaactggggccccaggcgcggggcgtggatggcgcggagacgtggacgggaggagaactgtgaattctcaagcccgtagtgtgggcggggcgcggagcacccaccaaaccaccacccgacacgcagccgacgggatccccccctttctccccggccccttctagcagttccccgcgggccacctggctgtcacagcctggactcctccatctgaaggggcctggcagcatttggggagtggacagctcctgtccagccagcatgccccaggcggcctctgtctccactgctacctgctgagtgggtcctactgggtgggggcttggggtcggtgagtggttcacctgtggagagaggagaggaagcccctgctgctgcctgtctctgcccctgcccctgcccctgcccagcgtggggctggcccatccggaaggcagtgggcccagggacacccctgagaagcccaagccgggtggtcaccgcctcatgctggagctgcctgttggaggaggcatcgcaaacgcaaaacctcccagagagtttccttttggaaacttggaaccagccctttttatgacgttttccagggggagggggaggggcactggctgggtttacggcagtgacactatttatgtaaatgacatcagctcccgcaaggcccctcagcaatgtcaacagctggaaagggcctgaacgggcttggagtctgcaggctgcgaaggcac

SEQ ID NO: 10508 - DNA, 1272 bp, Homo sapiens
tggcttccctgaatccagcccaaggctagaagacagggcccctctccaagctgtcagcgcccctcggatgcccagtgtggtgtgctgggcgccatcagcatcacaaggcactacgctgctggggcggttgtcctatttctgtctatgccagtgtggtttcttcaccctgcccagaagggctgtggcagccccacgatatcccaccctgggtctgggtctcacgggtgtcctgtgaggggcttgcatttgtggtggtctctgaggccacctcagcaacggagctggcgacacgccaagcaacaaggcatcttgcggaaaattcagccagtgtcctgcccctcccttcggctcagcaccccgcagggcacaggctgtccgcccggtggtctggcccttggggaatgcgtcagggtgaccagatccaccatgctagcagccaggtcactgttgggattgcacggtcgtcacgagctgcctttcctatccacacacccagccaggacccagcccaccactcccgactgcagccccggcctctgcggtgagcaccatccttgggaaagcacccctcctccactccggtgccccactccaaggagcagagggaaatgggaattgaggtgtcccggtttgtacagttaggaagggatgtaaaacggaactagattttgattttgaagagtgtattaaccagaattgtgctatgtaggtgtttgtttgaagaaaaacataccagattagtctttgtttttgaaacagcttccccagttgtcctttttcttaccagctgggtggtctggtgcccctgacagctgagtgcctgctttacggacacgcagtaatgccgaagatttgcgggggaggacatagggctgtccccgggattcacctgctggctgtggtctctgcccactgcttctgtccttggaaagcagggcaggaggcagcatccccaggggcctctatgtgggagggagggacacctggggtcacaacccagggagggagggtcacagcccagggaggctgggagctgctccaaggccctggaactctgcctcagtcgcggcatgctggagaggggtacggacttactttcttggagttgtcccaggttggaatgagactgaactcaagaagagaccctaagggactggggaatggttcctgccttcaggaaagtgaaagacgcttaggctgtcaacacttaaaggaagtccccttgaagcccagagtggacagactagacccattgatggggccactggccat

SEQ ID NO: 10509 - DNA, 1154 bp, Homo sapiens
tactcctggtgacttactgctgcagaataattggtttctgtttgcaaggaacattatcacagcaaagcccagaaaacagaaaggtctgtctgagagagggtttctggggctagggtggagggggaggggagggagggatgtgaaaaatcacatttctgaaaaggcaattagctaataattaattttttaatatcgttgcgtaacaggatgtgtccttatgtgatatatgtacatatgctggtttcgtagcgtatcctttgatacctcatggaaatggtaatgagactaaaccagttaaagagctctttagacagcacagtgctttggggaaggccggaatgaaatgcaggccctctgagggcttctccgacacacaagaagtccctttgtttcctgttttataaaccagaggcatgtctaaaattgcagggaaagtgagagggggttgaagagttggcgccggaggcctggctttctatatttaaaaagagaaaaaattgctagctagttattcgtgcctggatttgataggcagtctaggctgtttttgaagttctgaaggaaggttctctgaagatgtaagcgggatctgtctttcacttagacttaattaagaaacttgctggctttgtctgtagggggcccattacgcgcaagctgcagccccctctgaataggggctcagcctggaaagtgtatacaagccataccgcctttgtgttgtgttgccaaactggaggcaggagcgagtgcgaacgaggctctgccaggggccatcccttgttgttcgtaaacgtgaacccacgtcccaaacagaaagccgaagccagtgcacgggcattcctgagggacctagaactaataaaccttttagaaaatggtgatcatcaacaaaaaagtggtagggggcagaagagtgtgtatcttgttccccagagccctgttcatacatcgcaaggatggactaacaccagggtaaccagcatcctcggaggctttgtgtgtagaccgggttggggggtgggagtggttagagcctggctccaggcacaacctcactcccaacttgattccatccaggccagggcctaattttgccttggtcgctgttcttgtaaccttgagaataatttccccctggtgggctactgtgg

SEQ ID NO: 10510 - DNA, 1225 bp, Homo sapiens
tcactggtgggcactggacaggcatagcagactctcttgtggccacactaggttgtcgcctttcaggcagtgtcccgccacctttgcttcccgctccttctggacattccagagccctgcaccaaacccttacttggtgtctgcacctcctttccctctctccatcttccaatccctggaaaagtctggtctgagtgtgacttgggaagctttcagtgctgctgtttggcccagctcattactttctccctttctctaccacagcaaacacattctccaccatgtcagtctaaagagtctaaaggggccgggagaagcatgagcgaggggcagattctagtcgggagcccatgccctggaaatccatctttcttcatctttcccattgaccactttgggtttgacctgcacatctgcagtgagggcagaattcaacaagcacaactcactggtctttcagtcaacgtgctagaaaccgatgacttattaatctctaattttttggcgcctctttcattgaatgagaattgctttcgtatagttcacattagaaaaatgcctaatatactaaagtaaaccaaacgttgtcacttttctcttgttcttgaaacattgcaaccaaaaaggtcagcacaaaggccttcacctacgtgaagacctcctggtaggatctgtccatgggatggagaaccactctgtccagatctggggttgggtcatgacaccagctaccaattttagaatattatttcttggtttctttatgaaaaatgggtgctagtggtaattgctttgtggcttagtaaactactctgtggatgatttccaaacattcaaagccaatagccttgttattaacaagatattttgagtacaatatggctcattgacttttccattacatctgaggattccagagtcctctgttcatccctgggatagagtgagccctcttgcgtcttccagggtagctcaggttggcccagtttgggccagtccatttttggaggtcactctttcccccctcatcccctcacctccttctctttacccccttcacgtacttcctttctttcttccctctgttattcattcatcaagcaggttaaagccattgtgctaagatctaatctgaggacactataatggccctgtcgtcagggaagcccgtgatcgctcgttttcaggggtcttaccggtcagcaaccttggcattgatacatag

SEQ ID NO: 10511 - DNA, 1194 bp, Homo sapiens
accatctctggcctaagcccttcgtcctggtccaagaagccagcgatacttcttggcattgctgaatgggagaggcaggggagctgagcttgcctggaatcccccatctcccagccctggtgcttgcttcaggggcctggataaagcagctgctcattctgccacatacactcccaggggactgtgactcaggctctggatcactccctccaggaatccctccggctctgtaggacccagtttgaaaacccagtgttatgtgatgctaaatgctgacattccttccctgcctgtcagctttgctctcggaggtgcctaatggcgccagtgctgacctaatgcggccggtgttctggtttgtttctgaattgcgtgttgaggtagttggggggctttgttactctgggtggctggtctgctttattattagtcttggggaaatgatttctctgagaagcagtagaaggtgtaaattatgcttcactgcaaatcatcaagactatatatatattcagctacagctgcaagtctcttgcaaatgaggactgatgtgagatgcagccaagttggaaagggttacggtgcagacaggcagctgacatgattgataatcatgcagtcacctgtacttggctttctatggcttgtggtctggggagaagagcagcagtcatgcttagaggctatactccatctgagaaggctggagggcagcagtgagaaggtaacacctccataggagcagacacagtctccattaacctggtccttagtaaatatctcttgggtttccaccgagccagggaccccacacatggcgtcagcagcatcctctccacacctgatctccactggctccccattgcttgaagtgtcaagacactcctcatctggaccttgcacaaatatggaccctgtacaaactgcacctggcctcactccttctccagcctccttactttccctctcctggggagcgggaagcaacctgacacctctgtgcctttgctcggctgcagcttctgtctagaggcccttctcatccctgtcgagggaatgatgatcttttatcaagatccagcccatggaccccttcctctgtgtggcctttgctctcccccaggcagagtcctttcttctgctggcttgcatggggatctcctgctgggatggcaccaaccacatgggactgcg

SEQ ID NO: 10512 - DNA, 1187 bp, Homo sapiens
acaagagttgtctcaaaaaacaaaaaagaaagaaagaaaaaaacaaccacagtttcatcagcacagcaaaaaggtttttgtttttgctcttggattttgtcgtttggtttttgcttaatatcaaatatccagtcagtgtaaactcgtttataatttggtcctttgatttcaaggagctatgatgcagttcgttgtggggatgtgttgtctccatgtcatacatgtgactttgtccatgtttgcacccagttcaaggaagacacaaccctagggaaagacaaccctccccgccaagcctctcttcccattcttaaacatagggtggcgttattcaggttggaccagtttaaaaagactaacgcatttgtcctcgttgttgggtgttttttttctttaaatttgtaaaacaggaataattgtgttaggatgaagtatgatactaggagaacagggaaaactaacccatcgtgttaaaagtcagaatagtgcttaactctggcaggaggtgagatggttagtaattcagaagggggtgccaggagagcttccagagccattgaaatgttcagtagcttgatctgggtgatgatttacatacataaaaacatattaaactttgaacttaagatttatgccttttactgtttgcaccctataactccaaaagaaaagtagaggggaaaaagagtccctgcaaaaggcagtcttgaaagaaagcaagtctgtgatgtggagaatgcattggacagctctcagcaatttgctgtagcttgggcagagagataaaagctaatgccagcatcaggttgcccaggcgagagaaggcctgaaagaagacagcgtggagaaagtgtcagcaagcttcagcaacagcaggaggcagatggtaggagagtgggcctcaggtgtggtgtggcagagcagagtagccacacttaggccccagagacagtgtcttctcaccctcagttgaaggggcaggaaatcaatcgctctagtcacccctaagctggaggacggacctaaagttgccacagctttgagaggcaaagaagtttgctcagtggcttttagagacttctagggccctgggaccctgacactgaggaggagcaaactgaaggggagagtgggcacattccttgttggctgctgtggtgagcagcagctggtcgttgtcagtcaag

SEQ ID NO: 10513 - DNA, 1153 bp, Homo sapiens
ttatgaatgaggacactgtggtatgagtgtcctcatgagtgaatgagtgaagagggatgttcttgcattgaatgcctagattgcatacaattttgaaacggtgattaaaagtatgtatacagctacctataattattcatatgaaactgttaaaactcattatcattttctttatatttgcatgtgggggttaatttttactgcctaagaactttgttgcataactcccaacattattagtaaatgctcatggttaaattgccctgtctcctttaaaggatttctaagtgctgtttgttaaactttctgtgattaaagtaattcttgtgaagtataaggaaagatgataattttcatatctggtatttgtgaagtttggtaatttttagtctcgtaacggtttttctctaccatgagactaaaaattattggtgtttttgacaaaattattgtgtttttttgacatcttttgtcattcttttccagagaattcggtcaacagtggatgaaaaagaacaaaaacaacttcttatggatttggatgtagtaatgcggagtagtgattgcccatacattgttcagttttatggtgcactcttcagagaggtaggaataaactgggttttagctgactaatgaatatctaattgggacaaatgaagatggcaggattcgattctattcttaaatgccatacattagtaataagttaatatctcagtatcttagtgtttaaccatggtaatttacatattaacttctgactctttttgcggtggtgggtaaggggtgaatcacacgtgtgtttgtgtgtgtgtgtgtgtgtgtgtgtgtgtgtgtattttagtattggtggctgtcatttgtaaatctcatacaaatattttctgttctttaagaacctgaaaaatcagctgacttctaaatatcagcacttttgctatagttttagattttcattgggccttgagcaacgcctcccccccccccccccccccccgccgccaactttatattttaacttttactcatctgtcatcaagtgtatgtctgcatttaatataaacacttatgtgtccctgcccataatcctgaagtatacccatcagacatggaaattaacaattacaatataaattatttttttctaatt

SEQ ID NO: 10514 - DNA, 3104 bp, Homo sapiens
tgcatggaataaaggctgtactcgcctctctgaacttgtagtgttgcggtatttcatagctatgtgtggttgggagcctggagttctatgttctatagaaattggaaaatgttcagtttgggctgtcatacaaacttttgacttttttgttttcaattttcttgcagaaacatccctttattttgatgtatgaagaacgtgccgttgaggtcgcatgctatgtttgtaaaatcctggatcaaatgccagctactcccagctctcccatgtatgtcgattgatatcgctgctacatcagactctagaaaaaagggctgagaggaagcaagacgtaaagaattttcatcccgtatcacagtgtttttattgctcgcccagacaccatgtgcaataagattggtgttcgtttccatcatgtctgtatactcctgtcacctagaacgtgcatccttgtaatacctgattgatcacacagtgttagtgctggtcagagagacctcatcctgctcttttgtgatgaacatattcatgaaatgtggaagtcagtacgatcaagttgttgactgtgattagatcacatcttaaattcatttctagactcaaaacctggagatgcagctactggaatggtgttttgtcagacttccaaatcctggaaggacacagtgatgaatgtactatgtctgaacatagaaactcgggcttgagtgagaagagcttgcacagccaacgagacacattgccttctggagctgggagacaaaggaggaatttactttcttcaccaagtgcaatagattactgatgtgatattctgttgctttacagttacagttgatgtttggggatcgatgtgctcagccaaatttcctgtttgaaatatcatgttaaattagaatgaatttatctttaccaaaaaccatgttgcgttcaaagaggtgaacattaaaatatagagacaggacagaatgtgttcttttctcctttaccagtcctatttttcaatgggaagactcaggagtctgccacttgtcaaagaaggtgctgatcctaagaatttttcattctcagaattcggtgtgctgccaacttgatgttccacctgccacaaaccaccaggactgaaagaagaaaacagtacagaaggcaaagtttacagatgtttttaattctagtattttatctggaacaacttgtagcagctatatatttccccttggtcccaagcctgatactttagccatcataactcactaacagggagaagtagctagtagcaatgtgccttgattgattagataaagatttctagtaggcagcaaaagaccaaatctcagttgtttgcttcttgccatcactggtccaggtcttcagtttccgaatctctttcccttcccctgtggtctattgtcgctatgtgacttgcgcttaatccaatattttgccttttttctatatcaaaaaacctttacagttagcagggatgttccttaccaaggatttttagccccaaatctctcatattcgctagtgtttaaaaggctaagaatagtggggcccagccgatgtggtaggtgataaagaggcatcttttctagagacacattggaccagatgaggatccgaaacggcagcctttacgttcatcacctgctagaacctctcgtagtccatcaccatttcttggcattggaattctactggaaaaaaatacaaaaagcaaaacaaaaccctcagcactgttacaagaggccatttaagtatcttgtgcttcttcacttacccattagccaggttctcattaggttttgcttgggcctccctggcactgaaccttaggctttgtatgacagtgaagcagcactgtgagtggttcaagcacactggaatataaaacagtcatggcctgagatgcaggtgatgccattacagaaccaaatcgtggcacgtattgctgtgtctcctctcagagtgacagtcataaatactgtcaaacaataaagggagaatggtgctgtttaaagtcacatccctgtaaattgcagaattcaaaagtgattatctctttgatctacttgcctcatttccctatcttctcccccacggtatcctaaactttagacttcccactgttctgaaaggagacattgctctatgtctgccttcgaccacagcaagccatcatcctccattgctcccggggactcaagaggaatctgtttctctgctgtcaacttcccatctggctcagcatagggtcactttgccattatgcaaatggagataaaagcaattctgactgtccaggagctaatctgaccgttctattgtgtggatgaccacataagaaggcaattttagtgtattaatcatagattattataaactataaacttaagggcaaggagtttattacaatgtatctttattaaaacaaaagggtgtatagtgttcacaaactgtgaaaatagtgtaagaactgtacattgtgagctctggttatttttctcttgtaccatagaaaaatgtataaaaattatcaaaaagctaatgtgcagggatattgccttatttgtctgtaaaaaatggagctcagtaacataactgcttcttggagctttggaatattttatcctgtattcttgtttgaattcctcctctatttaagatatatacatggaatcgaagtgtttatgtaatagttctatccttttgcctgcaggtcagttgtaataaatctaggatgtgatgatgactttgtaatttgattttctgaaatcagaccctgagaggggaaaatcttaaagtaaattacattaaattatctgtgcatttcacaccagggaaaatgacctccttttggaagtgttttatggctgctttctttttcttcttccttcccatggctaccctttttgcttatccttcttgaaaccacagatgtatctgttaagcatagctttgcttgaacaggtgtcacagtctcttgagtttctttgtttgttgtcctgacctgccccagcattcttaatgctaaaggaagtgggtacagttcttcaacctgtgtcatggtggagaggtacaacttataagtctatctgggc

SEQ ID NO: 10515 - DNA, 1139 bp, Homo sapiens
ttgctgctgtgcagctcttggaattcagctgcagaggcctaggcattagccagtggtggggagcctgggaactggaggctgaggctgcagcagcctctaggagcactggtgctgcagacatttttgtctgggccaaagctgccaaagtcagtgaggatcttttccttgaaggtatctctgagacattgccctgccttgtagtaggccttctaagagccgtgacccaatcaataggacattagaggaaaatcagaaccaattccaaatttggctttggactgctttgttccttcccttctatttcccttactgtgagttagacctgccagaccaacacaggccctgccatgggcttcctgttagcccagcagggctgggcggacccaaactcgtcccccaaagagcgctgtgcacattgaatgggtctcagagcaaagtttttcattagagttttatggaagcccaggccttactgcctgttctgctgtatatatgtgagagataacagagtgtactaacccaccgattactgggttagcaaatctggagagaatattctttgctcttatcttctaagatcctcactgtgtgggtctgctgggtttcaccttctgctgagctgctgtcagcagtcagcctgaagctgtctagatttcctgcagaattctgttatcccagacctgcaagtcatcgtgaggaagccatgctcttaaatagcaattaatcattttccttcccagtttgtctccatcaaagtaatttatcaatgattttttttttttaatgatgggcaataaggaccattttttttttctctagagaaagtggatcagtagccatacaaatatactggtaatttatggtcattccttttagaggggattagtaagtatcccttttattaataatcaaaagcagtttatttcaaatgctatttgataaagacagcaaataataaaattatgctacatctgtgtggatgtagttgtaggtcaggcaggaggttggggggagagtcagagagtcaggcctcttccctcgggcgtggggcatccaattgagctggcacctggaactccaccgcctttgggaagcttgtggctgtctagcaatttcaaactcttctttctgtccaggaa

SEQ ID NO: 10516 - DNA, 1302 bp, Homo sapiens
atatgaacccgttatgccaaaaagaaacagtgtcttggctgagcgcggtggctcatgcctgtaatcccagcactttggaaggctgaggcgggcggatcaccttaggttgggagctcgagaccagtctgaccaacatggagaaacctcgtctctactaaaaatacaaaattagccaggcgtggtggcgcatgcctgtaatctcagctacttgggaggccgaggccgcagaatcgcttgaacccaggaggcggaggttgcggtgagccgagatcatgccattgtactccagcctgggcaacaagagcaaaactctgtctcaaaaaaaaaaaaaaaaaaaaaaaagaagcagtgtctctatgtccacacatgtctgtatatgtatatagatatatatagaaaggacaggaaggggaggctttaggattactttaggtgttcagcagtagaagaccaccttgcacactgggtgggtaaaagaaatctgctcagcattgttctttcatatttcacctcgagctttataaaccctgccagaggaagatctctggggccaggagttcaagaccaacctgggcaacatagtgagacccccatctctaaagataataaataaataaacaaacaaacaaataaaccctacaatggacctttgcaaagagaaattagtcctttgttgtgtaagttgcaaatattttcttccagtctattgtttgtcatttattataataccatttatcttgtagcaatgtaagaaaattgtgtcaggaagtctttctttttttcattacaatttctaaatttggagtcctgcttgggaaggcctttctcaccataagattctacattatcttcattttcttcccctgatgtttttttcagcattttatttttttttacaactaatttaattcatttcctatttatttttctgggtgggtggtcagagtaatggaacatatccaaatggatatccaattgccccaaaactatttattgaataaccaatggacccagttatatttattcccaattcccatacttctttggactgtttattaaaatttgtctaaaattgagtgtctgtctacagaagtccaattaagtgagcgattaatgttgaagatttgagaaacacttgtgtgatgaagtgtctagcagagctctggcactaaatggaagatgttattgtaacacagaaacaaaaataacagagacagtgtggatataaggctttgaaatgcgttgggcagggtgtctggataaaaaagtcatgcttgtggtcgagctccaggtaaggccctg

SEQ ID NO: 10517 - DNA, 1279 bp, Homo sapiens
tgactgaaagctcctatatcattttatatttctgaatctataaaacaaaacaaacaagcctgacagtgtctggaggagccaaaggtggcctccctgtccccaaatatattggctatatgagagtaattttacccctctacgtacctaaaggcacccagttcactagtctgtggggtcctggagcctgtctcttctttctggaggttcaaactgaatagcaataattacgttacccaaagcatgtggaggaaaagtgaaaccagccacggagacgctggcccacgggctcggcctgcggtgtggcctgctttgctcaccagcgtcagccgctcatttccttctcatgaagtcccatctggtcatggggacgagggccgggagggcaccgggtagccttttcacacttggggattaggggagtgagaaaagatttgggccatgcatgcaaagtcaaagtttaaaattttatccttttcaaatagatgatataatatacctatacatgatataatatttgtatatatgaaatctctctatatttgtttaatttgagccattcaatctaaaccaatgtacaggtgtacaatgaaaaatttaaatgcttagttatttttcccaacacagtgtaaagtcaccctcctctgagagtgggatgtgcagagttttgatgttgcagctttgctcacttcctggcaagggcaggtcatgcctcaatttgtaatgggagtctggggtaagggtgggggttgaaagttgttatctttaaatacatgtacaaatcgttgtcaaaagtaacgttattaaaatagatttattatccctgagcttggcatctgttcttgctttaataaacctgcggggacatggccgtcaatctcaaatgcacaccgggatggagcctgaaggtcaccacctgtgtaaagccaggtccctggctgatctctcgcttgcttgtcttttgagtttttaaagctcttctttttacattctcctgggtagggaatatacacaataaatactagattcaacttacttacttacttacttactttacttacttacttccttggaaaatgctctccatttgtcgagcactaatccacgtctgtaaatcccgcaaggaggacaatggaaaccagccccgtgtgccatttctcaaaaccttcgagggcaaagtgatcctcactcctctcagtatggaagcaacaacacagcaaatctattgtctccacttttacccagaaccaccagaagacttgcatttccctgaccaatgaca

SEQ ID NO: 10518 - DNA, 1155 bp, Homo sapiens
ggaccacaaagctggagcctggaggaggcactgccacgttgagttggccctttggctgcgtcttttcctccgcttccaaacttgcccagagcttttgttactcatctctggctaggaaatggttttttgcaaaactcaacatagtccttctgcgccacaagaatgtcttctcttcctgttcagttcctttcctgcagcaggacaggtttgagtttacccagccttccttgagtcttgaatctcacacggcctgctcagcggaagctttgaccggatgcaggaggtgtggctatgagaccctcaccttggtctcctggggtgccgggccctgggccgttgccctcttcccagcacgggtcgtgtcgctttctgcctgtgacatttcagggccatggcgcagggggctcggcctgtgccacccccactgcggctgtgttagaggctggtgggtgacgtcgggctggcaactcctgcaagagagagggctgcagaccctaacccggaggggatggccctggggcctggctgacgcatgtctcctgtttccttgccagggcttgccaagtatcttgctgcagagagaacgcgccttggtaagtgtggcacttgatgggcgttctgagtttcagcggtttacacatcatccgccatgcctcttggcactccagtttttattgagatgttctgtcgtcgagtcggcacttgcattttttgttccaggcatctttgggaaagccgcttcaccctttgctggtggttgcccccaaccagctcaaagcctggctccagcagtaccacaaccagtgccaggaggtcctgcaccacatcaggtgagcatccagggcagcctggcccgctgggctgttgcttgctgccgtctccttcagaagctcaaggtggacactggggtagttaccaatatcccccagcagccttgcccttgacatggtcccagatggcagaagcaggggagaagtgcattggctgaaggacagaaaccattagatagttcccatgtaatgcttattttcttagaagcatttcttcccagtcctcatttgagttctgagctgctttctaaacttcgagcagcttttcttgatgagacagttccagagccaagcacccaaatagtggctagcacagagaatgtcc

SEQ ID NO: 10519 - DNA, 1206 bp, Homo sapiens
atgttttatccatttcgtagcttttttactgtctccagaaagtagtgtgggacctgcacttaggggaataccagaatcatagcgtggttctgccttcttgatgagtgattgtgaaaaacacctgcataagggtgctaattggttgtgtattttttcatttatttgaaatcaaactgagaacacctcttttcggtttacagcataacatggcttgaagtaaaaggcagtatccaagtccttcacctggtcttgccctgtctactttctgatcattctgatggtctgatgtggctgttgatgtggaactgcagaagagttcagagaagagtatgcaacaaagccataggaaaacacacaggagcttttccctccccttcaggtccccgccctctttccaagctggacaattttttattaagttgtttattccctgccttaaaactgaaacaggaaattttctggtagaaggagggtcatttagtcacgaacactgaagtgggtcaaaattctattctgggtcaaatccttgaattcaaacagatgtccataatcagtactgatggaatagagcaagtttttctatgtaagacaaataaatcaaacatcatgtgcatctcctcataagggtctgcaagggtctgatggtttaaagttcctaacagatctggttgcagcatctgccggagcttgcaccccatcatcggacggtcatcttcctgctgcagaagttaggtaacataagacttagatttcttcctgttctagcaatctgcaagaccaccaggcttaactttttagctgccagaagacaaacccccttttctgtttcggcaatttgtcctggcacgtgttttggacttcctccgatttacacgaaaagctctgatattcattggagtactttattttttttcctcagttttgtttcttttctcatgtaaaaacaaacaaaaaggtcaacaaaaaaaaattgaggtttttcttgtttctatctagttcatgctttctttgcggtgtttgaacagtagtctgttaacttagtaggtggtacctggaaaggtattttaagtatagtgactgtttaataaatacttaattggatgatggaggaggagaaattgttttcttcccaggattctctttgggggtcattttgtgtgacagatatattttagacatttggagaaacagtttcagatcctgcca

SEQ ID NO: 10520 - DNA, 1171 bp, Homo sapiens
gactaaccatttttattggtgaaaaaatagaagttcaggggtaaaacaatttgaggttatgcaaatatttaaaatcaatcagatctgtttgactctgtctcttgctccttaccattctttcgttgtttaattgatagactttctaggatgtcgttctgttcccccactttgaattggattttattcctactgaatacaaggggtgcaaaatagggaggacttcaaaatctggttccaatgccttcccattttttgaagaatcaagctattgcatgtgactgcctctaaatggcctgcatttctctttgttggtaggactcacagaaaacactggacttccccggaagctacttgaaaaacatgacccctggccggcctatgtcacctatacctctcagacagtgaaaagactcattgagaaaagcaaaactagagaactggaatgcatgcgtgccctcgaggaaagaccctgggcatcaaggcagaataaaccttccagcgtcattcagccgaaaaggaggaagtcttccaagtcttctggcaaagctgtgttcagggacacgctgtcagaatccacgttatcaatgtggggcgcttattcggtattggccatggctcctaccatgatcccagaacccacacacttacatgcggattccagagactgtccaactgaaaactataacaagatcatctttgcccgcaagcctatgatgaggatgctccctacagttcgctactgaccaacaaggagaaacatgcaaatgttttagccaggggtccctgcagccattccccaagaacgtacaaaagttaagctccatttaccactcacttgacagtgtcctttaaatctgaacttgctcttgctcatgcggagcttggctaagagaaaccagatcagaatgcaagctgtaggtgggtgggtgagtgtgtcccctcccacactgctctctggtgggtttgggcagtccctggctctagtctctgctgcagattctcaggaccaaaatgtgggtgatttgtctgggtccaggcaggagacagaaatcacacaagctcttttattagagataatataaagaatgattaaccaggtgacagtaaagggcaggaagggaatacaaaggtatccatggaggtagcaccacaggaagcaggcatcacactt

SEQ ID NO: 10521 - DNA, 1171 bp, Homo sapiens; identical to SEQ ID NO: 10520

SEQ ID NO: 10522 - DNA, 1804 bp, Homo sapiens
tatccatggatttacttcattagcgcatgtctacttttttatttatttattttttttgagacagagtctcactctgtttgcccaggctggagtgcagtggcgcgatctcggctcactgcaaactccacctcccgggttcatactattcttctgcctcagcctcccgagtagctgggattgcaggcgcccgccaccacgcctggctaattttttgtatttttagtagagacggggtttcactgtgttagccaggagggtctcgatctcctgacctcatgatccaccctcctcggcctcccaaagtgctgggattacaggtgtaagccacggcgcccagcctagcatgtctactttttaatgtgattgggccattgtatgtaaggtaatgctctgcttagaaatatagaatgttttcctaggcctaggccccaagtccatggtgtgtgaagtgaaataactttgatgttaaggagttctttttttgtcttttgcggaacactggagatgatcagacttcctgaatagagaaagcttatgtgctttgttacattggggaacaactgaagagattcttgactcaaccttttagagcttagtccatgttgcaacgaggagtgttggctttgtttttccacttaaaaactttatttataaaaaggaaaagtagttttcatattaagtttttatttcctttccagcagttggggctagaaagtatatgttggcactagaaacattgttaagatttgttctgtggtgtaggtatgcacattccataggtatgcacacggccatgtaatacctgtatatcccaagttaatgaaagtgttcatttacacagataatggagacctttgcattttgatccatagaacataggaggatgttcttagtctgtctcaaagctctatatgtttacatattatttctgtagattgttttcaggagaaagttttgcttctatggtaagagtgagcactttggcttatgtataagttagaaataattgttagtttttaatatgtacttcatggggaaatttcttagacgtatgcaagcaagtgaaaacaattagggccagtggtattaactactttataaaattttatttttgtttgtaagaagttatctacttaaggcccagttaatataagtggaatcatcatagtttaaggaatacccagagattgctgctattctatttattttacagaaaggatagctagattgaaagttcttcagtggaccttgagctaatagatcttttaccactaaaagagcattattctcatgtcataatgagaataataatttacatacttggcataataaatgcctaaaagacattttattttctgaatctatttttttcttgctataatggggatattgtaaattatgcatttgtattaatggtatttcttaaagcaatctatgtaactgtaaattaaaccaatctacaaactattgtaggcatctgtaaattctgttgtaggtattataaactttgttgaagtcttaatcagcagattatgttgtgaatatatttgtacattgttaaaatagtttttaagattatttgtttaattgaataagtgtcttattggagtgatagctttgaaggtgcaaaactttatatttgtataaaattctactatttacaaggcatttgacatgtgtaatctcatgtaaccctcatgataaatatgtaatactttagatgatataactgaacttcaggttaatgagtgactttcccaaggaaaacagattgcaggaatatctgtaggatataaaacatgat

SEQ ID NO: 10523 - DNA, 1148 bp, Homo sapiens
gtttcactgtttgatgcggaagaggagacgactaatagaccaagaaaagccaaaatcaggtaggaggagaagttgcatgagctgtgttagtgtccagtgttgttctgtatgtatgtcagtgctagctgatgggagtcaaggcagagttgtttcaatgtgcttgtgaatactgcatgttgctaatttaacatttagtgtaagacaaagatgacatttcagattttcttgtgaataattggcatacttaatactgagttttaaaatcagcaaatccaattatttgaacacctgtgtttttaattctgtgctattttccaagaatgtaccatttctttatatagtttctgtagatactttacattttgatttattgtgcacatttcaaaatcacataacatttctattctaaatttaattctctctaaataaattcacttatcgaaagcaaattctacttgaaccctgctaaaatgctgttttttacttttctttcatctttcatgccagtcacaaaagaccacatattgtatgatttcatttatatgaaatgtccagaataggcaaatctgtagagacagaagatagattagctgttgctagaagctgaggggtttgaaggtaaatggggaatgactgccagtgggtgcaaagattctgtctggggtaatgaaaagttgtaaaattggagtgatggttgtacaaatctgtgaatgtactaaaaaccattagattgtttaccttaaataagtaaattgtatgatatgtgaattatatctcaaaaaagctattaaaaaacaagaaacaggctgggcgcgatggctcacgcctgtaatcccagcactttgggaggccgaggcaggtggatcacgaggtcaggagattgagatcatcctggctaacatggtgaaaccccatctctactaaaaatacaaaaaattagccgggcgtggtggcaggcgcctgtagtcccagctacttgggaggctgaggcaggacaatggcgtgaacccaggaggtgaagtttgcagtgagccgagattgcgccaccaaactccagcctgggcgacggagcgagactccgtctcaaaaaaaaaaaaaaaaaaagaaacaaacaaactacctgataactttgtcttaatgtctgagtg

SEQ ID NO: 10524 - DNA, 1148 bp, Homo sapiens; identical to SEQ ID NO: 10523

SEQ ID NO: 10525 - DNA, 1197 bp, Homo sapiens
tttcaaaaaacaaaaaccaaaccaaccaaataaaaaacaaagaaggcattcagaggtagaacgttctgagaataacagagctggggtagagggggaggctgggagccagaagcgttaaatcttctgtcactaaggggaatgactgggaggctgtagaagacagccaggaggagaggaggcgtggtattttggggcacataaggggagcagggtttgcaaaggggctggggaggggcgatggtctagatgttgtgatgggggctgaggaggactcccatccacctaggcataggaaatgagagaaggagctacacgggttgagaggtggcaggagaaattgtctttgggggacattcaagttttggttaagacaaggagcaaagcagaatccgaggagagacagagtatcaagatgccccagggctcagtgggagcaaagtggggtggtgactgtagagcctttgaagcaatagggaatttgagttcaaaagaatcatgtgactttctagcctcaatatttgggtgctgggggtttgagcatgggcatttgagacttgatgggatgtgtcactgtccctggaagcaggatcagagcttgggcctagtggtgttctgctttgagggttggcattagaggggacttagaagttgtggtgaattttgtggtcccagagggctgaagatgagcctccagaggggccaccactcctaatcccatgcccctgccaaatatcccaacctgagcatgatgccgtctcccattgagctcggacatgcacttagaccccaccgcaacataattcctcagagggccaaactagaaattgatttaccggccctgacttaggacaacatactcatttcatggacaaggaaactaaggttaagtggggacacgcgttgggcgcggtggctcacacctgtactcccagcactttgggaggccgaggcgggcagatcacgaggtcaggagattgagaccatcctggctaacacggtgaaaccccgtctctactaaaaatacaaaaaattaaccaggcatggtggtgggtgcgtgtagtcccagctactcgggaggctgaggcaggagaatggcatgaacccgggaggcagagcttgcagtgagccgagatcatgccactgaactccagcctgggcgacagagcgatactccgtctcaaaaaaaaaaaaagagag

SEQ ID NO: 10526 - DNA, 1231 bp, Homo sapiens
atacaagttctttgtgctatttgcaacacttcttatgtctaaaattatctcaaagtaaagctactatgcggaaaataatctaagatttaagaaataagagaattaagtgctgccgggcaccggggaggcaggttggtgtacgctgtgcgcggcggacgtcagaggcagcggggagcggagcggggccgccggggcctctccagggccgcagcggcagcagttgggcccccgccccggccggcggaccgaagaacgcaggaagggggccggggggacccgcccccggccggccgcagccatgaactccaacgtggagaaactgcccccgcacatcatccgcctggtgtacaaggaggtgacgacactgaccgcagacccacccgatggcatcaaggtctttcccaacgaggaggacctcaccgacctccaggtcaccatcgagggccctgaagggaccccatatgctggaggtctgttccgcatgaaactcctgctggggaaggacttccctgcctccccacccaagggctacttcctgaccaagatcttccacccgaacgtgggcgccaatggcgagatctgcgtcaacgtgctcaagagggactggacggctgagctgggcatccgacacgtactgctgaccatcaggtgcctgctgatccaccctaaccccgagtctgcactcaacgaggaggcgggccgcctgctcttggagaactccgaggagtatgcggctcgggcccgtctgctcacagagatccacgggggcgccggcgggcccagcggcagggccgaagccgggcgggccctggccagtggcactgcagcttcctccaccgaccctggggccccagggggcctgggaggggctgagggtcccatggccaagaagcatgctggcgagcgcgataagaagctggcggccaagaaaaagacggacaagaagcgggcgctgcggcggctgtagtgggctctcttcctccttccaccgtgaccccaacctctcctgtcccctccctccaactctgtctctaagttatttaaattatggctggggtcggggagggtacagggggcactgggacctggatttgtttttctaaataaagttggaaaagcaaaaaaaaaaaaataataataataataagagaattattcccttaagataaaataatatgtaaaaatcactaagtagcccctaagtagaaaagacattatgaggaaaaatgaa

SEQ ID NO: 10527 - DNA, 3074 bp, Homo sapiens
aatagtggagggttgagatgtagagtttttaaaaagtgaacagttgctgttcttacatctgtaaagaaaaccataatgtctttaaatcactcttctgtaaatagatgacctttttgcagtgtatatccccttgctgtagtatctggtgtacttatgttcaaatcagcgcatcaactttgggggtgatttttaaaaatctttttgtctatctatctttttaaccctagccttctaaacaacctcatacagcccagttacataatgttggctgtcacgggcattgtacttttatctgatattgtttcctctaaattcagctttccagtgatgtttaaaatcttgtgaaaatgtttagatttttaacacagaccctgtcataaaatctgtacattagggtcaaaaggtaaaagtaacaaattctgccatattgtaaatttccagtgcaggctttaatttttttttttcattagtagcactgaaaaaatattactgcatgggtatgttctagttcagtttataaagttttaaaggcttatttgaggcatacctcactgttacgcacactggtaatttaaccatgcccctaagtattccttttctcctgcatttgatgcagcccaacaaagcttttgttttgaaataaatttgactaccctgtccatagctacagtagattatttgtggtttaaggctcctggtgtctcaggttccaaaggaaaagcttacatatttttcccttagtttgaatatatgattggttgggttaaaagataatgatctgtgtagtatttagataagctttatgctgcatcctgaaaaactcatggtgaacacagtcctttttccccatcactatggaccagcatttactctcactttgctcccttgggacaagagtttactgttaaatgttttcatttcacagagtctcaaggtgcaaataatttaaaagactgaattctaaactaattatggtactagagggccagttttatctttcattaagaattgcttgctgaattttaaagtttttttcatacaatttatcatagcatttaagtatctttctataacatagatactaacagttttgggagaatgccactggtaactggaaaggggagaaacagatctctcaggatgataaaaattagcactttacagactttcaagtagacctaaacttttaaacaaaagtactcaaggcttttaaggaagcagctctgtgattagctactgaccaagaccctcctatcactggtgtctaatccctatgttacagatgaagacacaggtttagtactttgcccatatagttaaattagtgacagagataggccataagcccacatttgtcttcagtcaaagctttcactcctgtccctgttccactcctgtatacctgaggtccccaacataaactttagatcaggcttagtggtcagcattcctagtacttggaaagttggtattttttacaacagatatatgtaaacatataaaaatttcaaaatgaatgaaaaacagtgactaaatgttccacttcacagttttctgctgaatttttttttttcaggtactggtaatattttagagtttgttaataatttatattgccaacctaccataaaagagattatgatggtatttttctatgaccctgagggtcttaagctattctgagtcagaatacagttgacccttgaacaacacgggtttgaactgtgtgggtccacttatacatggattttcttccacctctgccacccaagatagcaagaccaaccccttctcatcctcagcctattcaacatgaagatgacaaggatgaagaccttcatgatgatccacttccacttaatgaatagtaaatatattttctcttccttataatcttaacaaacattttctcttctctagcttactttattgtaagaatacagtatataatacatatacaaaatatgtgtcaatcgactatgttatccgtaagacttctggtcagcagtaggccatgagtagttaagttttggaggagtcaaagttagatgtggatttttgactacttagggggtctatgcccctaactcctgcattatttgaaggtcaaccgtatagtttctgagaacatgtcagatcagagcctaacttcttactcttgcagttctacctgaggacccgaaggtgaggtgctgtgaaccactccctccatcctcatcataatgcatgtgcgtattactttatttaccatcacctggagaagaaatctcagaatgagagttaaaatccaataatagttcttggttcaaaataaatgaaaggacagaattctcacatggtttacctatggaggttcaccttatcatgatttaagtggtaagcacagagcagcactgacaacttactgtggttcactgcaaaccaaaacatgatattctttgtagacttagatttcagtgttctgacactatatccttacacgtgatttttttagcacccagaactaaattaaggtcttcctaatactcttcataaaagtattctgacagccagttttccactgcatgtttatgactgcaaatttcataatgcttttaattttggtacactgagtgattctattttaaaaatatttatgcccagaaaactccagtgaccattggacagttaaaaaattttaatgacacgattttaaccaattcacttttgaatttagaccaatcagtaaaggagatcagtcctccttttgcttcagtaccttattttacaacagtgtaaatgaactgtaatgaaaacacccacatgaagagactgtcctgaaaactcctagtgtttccaacaacgagaccatgagctgagtcactgtggatgatttaaaattaataaataaataaaacttggaatgaaaaacctttcagtaacccctgcagttgtgaaaaggtaaaaacattctcaatgcaaaaggtgagtggttgacattaatttttttaagaaatcaccatacgttaatactggtttctactgaaacagtctgatttatattgtatcttatctctctgagctagacttggtaa

SEQ ID NO: 10528 - DNA, 1140 bp, Homo sapiens
cccctctgccataatatagtgtaactagaacctatgttgactcacctgataaaacttcttgggtgtcagtttagtactgaagtcctttatctttaacttgacgatgaaagaactggtcagtcgactcaaaataggtaggaaaacccttgaggtttcacctggactaaggagccaagggtgagatggtgtctgatgttgaaggacatgcggagcctcaaggacgcagcttctgccactgctgctgcccgggcagcactgtctgatgacgtgactcctggatccacggggcgcgcatgggtcaagtggcagtaacacagtggttttttttgttgttgtttgtttgttttaactatgtatatagtgaatacctgaggcaactttttttctgatagaaattggcagcttttgctccttctcctgaatgaagtcatgagttaacaagtttctgtttaggtaagtcccaggttagcctttgaaacacaatctaatatttcacatattacaatagtaggcctggaaaatccccagagaggagtcacgtctcttcggagccctacgagcccatctccccaccccaggttccggttgtgcatgagaaacaggacagcttgctgctcttgtctcagaggggcgcagagcctgcagagcagaggtaagtgtgcttcctagtgacagcaaccattcatggcgtgggtgctcatgctttaacatttccttcagttgttgccgtttttctcagaactttgggcttttatgtctggatggcattcttagaggatcatttgtctcttttcctactcatctaatgctagtgtattttagcaaaaagaaaatatttataatatcatatttaaataggttagaaaatatttgttcattattcttgaaattaaatctttctagattttttttttaatgtttttgtctaggggaaagggtcatccattgattcagccaacatttgaatgcttactgtataccaagcactgtggactctgaatagatttaatcttacctatttctaaccgtgaccccaaccctattaattattaaattatccccatttgactagatgcctttgagttggctcctttccagtcagtctccatacctccacctgagtgatttgtctaaaactca

SEQ ID NO: 10529 - DNA, 1190 bp, Homo sapiens
ggtttctccatgttggtcaggctggtttcgaactcctgacctcaggtgatctgcccacctcagcctcccaaagcgctgggattacaggtgtgaaccaccatgcctggccttgtgtacttcttatcatcaggttttcttatgtctatagcatagagtgtggaatgtgggaaagtatgcagcttgggatcagtggggttgtgattgagatttgtaaacagaccaaaaaagatcaccacagtgaactgtaactgccatgggccagacatagacctgagatagaaaagtagccagatgactttgctacctgtaatgtttgtttctttccctttagggcacaccaataaagtttgacaacaactcaggtcaatctgccatcaaacacaatgtcaaatccttaatcacggggcctagcaaactatcccgtggaatgcctccgctggaaattgtgccagagaacataaaagtggtagaacggggaaaatatgaggatgtgaaagcaggcgagaccgtgcgttcccggcacacgtcagtggtaagctctggcccctccgttcttaggtccacactgcatgaagctcccaaagcacaactgagccctgggatttatgatgacaccagtgcacggaggacccctgtgagttatcaaaacaccatgtccagaggctcacccatgatgaacagaacttctgatggtatgttacttttgttgcttggtctgatactttttattgcatttaaaaaaaaaaaaaaaaacctttgtcaagtagtaaatatcaaattgtcagctttagagtatcccaagatctacaggtcttgcttgagtctaggagtatggaaggctactaatttaaaagtaggcataatttaagtaaaatacctgatatttaaatcaagtgcagattatgatgcagtccagaaatgctatagagtaagtatatttttagagtggattttcagccaattgcataaggttttctggaagtcagttttgacattgttccttcagcggcagtgtggtgtgaaagctgtaagtagcctctggaacaagactgcataagcttgaattaacattcttactgcatcaactcagatgagttacttagtttttttgtagcttagtttcctgatctgtaaaatcataatgtaacattaagacctacctctctggattgttatgaagatcaaataag

SEQ ID NO: 10530 - DNA, 1246 bp, Homo sapiens
tctgtaggaaactttagccttctcaatggctgtaaatacttcaatgaggtcatcaaaggagtagaattcatcctaaacaactactttcaaacatggtttctatcaccacctgaaacatgttcattatcagatttttatgctgtatcattatctttaaggtgcagaaaatagttctgatacagaaagtgctccttctccttcaccagttgaagctgtcaagcccagcgaggacagtcctgaaaatgctacttctcgaggaaacacagaacctgcggttgagcttgagcccaccacggaaactgcacccagtacatctccctccttagcagttccaagtacaaaaccagctgaagatgaaagtgtggagacccaggtgaatgacagcatcagtgctgagacagcagagcagatggatgtagatcagcaggagcacagtgctgaagagggttctgtttgtgatcccccacccgctaccaaagctgactctgtggacgttgaagtgagggtgccagaaaaccatgcatctaaagttgaaggtgataataccaaagaaagagacttggatagagccagtgagaaggtggaacctagagatgaagatttggtggtagctcagcaaataaatgcccaaaggcccgagccccagtcagacaatgattccagtgccacgtgcagcgctgatgaggatgtggatggagagccagagaggcagaggtgaggctcgttccataagtcctccccgtgcttactctgctggttggtgactgaatcacagggtggtgctggctgcagacatgtctcctatgtaaatattggcacgttataggtagtctgtacaattttaatattgggctgatactgttctgtttaaataaccacaaactattgtatgatcattttaatgaaacagattatacatttctcctatatctgtcttgttacgtgtattctgtatgatagcataacagggaatttcaactaataaagttgtgaataaaccacagataactgttgtgcctgaggagggcagcagtgggatgtggtagaagaaggtggaggctagaggcattgaggcactcccgcttctctaaggcagtgcaacctcaaaacaaggcctaccagcccctacttattaggtagaagaaaatgctgaaaagagagacatgttcagtgttctgaaaatttttagaaagcataatttaaatgcaaagtaatgataattatgaccacttttttgtatcagtta

SEQ ID NO: 10531 - DNA, 1193 bp, Homo sapiens
tttgatgcctgtttgcttatttttctatttattgttctgtaatatgacggtaaaagttgttctataaaatgatgttgagactttaaaaaatgagactaatatgataattaaatgctccataaggtcaccacttcagtgaacttgacattactttttatcttccaggtctaaaattttattatgttaagtatcagcttagtttaagaaaagaattcttctcaaaggagtagattatttaaaaaacgatatggatattctctgcctctgtaattcatacagtgaatatttattagatatatgagtaattattgtatgttagatgctgtggtatacactgctattgttattaaactgcatacatggttttttagtgcacattaagagcattggtccatggccctccttaaatttctagtttatgttttattctaagtaaattgtattttttttccagaataatgagaaacaaatgcggcagctctctgtgattccacctatgatgtttgatgcagaacaaagacgagtcaagttcattaacatgaatgggcttatggaggaccctatgaaagtgtataaagataggcagtttatgaatgtttggactgaccatgaaaaggagatctttaaggacaagtaatttatattttaaattattctctaatagacatctacataagttagtaaaaagtatttggcatttacttgtaaattgaactgttttcacaaaaacttggtcccattttggtgtttgaatcaatactgtgaaaagtagagaatattgatcttcctgtaagtttataggtgggaaaagaggtaacagataagaactggggttatggagtcatgttaagagtggttcccaaacttgggtgctggctgaacttttggggagcttttataaagtacagatttctatgtattaccgtagactaatcatttcctggtgtatggtgcccagaaatctgtgccctttaaaagtctccagtgattctacaattgttcctcagattggcagttagaaagccctatacatagtatttctcttctgttttttttgagacggagtctcgctctgtcgcttaagctggagtccagtgttgtgatctcggctcactgcaacctctgcctcctgggttcaagcgattctcctgcctcagcttcctgagtaggtgggactgcaggcatgtgccacc

SEQ ID NO: 10532 - DNA, 1148 bp, Homo sapiens
aaacataaaaacactcacctagttttgatgggaaaaactactactcttaactagcaggttgattctctgtacttcagtttcttcattgtaagtgtggatggatttgattagacttccattacccttcttccagcttactcattatgaatttagtattggaatgctttttaggatttcatattgaacacatgagtttgagattttactgatgtgagtaatacagattgggagttattgtaatttgttattagaggaatgagtcaatatagattaaacttgaaatttcattttggatttttttaatgatatatagttaaaatgttgattattttaaggggaagaattagatcaatgaaggattgaaatagtcattgctctttctttccatacttagtggcccataactacctttatacttgctttgatttcatgatgttgttcagtttttggttaataattgatttatgattattttaatactaggagttcgcagtccctgattatcgttcctctcatcttgaagtgagtcaggcatcacagcttttgcagcaacagcagcagcaacagcttcgaaggcgaccttccttgctttcagaatttcacccaggttctgacaggtaatgaggtttcttttatgtttctatctaggattataattgtgaagtatacaagtttgtcattattttatttttttactttttattaaccaagccatgactggtcatttatagtttgcattttgagttcttttttgttggttggttgcaatagttaacaagctcttaaaacttgtttccatagtttggcattaatattatttagtagaaaggcagtaaaccacctggtcacctgtgtgtccttggttatgttctatagacttgggctgcacattagaaccccttgggatgcccaagcctcatcacaaaacacttaaatcaatctctggagttgggcccaggctttattttatcgccgaagtttttccggtaattctgatttgcagctagggttgccagtcactgatctcaactcttcaagctttagttttccctcctataaaaatggagataatagtggcattgtcctcaactgatagtaaatattctgtcagataatgtaggtcctgtacatgcatggtgggttctctt

SEQ ID NO: 10533 - DNA, 1243 bp, Homo sapiens
ggctcagggagtgtgattcccatctggcagttgaggaaagtgagtcagagggctgaagcggtaggctggagccagtgctttccgagccagctggcagcctgtgggtctcatcactgaagccataagctgtggcatatcctttggaagccctaatgtgtagcgtgatgatgcctgcaggtgggggcttatccaggagccggtacaccatctggtctcacccatactgaggatccccctttgtctgtgccactttctcgtaggaattgccccccactgcctggatgagggcactgtgcggagtatggtcactgaggaattcaatggcagcgattgggagaaggccatgaaagagcacaagaccatcaagaacatgtctaaagagtgagcttctgcctctcctgccctgaaaaggaggaatgattggggccagcaactttgctctccctgccgtgcctcggtggtgctcctgaatgtggctgacctgggctgctggttccgttgactagggtcatcttgatctctgcagtttgctccagctaccagtttctttaggcagctctttgtcctccctctgcccagattttgatgtagtctaattgacatccttctcttcccaacttttgtgtgatcttttaggaaaaaaaataaatatttttaacattaaagcagtcactttggtttatcatttcttttgtactgtgatttgcttctgaggccagtcgattaatagcagatatatactcagcactatcaagatgtttgccaccaggcattgtggcttaagcctgtagttccagctactccggagggttgatcgagcccaggaggttgtggctgcagtgagctgtgttcgtgctactgcactccagcctgggtggcagaatgagactgtctcaaaaaaaaaataagaaaaaagaaaaaaatgtgtagctaaattggaaagaagacataagataaacaattattaaaaatggaagattgtggcagggcatggtggctcacacctgtaatcccagcactttgggaggctgaggcgggtggattacttgaggtcaggagttcaagaccagcctggccaatgtgttgagaccccgtctctactaaaattacaaaaattagctgggcatggtggcatgtgcctgtagtcccagctacttgtgaagctgaggcaggagaatcacttgaacccaggaggcagaggttgcagtgagtggagattgcaccactgcactccagcctgggt

SEQ ID NO: 10534 - DNA, 1216 bp, Homo sapiens
agagtgctcgaaagcaacccacggtgtggcagttcctcaagaggttacaggcctttccgctcggctgttttcctgctcaggagccgcagggccgtaggcagccatgacgcccagccggaatggcatggtcttgaagccccacttccacaaggactggcagcggcgcgtggccacgtggttcaaccagccggcccggaagatccgcagacgtaaggcccggcaagccaaggcgcgccgcatcgccccgcgccccgcgtcggggcccatccggcccatcgtgtgctgccccacggttcggtaccacacgaaggtgcgcgccggccgcggcttcaatctggaggagctcagggtggccggcattcacaagaaggtggcccggaccatcggcatttctgtggatccgaggaggcggaacaagtccacggagtccctgcaggcgaacgtgcagcggctgaaggagtaccgctccaaactcatcctcttccccaggaagccctcggcccccaagaagggagacagttctgctgaagaactgaaactggccacccagctgaccggaccggtcatgcccatccggaatgtctataagaaggagaaagctcgagtgatcactgaggaagagaagaatttcaaagccttcgctagtctccgtatggcccgtgccaacgcccggctcttcggcatacgggcaaaaagagccaaggaagccgcagaacaggatgttgaaaagaaaaaataaagccctcctggggacttggaataaaaaaaaaaaaaaaaaaaaaaaaaaaaggaggttacatacagctttccatctggcccaacaaccctacttctgggtacatgcccagaagaattaaagacaggtattcaaaccaaaacttgcacacagatgtccatagcagcattaatcacattcactaaaaggtggaaataacccaatgtccatcaaaagacgaagggataaacacaatggtgtgtatctaggcaacggaacattaatcaaaaaaaggaagttctggtacatgctacaacatgggcaccatatggatggatctgggaaacacaatgcatggtgaaaaaagtcggtagattccattgatagaaaatgtccaggaaaaggggccgggcacggtggctcacacgtgtaatcccagcactttgggaggctgaggcgggtggatcacttgaggtcaggagtttgagaccagcctgacct

SEQ ID NO: 10535 - DNA, 1138 bp, Homo sapiens
ggggtttcaccgtgttagccaggatggtctcgatctcctgacctcatgatccgcctgcctcggcctcccaaagtgctcggattacaggagtgagccactccacccaggcttttttttaagacaagagttttactcttgtccccaggctggagtgcaatggcgcaatcttggctcactgcaacctccgcctcccaggttcaagcaattctcatgcctcagcctcccgagtagctggaattacaggcgcatgctaccatgtcaagttaatttttatatttttagtagagacggggtttcaacatgtttgccaggctggtctcaaactcctgacttcaagtgatccacccaccttggcctcccaaagtgctaggattacaggcgtgaggcatcgcacccggccacccaccctttttttctcccaagaaaaccagttttctgaaattttcagggggaaccaggacctcctcgcccatgtctttcacccctgggtgcctgtatcctgtattcaccaaagccccacgggcatctccccgattgaggtcccacccctcagggcctaggacagggggaccagggagggcccccagaggctggagtttggaatacccccttctcttctctggagctcagtttgcatgtctgtgaaatgacaggtgatgtcacctcccagaagggcagtttgagagaagtaaaatctattgaggcaccttggacacaggagggggtcagacggcatcagcctttgagggtgctgcagttacacggctccagcagtctgagccttatcaagacctttccagatatgagggaagtccatgcccagtgtctagctggctgggggagaagccccttgagaacccccactctgtaatgctaggctctgcatttgcttaggaggctgtgtccctgtctctccccttctgggccagccttgctttctgggcaggcccaggagtgtcccgggcccagcactcagagtcagcgctgtctttaatctgtattccacaggcatcctcaccccctcccctcccaggagctaggaacctgccaggcttcttacctctctgctggaatctccaccccccaccagaggctgccctcttggggaaggggcccagcccttgaggcctgtctcctc

SEQ ID NO: 10536 - DNA, 1365 bp, Homo sapiens
gggggagagcaggagccgcctctcgcagccactctgcgcgcggggtgggagggagagagggaggcgaagggacgacagcgccgggctccccgcccccatcccacccggttccaatatttcgcagaaaggcacgcggctcctaatcggtcttttccaggctgagatttagccgtgcgatgcccgcgcaggggcgggggccgcgggccaggggaggcgctcagagtccggagccgccgagcgaggtgaggagcccgcgtcctcggctggtggagcgggcgggcgggcgcgcaaacccgagaggcagatatagaaaggggggcaggttaaaaataaccctctccggctgggaagctcgcgcgcgctctctcgcctcgttcggtgccagaggactccaggggaggtggcgttggggagggcagagcgggattccccctcctccgccgggcggggtgcccgcctgcgcgccgcggttgcacgtgtgcggggccgcgcgcccgggccccctctgcacccggtcggtgggtgccccctccccaggaccgggcgcatctggcagtggccccccgcccgcagccttgcgcggctggagggaagcgctccattattcattatttacgagcgttaataggtttgagccacgggggcggggggttgggggggcgacgaggacccagtggggaccgaagcattagaagaagggatagggagggagggggaagggcgggggcggggctgtgccgcggcctggaggaagaggtctcggcctggggcccggcgagccgggcgcacctctccgtcaggtttctccacaccgccggccgtcgaggctgctcagggcgccaagagggcagcacgggccttagattttgctctcggcctctgtccttcgcgtcctcgcccttaccgaggcgtggggagggagctgcggaggccgtacgccccgccctgcgcgccccttgccgccgccgcgtccccgcggcagccccggcctcatttatcatcatctttggtcaagtggagtgtgcaaggaacagctgcttcactcggctgacttcgagggcggctacgggagaatcagggagatgaatgatgggggctggtggcagccccccgcggtccccgcgcaggcgagagggaggcggggacgtccagggccgcctccgcctcatggcgagtgcagcgcccccttcctctctcctggcgcctgcagcgaccggggaccgggggaccggggcaccgaggaccgggcccgccccgggaggggactgggcgcggggacgggggggcgcccttcgccggcggagaactggcgggcgcgctgccggcagagcccgaggttgccgtgaccttgctggggtcagcggg

SEQ ID NO: 10537 - DNA, 1123 bp, Homo sapiens
gacttcagcccagggctgtttgaagacccttccgtggccttcgctacgcctgaccccaaaaagacaactggtcctctctcctttggtaccaagcccacccttggggttcctgctccagaccccactacagcagcttttgactgtttcccggacacaaccgctgccagctcagcggacagcgccaacccctttgcctggccagaggaaaacctgggggatgcttgtcccaggtggggattgcaccctggcgagcttaccaagggcctggagcagggtgggaaggcctcagatggcatcagcaaaggggacacccatgaggcttcggcctgcctgggcttccaggaggaggacccccctggggagaaggtggcctcgttgcccggggacttcaagcaggaggaggtgggtggggtgaaggaggaggcaggtgggctgctgcagtgccccgaggtggccaaggctgaccggtggctggaggacagccggcactgctgttccaccgccgacttcggggacctcccactgctgccacccaccagcaggaaggaggacctggaagctgaggaggagtactcctccctatgtgagctcctgggcagccccgagcagaggcctggcatgcaggacccgctgtcacccaaggccccactcatctgcaccaaggaggaggtggaggaggtgctggactccaaggccggctggggctctccgtgccacctctcaggggagtccgtcatcctgctgggccctacagtgggcaccgagtcaaaggtccagagctggtttgagtcctctctgtcacacatgaagccaggtgaagaggggcctgatggggagcgagctccaggggattccaccacctcggacgcctctctggcccagaagcccaacaagcctgctgtgcccgaggcgcccatcgcaaagaaagagcctgtgccacggggcaaaagcttacggagccgtcgggtgcaccgggggctgcccgaggccgaggactccccatgcagggcaccagtgctgcccaaagacctcttgctccctgaatcctgcacagggcccccccagggacagatggaaggggctggagccccaggccggggggcctcggaagggctccccagga

SEQ ID NO: 10538 - DNA, 1339 bp, Homo sapiens
agggctcccgcgggggcgtggccagcttgagacccatccctgacacatcctcgtgtgcgcaggcgcggtggcggagctggagccgcggcccacgcggcgggagcacgcggaggccttgctgctggcctcctgctacctgccccccggcttcctgtcggcgcccgggcagcgcgtgggcatgctggctgaggcggcgcgcacactcgagaagcttggcgatcgccggctgctgcacgactgtcagcagatgctcatgcgcctgggcggtgggaccactgtcacttccagctagaccccgtgtccccggcctcagcacccctgtctctagccactttggtcccgtgcagcttctgtcctgcgtcgaagctttgaaggccgaaggcagtgcaagagactctggcctccacagttcgacctgcggctgctgtgtgccttcgcggtggaaggcccgaggggcgcgatcttgaccctaagaccggcggccatgatggtgctgacctctggtggccgatcggggcactgcaggggccgagccattttggggggcccccctccttgctctgcaggcaccttagtggcttttttcctcctgtgtacagggaagagaggggtacatttccctgtgctgacggaagccaacttggctttcccggactgcaagcagggctctgccccagaggcctctctctccgtcgtgggagagagacgtgtacatagtgtaggtcagcgtgcttagcctcctgacctgaggctcctgtgctactttgccttttgcaaactttattttcatagattgagaagttttgtacagagaattaaaaatgaaattatttataatctgggttttgtgtcttcagctgatggatgtgctgactagtgagagtgcttgggccctcccccagcacctagggaaaggcttcccctccccctccggccacaaggtacacaacttttaacttagctcttcccgatgtttgtttgttagtgggaggagtggggagggctggctgtatggcctccagcctacctgttccccctgctcccagggcacatggttgggctgtgtcaacccttagggcctccatggggtcagttgtcccttctcacctcccagctctgtccccatcaggtccctgggtggcacgggaggatggactgacttccaggacctgttgtgtgacaggagctacagcttgggtctccctgcaagaagtctggcacgtctcacctcccccatcccggcccctggtcatctcacagcaaagaagcctcctccctcccgacctgccgccacactggagagggggcacaggggcgggggaggtttcctgttctgtga

SEQ ID NO: 10539 - DNA, 1200 bp, Homo sapiens
gagtgtggtcccccagcagctactgacagtcacagctgcccccacggcagcccctgtaacgaccactgtgacctcgcagatccagcaggtcccggtgagggggtctggccaggggttggggagggggcagccccagcccagacacacagcttacagccaagcctctcccaccctcaggtcctgctgcagccccacttcatcaaggcagactcgctgcttctgacagccatgaagacagacggagccactgtgaaggcggcaggtctcagtcccctggtctctggcaccactgtgcagacagggcctttgccggtgggtgacgtgggcagggcataagggagtggggtctacacacacacacacatgcccacctggtaacatgtgcctggccctgcagaccctggtgagtggcggaaccatcttggcaacagtcccactggtcgtagatgcggagaagctgcctatcaaccggctcgcagctggcagcaaggccccggcctctgcccagagccgtggagagaagcgcacagcccacaacgccattgagaagcgctaccgctcctccatcaatgacaaaatcattgagctcaaggatctggtggtgggcactgaggcaaaggtgtggagaggcctgcaggggcacagaccggggtgtccctaggaaggaacagatcaggggcaactggaaggaagagagggagtgagactgagcctggacaagcagggaattggaattcagcctccccaggcctggccagcctcgtttatttagttaaactggtttgcaggcctcttcaataaaggtggggctgtgctaggcattggggatgcagcaatgaacaagacagacaaaaattgtccctcaaagaagagccgaccttctggtgggggagatggacagtaggcaggatgaataagtgctcgagaccaccacgtttggctcgttgcagagaaagcaggaagaggatggtgagggtcccctggtggtagccagggaaggcctccctgagatggcggcaggcacagcagcagctagccagaccctgctgtctgcatcttacattctaaccctatgcccggcctgggaggtgggtgctactaggcgaggaacggttcaggtagaaggaacaagtgcaaaggtcctgaggcagtaatgttgcaaagcagctccgcacccccttgctagggctctccaacccc

SEQ ID NO: 10540 - DNA, 1138 bp, Homo sapiens
cacgggcaggcagggcatctgtgtcctcgggcctcctcccgggcactggtgccacctcacgggcgcgccagtgccactctgccaggaggcacccctgaggcccaacttggactcggagatgccccaggcttccctgcccatcaaggctcagcccttccttttgctgctagaggtggtgccaactgctggtctgcttccccaatgcgctttgggagatgccactgcatgtgtctttatccagcccagcaggctcactgccactgccccaaggacccagttctcccaaaccctttgtgggatgtcaccttcttctccatctttgtccctcctcttcggtaccagcaaccctcagactgggcaccctcccagaaatgccccctgctccgggacttgctaatttgagctgcaactcagctgtgctgtaggagggactgggataggaggaggggctcttggagggtgattatcttggcagggggatggcatgcctgcagtgcctcccaggaaagaagggaggctgtgttatttaatgataagagccctggactgggaatcatggaagcctggactctagcagtggttttgtcagtgactccatatgaccttgtgccctttctggtttgaagttcccctgtctgtcaaagtgtttggagatgagatgtgatagatcccttaaagttctcaagttttgatattctttgtagtactctgcacattgactgttgcttcctcccccacctcatattaagtttaccaaagctgaaatcttttgttggcaatgtagagagaatggtactcagcattatctgttaatcctataggggggatgtggacacctggggacaccagagatggccagaatcatggataaggaaagcccaaagtgtaggtaaaggaatactgaaatggccaccatatgggacttccttactaagaaagcaacttgcctttttacccaaggcagtggcttatgccacttgatcagtcaagaatgctgattagtttgtttgaaaactggattcctcctggttggttgaaggactggtaaaacgtcttttatgagccaggatctttggtgttcttatgggcctgatttcagcagtagtgatttgtttattttctgctttgcttatgaaat

SEQ ID NO: 10541 - DNA, 1265 bp, Homo sapiens
ggaaaaataaaaaagtattctaccccagaatccaccctggaaccttggagaattggtgtaaaagggacaaatgactgagccagttggagaaccagtggcttgagggagccttagtggtagacacagtgattttggagcctctttgggtctaaccttggaaagtaaaatctaccaagttatgatctgctttgtatgctagaatattaaaaatttatttgtggaaacatccaaattattttctaagagactagcatgtaacaattgaagtcaaagaagggctgtctgctgctggcaaaatccaggaaacccttcattctctgggtgatttagattcaggtccattgccacagcctgttggcaaactggctgcgatctaactctggtttggattgtcaggtagcagtgtctaggtactggaaagaagttaaagcaaagtttatttttcctttgtacaaaggttaaaaactctcactcaacatcttattttgatatttgggtttttaccataggagtatccaacccttacaaccttcttcgaaggagaaataatcagcaaaaaacaccctttcttaactcgcaagtgggatgcagatgaagatgttgatcggaaacactgggtgagtaaatctgatctgtgctgggtcatctaggggctgctagagaattgaagaaatgctgggagccagagaccttgtcccttattgaggattactggggctttgcaaccaagtaaaaggttgcactgcacacagacctcagttgttccatcttccttatgaggacagtttaaatacgatctgacctgctgcttaaatagcaaatggttgtctgatgatagcaaccccagagttccagccagaactctgctcagctatcagaatcttaacagtgtccccccatccttcccacctgtttgtccatcttctgtccactgttcctttcaaatcacctctgcttggggaaaaccctgtgaaacatgcaatgatgacctccggcttcggggctggcatgagatggagatgatgttgtgggaatctgcctgcccactggcttatcagggcagagccacatcatttctttttatcctggctgctgacagacaagtatagtcttgtcttaagtacaccactataaatcctgctgcccccctttttaactgtcaagtgtagagcattctcactcagcagtagtgaatgcttcaagacagttagtgtcctgggatcttttcatttgttgtcatataagtaccatgtcttcaaaaatca

SEQ ID NO: 10542 - DNA, 1183 bp, Homo sapiens
caatctctcgcagatatcgaaggacaaggctatcatgtgtttctagtgtctgcttagctagctggcccaagcccctagatcatgcagagacacaagcttcacaaagccctcttctctgagactgggcaggctgtttctaagctgttttgcatggctctttttgctacttcggatttacttgcagaggtcttctcattaatttttcttagctttcgtctgtttattttgtctgtctgttcaccattcccatcctttggccttttcctcagccatgttaacaaggcaggtgtagggcagtggggccccagctggagtccaggtatctgccccagggttgagtctgcattcaatggggtgaccatagggccccatctgttacttggtcttagctgcccttttgggagccacgtccctagctgtcatgccttgggaaggtgagtttacctgggcacataagcatagttctgagagcagcctctccttctctcagtcaatcggcacactctcttttctgctttcagggcaagtttctggctttttatcagtatgcaaaatcatttaactcagatgactttgattatgaagagctgaagaatggagactacgtcttcatgaggtggaaggtaagttcccaccaggtggccctccagactcccagcaagccaggccctgtatcgcacctacatattcactctaaccaagggctccccatgtccagtgctcgtcacagctggttgtcatggcaaagtcttcatggcagggtctttgcacgcctataaaaagtgggcccagctccagggcacgcactggttaactgccgatgtcccagacagctcctcctcgctgtgcttttggtgggtagcaagtggatttgggcctaggtggctgcctctaacattgtcttctccctttcctttctcccacccaagaatcttgttgaacccccaagttgaatcactccaagtgttctgtggattcaaggcagagccaaacttgctttgaacttagtcatcagttgtacccagatccctctacaggcttaaacaccatccgtgggccaggtgccctccaccacatccttttcccagagctcaggaaagtctcacctcctctacttccctccagctcaggaaatgagggaccgggaatggaacacgggtttttgactcagcagacctcagag

SEQ ID NO: 10543 - DNA, 4051 bp, Homo sapiens
gggcttgggcgtgggtctccatcttctcccacagcttattgaggtctcctttttataaaacataccatagttaacttcatgattagagcagaatgaaaaaaaacattcatctagtgcatggttcaggaggattaaccaaaaaaagaaagaatgaatgaaatcaaactaggttcaacttgagaaatagaaaatgaatgtgcatttcagtccaagtatgtgacttgttgggtgctctgctttttgaggggttactaatgtcctttgctcagggtgcattagatgactacctcccgtttctgtctcctcccccttgcaggtatcagtccctcaatctaacccatgttcctgaacacagtgcacccatctatgaattccggtgacaacggttcagaacagcaaccaaataaaactgaacttggcaaaaaagaactttgccgagaaaattgtgtacctgccagaaccaggagaagtgtgttcctgtttcttcacgagcagactcgcatcacaaagcatgaatgttaacccacagaatccaaggagcatggctggcccgtggggcaggtggagggagcagtcttcgttcttcctcccctcagtggcagtttggtcttcacctgtttttaagctaccttaaacgcacttttccttcctgcacagctaacttctacatcactgaaatgcccattccttcctccgtcccacctccagccgaatagaaggtctgctcccggatcaccctcagccttggtgctcagtggtcccgaggccctagacccccaccccccgccagttgctttgtctggtagctcaagagaaggcagagccccagcacctctgtgccccccagagctctgtgcagggagttggccagctgccgcatcatcggccaccaagggcacaagaggcggaggctccagtccctgctgggctgcctcagtcttcagtgctgattgtgtcacgggtcagcgtgcgctgctgagccctgtactgttaacagtgcaaagctagtgagtagctgtcaggttccctgggcctgccatcagggatcactaaatttaaggcttccagatccctggcaggaacagattccagtcctgcttactcagtacatttgctccaaacttttcaacttgagggcaatactaaacttaaaaataagagtttttttattacaaaattatttttatggtccctttaacgaggaccctatggcaaatgcacaattattcagaattacattttatcgttttcacattgaaaacagcaaatgttgacttagtaatttttatatcgatatctatatgtatatgtatatttaatcaaccagcagttttgaaactagtcatcctggtacaaaagttttgcagcattgcctaaattatagtgctcaacacaagaactgtttttggggccagtttagcatttgtgccgcctccttttgctactcaaaacagcaatgcttggcggcagccttccatgaggcagaaggggtcgtcgttctctgaaaacagtgactctgaaatgttgggacaggggaaggggtgggaaacatgaacatgctcaaataactcgaggctcacgtgccaaagtgtgtgtgtgtgtgtgtgtgtgtgtgtgtgtgtatgatgttttgtttttttaaatgttttaaaagcttaataggttggcatcagttgtagcccacaaacatggctagggctttggggatttggcatttttctggtggtttacaagacttactccgaatacaagaggaaaagctttaaaaacaagattgcatcataacccccaggagcaaagcaacctggaggctgcatatccatgggcgggcagcataagagaatgtgaagcccttcagtgagacgagacgagcaatgggaaaccttttctgttcttaagaagtgactttaattttattgacatatgtactgtatgttactgagattgaatgttaggggaagccttaaggtagaggtatttgggaaagtagccagtgggcacttgtgatatctaaaatctgttatcccaggactgtgtacagaggggcaacctacccattcaggaaggtcagggctttggaaccctaaaaagttggcccgatgacttaaagggaaaaataattcattcccagagatgagtcagaacagtctcctcaatcctgaaattcaacaaggcatcagaagggctggctgtggtcaagcccagctgctgtcatgtgaggagatgctcactgtggtcttgttgagctgatggccttggttgagctgatggacaagtgaaggaggccatggggctgtgctgtccttcctgccgtacgtgccattccactctcttcagctctcccctcaacagcatgcgagcccataccttctgcatttttccaggcctgtgagggatataggcctccccttggagcactgagtccggaggtcatccctgagctcatccacggctcatgctgtggctccgagtagtggtttgagtgggcaggaagggccatttgcaaacactgctgtgttctagacaaacaacccaagtcctatggcaggatttcttccttccttccttttttacccaggtgatgaagtgcacccattgtactgggaagaatgaagaggtgatacctttactagatccttcagacacatctatgagaagatttgttcatttaaaagtctgcccactgaggatagggaaaggattaaggatttttccacctcctcttagtaactcctgaattaccaacatcaacttctttctctccgttcctgaaggaactttggggaatcatcttcatccgtagttacgctttcctgaaccttctcagtggtttacatgcctctgaaactatgtgcaatatttttggttgacacttgtatccatccttaagaaattagtgcagattgcagatgttctgtcttccatcccaaacaagcctgccatgaggtaggatcctaggggtttggctgttcttactccactgctcagaaagcttccattctgctgtcctcagcctcgaccctcttctgtgctggacttccacccacccacccttttcaagtttagatagtgtttcagctgctgtcccaaagtaacaaaacaatacctactgttaagtaggaagtcaatctgtgtgctggttttgttggttatgtggaaatcacaaactccagaggagcaaaggggtttttcaatgtcttttgctttcagaaacagagaatataatattctcactaaggccttgaattgatttttttctcataaaatagtctgataagctaatttttaaaaagaaatgccattaactgtgttgtatcgtggtttaaaattactaacaagttgtgggaaagaaaaataatatttgattttgaatcttaaatgtttttaaaaattagacttgaatgggcacaaagtataaatattttgtttctttatggaggacatgtggaaggagtttgagggtttgggatgggagaagtattttgcagagctatcaatgtccaaataatttaaaaaaaaaaataaaggtatttaagcagtgagtttgtcctatttgtaaaccaaagcagctccattagaggaaagcagtcctctctgggcctgtggctgtggagctctccagggccagccggagacctctgtgtgccagggcaaaccgagggcccctctgggcaactgttgcagtggtctgcttgctcctttttcattctgaatgttttcagctgctcagcacttctattcaagctccattttgttaatttctgtatttcttcagaaatgtggaagcattttttttttccatatgtgaagggtttatatttctatttaacacagagaaaatgtgcaggcagaggtatctgtccaaagcctgctttgtgttctggtgtggggacaggcaatgctgttgggctgctctcgacactgtgactgtggtcctcagagaagatgcctaagtctcaaagcacaggcacttggacccccaaatagcaggatccctaaatcagccattacagtttattctgacaaaccattctgttacgtttcaggtccc

SEQ ID NO: 10544 - DNA, 1571 bp, Homo sapiens
aagaagccccgttgtcgccaccgttgcatgacccgccgctcctgaggccctaccccacgcccggaccctcgacgccccccgccgggtcccccactcacgcatgggggttcggcgctaaggacccccctccctccgggggccccggggcgcgtccccttagagccatgcccggctgccccgcccgccccggaggaccctagagcagcgtcgtgggggccatggcggccgccagcggctacacggacctgcgtgagaagctcaagtccatgacgtcccgggacaactataaggcgggcagccgggaggccgccgccgctgccgcagccgccgtagccgccgcagccgcagccgccgctgccgccgaaccttaccctgtgtccggggccaagcgcaagtatcaggaggactcggaccccgagcgcagcgactatgaggagcagcagctgcagaaggaggaggaggcgcgcaaggtgaagagcggcatccgccagatgcgcctcttcagccaggacgagtgcgccaagatcgaggcccgcattgacgaggtggtgtcccgcgctgagaagggcctgtacaacgagcacacggtggaccgggccccactgcgcaacaagtacttcttcggcgaaggctacacttacggcgcccagctgcagaagcgcgggcccggccaggagcgcctctacccgccgggcgacgtggacgagatccccgagtgggtgcaccagctggtgatccaaaagctggtggagcaccgcgtcatccccgagggcttcgtcaacagcgccgtcatcaacgactaccagcccggcggctgcatcgtgtctcacgtggaccccatccacatcttcgagcgccccatcgtgtccgtgtccttctttagcgactctgcgctgtgcttcggctgcaagttccagttcaagcctattcgggtgtcggaaccagtgctttccctgccggtgcgcaggggaagcgtgactgtgctcaggtaacccacccgggtggagggggcggccctgcgcctgctgccttagctacccaccctggcccagaaagcagcagcccgtaggagtctgcgttttttacagttctgaccagttcttctgtttgtagattgtagggagcgagagaagggttttgtgtttaagatacctatagcaagaaaatagggaaccgatgtggaaatcctgtccccgaaggcaggtttgacgggatcactgacttggctgagaattcatcgaaagccatcttttcagaaggctgttccctttgatttttttttttcccaccatccatttcttagcataagtccctttgtgattttccggttttccattctggccttccatttacaaatctatgctttaaaattttttttttttttaatttatctaaaagtctttcttgttctgccatttttggattccttaacagagaaagtagtcacaggcaaaggccccagagattatttaattgaagcacattctccattcccaggagggggagtgacttccctggagttgaacagattagtggttgggccaggcatacagagcagcacactcttaaaa

SEQ ID NO: 10545 - DNA, 2146 bp, Homo sapiens
cctccgataccagggcctctgccaggactacccttcgttgaggaccactgagctgaagtgacccatcccaaggatgagacgaggtacagcggtaaagccaggcgcctcctgccagcctctcagataacgtcctacctccctttccttgcaggccacggatcctggagatggacaaggaagagaaccggcgctcggtgctgctgcccacacaccggcggaggggtagcttcagctctgagaactactggcgcaagtcatacgagtcctcagaggactgctctgaggcagcaggcagccctgcccgaaaggtgaagatgcggcggcactgagtctacccgccgccctcctgggaactctggctcatccttacgtagttgcccctccttttgttttgagggttttgtttttgttcattggggggtttttgttttttgttttttgttttttttgattctatatatttttccttggttttgttgcctgttagggctgaagaatagaattggccaggacctaggttctcatattcttggtattcctcctggatggaaaggctgttggcatcaataggggacagaggctgatgctggagtggccagtagaggtggtggagcagagcagccatcttttaagtggggctgtatcaggctgggtttatttaaaagcaacaaaatgttttggttaagaaaattattttgctttcagtgtaaatcttcgcagtgttctaaacaaagttcagtcttctgctcgcccctttccctcactgatgtctgcacttggttgaggtctcctggagcctcacaggctctgctgttctccacttctcacctgccatccacgccctgcaagctcatgcaaacaccctttcttcctcctgcggcagagttgttcaggttgcctgggcaggggcttaaacagtgccagcccctgccatcccaaagctattgttaagccccccaggcgtcctccacccacgcccactagcctgccatgtccacagttccttgggctgctgaggggctagtgcagtggtcctgacctctcttatcaagagcacacttctttgctggttgctccttttgagcatatgcgtgtgattatttggaacagttagacttgccacgttgggtcagttttagaaattgtttctagctagagggactggtgtccttccaagtctagcatttggggtatggaaaattgttgtggtgtgtggtagggtttttgttttcttttttgagttttttttccccctttagtctcctggctttttcctttcccttcccttctccactggccagcttgggcctcatcctcatgtcatccttctaggaaggcgcctgccccatcttgtctgccggcagcatgcatccaaggccagagctcaggcctgcagactgggctggtgcctcctccgcttcagggtatgggagttggtgaaggggctttcaaaaaataataaggaaaaaaaggtaaagtctttggtagcttctatccactcagatcctggaaggcagcaaggttttgtggatctagattcattaggaatgtcttcttgtcagccaggccaggacccgggcttgccaagagcagaggccctcccagcaaccaggataccaccactttgggggctttgtgtacagaggtccgggtctgagacctcataggctgcagaaatctggggcagccaccatcaagaagcccctctcaggggccagaactcctttgccagcgtggatttctcaagtcgggactgcataattaaagcagttgcagttttattttttttacagcttttttcccaaaaatgatttgtagttgtgtgtgcagcacttcgccctgatatgtgtgctctacaataaaaaccaaatctaatatattttgaaacagttgtctgatgttgttgtaagagagggcttgcctttggtgcttccttaatccctttactttcttaaacttgaaacaggggttggggaggcagagctagctcattggccgccagcgtcccagaggagttggttggtcttggacactgggcctcctgtgtgcctagccttgggtttatggctgaaggtggacttgccctcaccccactgtcctttctcccactccaaggagggtgaacttcataaaccacaatgtccag

SEQ ID NO: 10546 - DNA, 1327 bp, Homo sapiens
cctgagctcaggagttcaagaccagcatgggcaacttggcaaaaccccatctctactaaaaatacaaaaatttagccaggtgcgtttagctgtggtctcagctactagtgagactgagacagacaagaattgcttgagcctgggaggcacaggttgcagtaagccgagattgtgccattgcactccaacctgggcaacagagcaagaccttgtctcaaaaaaacaaaaaaaaaaattcttgagttcctattgtataccaagccacactgggaccccaatagtgagcaaaactctggtccctcctttcaagatgctcatgatagtgtggagtgcaggtactggcatgaagcagatgtttttcaatgggtaaggctggggcccagagggctttagtccctccagacttcagacctggctccctatgcctggtaaagggcttctatctagagtctcttactctgttctagtgctcagagctagtctgcttggccaaattcttgctgtggaaacttggataagctgcttacctccacatttaccagagaagagagactccagagtggggcaagtaactggcccaggcttggtctaaaaactagtgcgagggtctgaagagagaggggccagagtctcaagtgtggtctggggctagttgggcctggaggggtagacactgggctaggcagagtggaccttggatcccctggagaaggaaacaccggatctgagagaaagtgacttgcagaatgtcatccagagtataaatggcagaagtaagcatcccccactccatgcctgagcttctgactcttggggcatgggataggggctcagagaagggctgggggagtgcgaggaaccgtctttgtggaggaccctattttccattgccattaaaaagtcagacttctggccaggcgcagtggctcatgcctataatcccagcactttgggaggccgaggtgggcagatcacgaggtcaggagtttgagaccagcctggccaacatagtggaaccccgtctctactaaaaatacaaaaaattagctgggcatggtggcgggcccctgtaatcccagctacttgggaggctgaggcaggagaatcacttgaagccaggaggcgaaggttgcagcgagccgagatcgtgccactgcactccagcccagcggacagtgcgaaactccatctcaaaaaaaaaaaaaaaaaaaaaaaactcccagcctgaccaacatggtgaaactccatctctactgaaaatacaaaaattagctgggcgtagtgctgggcgcctgtaatctcagctactcaggaggctgaggcagga

SEQ ID NO: 10547 - DNA, 1441 bp, Homo sapiens
aggccaggtgctgagtcccatcaacccctgtccctagcccagtcttctacacagtagatgctctaacagctggtgccatccctcaccccgctaggaccccatcccattcctccaacccttttgtgtggaaggggaaactgaggcccagagaagttgactggccagaggtcacgttcacgcattcaaaaaatagtgtctggccaggcgcagtggctcatgcctgtaatcccagcattttgggaggccaaggcaggtggatcacttgaggtcaggagtttgagaccagcctggctaacatagtgaaaccccatctctactaaaaatacaaaaattagctgggcatggtggtgcgtacccatagtcccagataactcgggaggctgaggtgggagaatcacttgaacccaggaggtggaggttgcagtgagctgagattgcgcagtgctggagatacaagacagacctagtatatgatgtcatatacgcataaagttataaattttactgatgtgaagtatagcatataaatattatttttgagatggagtcttgtactgttgcccaggctggagtgcagtgagtggagtgatctccactcactgcaacctccgcctcccgggttcaagcgattctcctgtctcagcctcccgaatagctgggattacaggcacctgccaccatgcccagctaattttttgtattttcagtagagatggggtttcactatgttggccaggctagtcttgaactcctgacctcatgatccacccacctcggcctcccaaagtgctgggattacaggcgtgagccactgtgcctggccagcatttaaattattaaaacatatatattcttataaattccatataaccaatcttttctcacagaaatctattttagtttttttgctgaattactgtatttgtagtctgcttgtgcttataattcagccatgatatgacaaagggacttgcatcatacctgcttgtaatagtttcccgtggctgccataacaagtcaccacaaccctggtggcttaaaacgacaaatttatttctctcaaattctgggaaactcaacatcactgggcttgcctgtctagtggaaaacctgttctttgcctctgacagcttctgttagctgttaacattccttgacttgggaacgggcagattcacgtctctgcctccatggtcacatggcctcctcctctgtgtaccacatctcctctttttttttttttttttttttttaaagacagagtctcactgtcacccaggctggagtgcaatggctggatcacagctcactgcagccttgacctgccaggttcaagcaatcttcctgccttggcctctcaaactgctgggataacaggtgtgagccactgtgcctggcttctgcctctctcctaataggacattcacgattggatttaggg

SEQ ID NO: 10548 - DNA, 1134 bp, Homo sapiens
ggtgacattcacaggtcccagggataatgacccgatatttgtggaggccatggatcagcccctacatgcccttctcccagtaaagttattgccattaaatctgatatatcatctgctttctcatcctcaaatattagttggattaaaatttctcagctatagcagtacttttaaatttaatctgaatcattaatattttccttcactttctcttttttttgagacggagtcttgctctgccgcccaggctggagtacggtggcatgatctcggctctctgcaagctctgcctcccgagttcatgccattctcctgcctcagcctcctgagtagctgggactacccgccaccacgcctggctaattttttgtattttttagtagagacagggtttcaccgtgttagccaggatggtcttgatctcctgacctggtgatctgcccacctcggcctctcaaagtgctgggattacaggcgtgaaccaccacatccggccctcttcatcactttcttaaatctagacctgtgttcttcagtacagcagccactgatacttggctattgagtatttgaaatgtggctagtttgaattgaaatgtgcttttagtgtaaaataccagaatttgaagagttagtatgaaaaaaacaatgtaaatcattaagaactttatattgattacttgttgaagatactattttgagctgggcatggtggcctacgtataatcccatcactttgggaagctatggtggatggattacttgaagtcaggagtttgagagcagcctgaccaaatggcaaaaccccgtctctactaaaaacacaaaaattaggtgtggtggcgctcgcctgtaatcccagctacttgggaggctgaggcaggcttgcacctaggaggcagagattgcagcgagccaagatcgtgccactacagcctgggtgagagagcgagactttgtctcaaaacccccccaaaaaagaagaaaaaaaaaactattttggacatatgttaaatttggacatactgggttaaataaaataggctgaggcaggagaattgcttgaacctgggaggcggaggttgcagtgagcccgagaccgtgccattgcactccagcctgggcaacagagcc

SEQ ID NO: 10549 - DNA, 1250 bp, Homo sapiens
cagccccagggtgtgggcctgggacctgggccagaactgagccctcctgcaggcatttggctgccctgggggcccactgcctagggaagaggacaggtggggcccagcacctgtgccacctccccccctccacacaccatccttccccctcactttgcagagtatttttccttttttttttttttcttaaagacggagtcttgctctgtcgcccaggctggagtgcagtggccccatctctgctcactgcaagccccgccttctgggttcccgccattcttctgcctcagcctcccaagtagctgggactacaggcgcccaccaccacgcccagctaattttttctgtatttttagtagagatggggtttcaccatgttagccaggatggtctcgatctcctgacctcgtgatccacccacctcagcctcccaaagtgctgggattacaggcgtgagccaccatgcccagccctgcaaagagtatttttctagcgcctgggctggacagttgtttctaaaactaaactattttggtacctgcttctgggccagtccccagcctgtcatgagtgtgtgtgtgcgggcatggatgtgactgggagctctgctgggcacccacatctggggcctagtcaggtgtgtgtgtccggcggggggggggggcaggggggggggtcaagatgagtttccctgtagattgtaccttggggtttttttctgtcgttttgttaaaattagcgccattttaatattaaaaatactgatttttaatattgaaaataaaagcatttaatatctcttaaagggcatccacatctgctttatccctagcggaagagtgagggggcttcacacgtgcactcacactgtggagagagttggatttcccagacccctgagggcacctgtcagggtcatccccattggtgctgcttgaggctactggggactgtggcactggacgtggctggagcaggtggtgtcacctgagtacattctttgctagcagacagtggatgaggccccttcctcttcctcaccaagcctggggctgtgccagcctgtcttaggccagggccttgcagaaggcgctccaggcgtggaagcagcgggtaaaggcgtgctgctcattgcccttgcggaccaggcgcagccggcgcggccgctcatgttccttggaccgcatgtgctggatatatacctggcaaggggacagcgagccttgggtgatgaccctgccctgcccaca

SEQ ID NO: 10550 - DNA, 1134 bp, Homo sapiens
ttctggaccctggtgggtggagttggcccctggttggtcgcatgcccaagggggcagcaggcccagtgagggctcagctgtttgcccctcccctaagcagggagtgggcccaaggaccctatggctcgcaagatgcgactgcggaggcgcaaggattcagcccaggatgaccaggccaagcaggtgctgaagggcatgtcagatgttgcccaggagaagaacaaaaagcaggaggtgagccaggccagggttgggacaaggcagggagccttagcttctgctgaaggccgaccctggccttgaccctggccaagagggacggggggtgctgggcagaaagaacagctgtgcaaaggccctgaggtgtgggtagcaagtaaagactggcctgagtggcttcacagagtcaagccgtgctctgtgactctgcccccaggagagcgcagatgcccgggcccccagcgggaaggtgcggcgttgggaccagggcctggagaagccccgccttgactactccgagttcttcacggaggacgtgggccagctgcccggactgaccatctggcagatagagaacttcgtgcctgtgctggtggaggaagccttccacggcaagttctacgaggctgactgctacattgtgctcaaggtgagggctgggcatgctgttaggggccatgtggcccagtaccttcctctaagatggctcagtccccaactccagagttttgttcagggaggccaggtgggaggtgggcaggctgcaggaggtggtccaggcacaggggcagtacaaagcccctggggctgggaagcctgtgctgttcagagtggcgtctccggggtggccggaagaccaggatgaaagctgatgtggccggtgccttggcttccagacctttctggatgacagcggctccctcaactgggagatctactactggattggcggggaggccacactcgacaagaaagcttgctctgccatccacgctgtcaacttgcgcaactacctgggtgctgagtgccgcactgtccgggaggagatgggcgatgagagcgaggagttcctgcaggtgccagcccgttaaaattgggggtgggcagagtggggttcccagggaactctggtgc

SEQ ID NO: 10551 - DNA, 1477 bp, Homo sapiens
tgttccacaaaaattatgctgaaatggacctgaatcagccctgggtgtgcttctgttggcgcctgctgctgaggcccggcctgcccatcggcctgtagtacgccatcgaggtcatcatggagccagccagcttctcttctcatcaaggaggcagagacccctggtggaagccaagagtgaccgaagagggcttgcatcacgtcactccagtggttccctccttgtccaagtcctcgttttaagggcatggcccgttggctccagccgttggcttctgttcagggtccttgctcccatcagaggtgtttgattttgctcctggggctgcgatggagaaccttttgtggcagatggtgctgcctacatctcattggttctctgtacctgtgcccgttgcgcatgttcacagacaggagagtcgccagcaataccttggcagcctttaaatgtgaaacgtctgttacttgcgctggaggcagaggctgtgcagggagcctgcttctaatcgtgggctcccttatctgttacggttccctcccctcctgttctagatgctgattcgttttctcactggctggttaattgctgtctacttaggcctccaaggccataactgtgcaacattttatctgagaaggaaggaaggtcagaaagtgatcactggcaccaccactgtggcattcctgtcacaccaacacagaaattcacagctcatactgttctcacctgggaaacttgggaagggctgatgagtttggggcagatcctgaattgcagccacacttggccttctagaagctgaagttgtgccctcaagtggtcctaagtagaagtccacttgaggtatttgctggcacacaccctcaagggtggttcagaaggtcctgaaacctaaggcaaaaggctgctggggcatgaacagaacagaccgtctcaggggcagccatgtaagtggcaagcagggctggtctccctcaaggtggttcttcattaagtaaagatggcttcgtgactagtgtttagctcccagatttatatttgggttaaaaactaacttttcaatgtggcagtttcaaaggattacttgatgcaaagtatgtttcctttcaaagggatcttgacgtggtaccaggactgagtcatgatttgggcagaggcagttaacactgggaagccctgcccctccctatgcccccttcactccggggaactgaaacctactctgagtctcacatctctaaacctcagtgctgagacctatgcagtgggactaatctcatcaagaattttcagttgaggccgggcgcagtggctcacgcctgtaatcccaacactttgggaggccgaggtgggcggatcacctgaggtcaggagttggagaccagcctggccaacatggtgaaaccccatctctactaaaaatacaaagaaagttagccaggtctggtggtgcgtgcctgtaatcccacttactcgg

SEQ ID NO: 10552 - DNA, 1101 bp, Homo sapiens
gaagaccactttggtagcagaactgtagggactggtgagtcaactcacagattctgcagcagctgctccacccacaataaagcaaacgccgacaggctagaccccagattgcaggggctgccacctacaaggtgggaccacaggctgcctcaccgggattgtctgccactaaatagctggagtcacagattgagataaatgccaccttcaaggttgcagtgaaaagcataatcctatgtgatgaatttatatgtgttattttttaaaaagctattttattactgcatgttcccgtcccgtcttgtgaatgtgagtccccgccaccacgtgaggtgcagtcgttgcagcggctggtgcaggagtgcagctggcgcgtgtgtgatagcatctcgtaggtgttgctgcacaagagttaaccagagtcaatgccaaacacatagtatgagaagtgtactttttaagaaattaatttatttgagttcaaatatttttgaaatataaaaattggttgtattttttaaagctataattcttgtagacattctgtggttaaaaatttgattgtgcttattaaaaatggtcatctatgttttgcacttcagctacgtgaaaataaaatttctttgggaaggtgacatttggcttcctgattacgggagggagttggttatctcaggtggagcaggaaagcctggttgattctcacaccaggatgggactgggacttcccaggatggagggaggaggccatttctacaccatactttgagctactgacagcaaaaccctcccaccatactgggtgcatcttgtttactcttgactaacatacacttctgatttacagcagaagcctcagaagctaattcagttctcctttggcatgccactggataacaagatagtgagggggcagtgtgtacaagctgtggacatgggcatttcctctctgttgcagcaaggcggaggaaagcccagggagagtaaaacgctacaatctttctaacagctttgccctacaccaccatctaaatgattatgaccaagtggcgacatagtattttattttcctagaattatgtccagctgtgagaaagccag

SEQ ID NO: 10553 - DNA, 1380 bp, Homo sapiens
tttggaagttgccacatcttattgtgtgtatttagtttctgattgtgatgagtagctgagaccctgccactgaaagacaattctgcaccaaggctgagtgttggggtgggagacagcaaaaaacacatgtaaatcaccttgtctgagagggttataaatttgggctgcccaggacatctgtccaagggtgggtgcatctcagagtaattgaggtaagcatggagaccttgtgccctgccacactccccagctgggggacattctgacatttgtgcctcggcccccagccattgtaccccctttggtgtgtagtgtggggtgactcatttgtgtcttgtggcacagggatagagctgaccctgcagatccagagcgacactggtgtcagagccaccctgaaagagttcaaggagagactggcaggggataagtaccaggcggccgtgcaggctctccgggaggaggttgagagcttcgcctctctcttccctctgcctggcctgcctgacttctaaaggagcgggcccactctggacccacctggcgccacagaggaagctgcctgccggaggacccccacctgagagatggatgagctgctccaaaggggaactgttgacactcgggccctttgagggggtttcttttggacttttttcatgttttcttcacaaatcaaaatttgtttaagtctcattgttagtaattctgggacaggttattaaaggatttaaatttgaacctggctttctcacagctggacataattctaggaaaataaaatactatgtcgccacttggtcataatcatttagatggtggtgtagggcaaagctgttagaaagattgtagcgttttactctccctgggctttcctccgccttgctgcaacagagaggaaatgcccatgtccacagcttgtacacactgccccctcactatcttgttatccagtggcatgccaaaggagaactgaattagcttctgaggcttctgctgtaaatcagaagtgtatgttagtcaagagtaaacaagatgcacccagtatggtgggagggttttgctgtcagtagctcaaagtatggtgtagaaatggcctcctccctccatcctgggaagtcccagtcccatcctggtgtgagaatcaaccaggctttcctgctccacctgagataaccaactccctcccgtaatcaggaagccaaatgtcaccttcccaaagaaattttattttcacgtagctgaagtgcaaaacatagatgaccatttttaataagcacaatcaaatttttaaccacagaatgtctacaagaattatagctttaaaaaatacaaccaatttttatatttcaaaaatatttgaactcaaataaattaatt

SEQ ID NO: 10554 - DNA, 1147 bp, Homo sapiens
aaactctgttagccttgctgttgtcaccttaccactttgataataccatcagcctcacaggatccgggaaaaacctaccacaggctacagtgtctggcacctaatgtgctctgtgaacatgccccttaccccccaaagtaaattgaactgctgcccaatattcatgctgccttcaggggagcctttaccatcaatgttagggaattgcccaagcaacttgtcagagaaaacaagccaggagcagcctgaggaagctgtcccttccccatgggagtgtcaggccctctgctgtatgatcagttacccctttcaaaagtgctctgtccttcctttcacattcttaggcacgggcatctctcgtggggattagaatcccaggccatgtggtgggggtgctcaccttcctgacctcatctgctttgactgccttcatcctcgccttcgtttctcagagattccttcacggcatagaattcgcctgcatttctacatgtccaactttgtttccaggtggttctgacaaccatttgatccttgtggatctccgttccaaaggcacagatggtggaagggctgagaaggtgctagaagcctgttctattgcctgcaacaagaacacctgtccaggtgagaatcatccttgccttctccttcactcctctcccatctgcatttcttctggccaaagttgtagctgatgaatatattggctccggggacagacctcacataaaaactgtagtgggggctgggcacggtggctcacgcctgtaatcccggcactttgggaggccgaggcaggcggatcacttgaggtcaggaattcgagaccagcctggccaaaatggtgaaatcctgtctctactaaaaatagaagaattagctgggcatggtggtgcatgcccgtaatcccagctacttggaaggctgaggcagaagagtcgcttgaacccgggaggcagaggttgcagtgagtggagattgtaccactgcactccagccttagcaacagaatgagactctgtctaaaaaaaaaaaaactgggccaggtgcagtggttcacacctgtaatcccagcactttgggaggccgaggtgggtggatcacgaggtcaggagattgagaaggctaacgcggtgaaaccctg

SEQ ID NO: 10555 - DNA, 2739 bp, Homo sapiens
agtagcaagaagaagtggggggaaagaggcacccataattctattacccagagtcaaaaacatcttttaacactttttctgtgcattaaaaacaaaaaaagaaaattatacctccatcatttctggtgtgacctgcattgtgacagcacaatgttggccagttatggtgcagaaaacagtgctacccctgggagcctggagtgtggtgggagatagctccaatagtggcaggtgctgtgcaggaagaggctcgtgtgaaagtactggagggctgccatggggcacggtgatggggacatggggccatgccgtctgcacaaggccaagtggaagagcagatttttcacggtaaatgtaggcagaccctttttttttcctggttgtctaacctattattgtagaagtgctcatatacattcttttccatctgtgctttggcaggatgacatcattgatgatgttgacagctttcttgctgcagcagagaccctgaaggaaagaggtgcatataagatctttgtgatggcaactcatggcttgttgtcttctgacgccccccggcggattgaagagtctgccattgatgaggtaacagggtctgggtgtgtgtgggtacagctgcctgggcttttggcacatcttgatctttagttacagagagtcaggacaagactgagatcttttgtggctgagaaacgattcaagggctgggtgcagtggttcacgcctgtaatcccagcactttgggaggccgaggcaggtggattacctgaggtcaggagttggagaccagcctggccaacagggtgaaaccccgtctctactaaaaatacaaaaattagccgggcgtggtggcacacacctgtaatcccagctacttgggaggctgaggcaagagaatcactggaacccagagggcagtggctgcagtgagccgagattgtgccactgcattccagcctgggtgacagaatgagactcttgtctcaaataataataataataataataataataataatgtgtacaactcattggtttttagaatgttcagagttgtgcagtcattaccatagttggttttagaacattttcttcttcctagaaaggaaccccatacccattagctgtcacttcacattttctctcactgccattagtccctgggaaccactaatctgctttctgtctctctagatttgcctgttctggacatttcatataaatgagattatacaatgtgtggtcttttgtgtctggctgtcttcactcaacataatattttcaaggttcatccatgttggagcatgaatcaatacttcattttatgatcaaataatgctgtgttacatggatagtccacattttgtctctctcttcgtatttcatgttgatagaaaaaattttttttctactttttaacttatgaatggtgctgcagtaaacatttgtgtacaagtttttgtgtggacatgtgttttctcttctcttggatacgtacctaggtttagaactgccaggtcatacagtaacttcatgtttaaactttcaaggagctgccagactgtttttcaaagcagctgcgccattttacattcccacagccgtgagttgggggggggctccagtttctctgcatccctccagtacttgttattatcttttttgccatacctatcctagtgggtgtgaggttatcaaatcttaacctaagaaacacaggctgggcgcggtggctcacgcctgtaatcccagcactttgggaggccgaggccggtggatcatgaggtcaggaggtcgagaccatcctggctaacgcggtgaaaccccgtctctactaaaaatacaaaaaaattacttgagcgtggtggcgggcgcctgtcgtcccagcttacttgggaggctgaagcaggagaatggcatgaacccaggaggcagagcttgcagtgagctgagatggcatcactgcactccaggctgagcgacagagcaagactccgtctaaaaataaataaataaataaataattgaaacattgacttgagacatagatccactgtgttttcctgtcgtggcaagcctcagatttgagaagctgtcacatttccagatcaaaccatgaagctacttggctttctgatgctgtggttttttttcttttgcttcacaggtggtggtcaccaatacaattccacatgaagtccagaagctccagtgccccaagattaaaactgtggatatcagcatgatcctttcagaggcgatccgtcggatccacaatggggagtccatgtcctaccttttcagaaacataggcttagatgactgagttttcctttaggaaaactcccgagggccaaactggaaacataagagtgactgctcggtgggatggatttcacaggaaccgtcatgcttgttcctccctctcccctgtaacctcacttcttattgattcctaagaagatagaccaactttttatgtcggtttgggtgtttgtgagtttggggagcaatttttataaaagaaaaactttattctcctcttttgaaaaggtaagacctcgttttagttgtaactgtttaaaaaataacacttggaataagatttgtaagctcacaaagccttcttccaaagttgcttgagccaagtgcttaaaaagttaataaaataaaatgatctgtatgatacctgcaattgaaaagccgaaaagattatactgtcaagtccagtaaatg

SEQ ID NO: 10556 - DNA, 1266 bp, Homo sapiens
gttcctgcctcaggagcggaacaagctcagtgatgggacccaggccacccgcctcctgcccagtgtggcccctgacataacagcaggtagagctggtctttggagtcagcctcccctctcatttccacagcccttgccctgcccaggacctctgagaggacgtgtgggcttggggctacgtgaagcatctggtacttttcttgacttgggccagctctgacaatgtgtgaactggatagaaccacaggggcaagccaggcccacacccccatttgacagatggggaagccaagggcccaggaggggctgtggtcccagatgccctgattcctgcagtcattcccagaccaagccagttggtcttgttctcagttgataaaagctccccaggaccttccttaaaccaggccccgtcctgggctcagacaagggctctgctcttgctgagctcatggtgtcacaagtgagctgggcctcccaacagaattaggcaaggtggcgaatgcctctgtgcttcagtttctttatctgcaaaatgggaaaaagaaccactgcctcccggtgtgcttgtgaggcctgaacaaggtaacagctgtaaaggctccttataaaccatcaagcagctcaagggcccaggactgatgcccagtctcttgtgcagaaggtgctctgggtgggacagggccctgggttctagcctcagtcatggactgtgatcccagctttcctgtctataaaatgggaaagggcatgacaggactcaagggcccccaagaaacctttgtggctccatggacaggccaggctgttgggggttgcctgggggagcaccaggctccccctccccatccccagcataagctcgtgcctgttacaaacccatctctgaccaccctaggcactgaacccaatgcctggggagagccaggactgtggggggatccattttggagtgcaggctccaacatatccaacctgacagcagatggtccctggatcaggcaccctgcctggctgagggcaatgtggggagtggcgcacatggtgcgggtcctgctggggcacgtcccccagcccaagcccagggcaagtccccatctgccacggtaggcagggcctggtgccctccagggagaagcatgcctactgcgccctcattaggctcctttccagggtggcacgtgaggctgtttgcctgctcagaagtggcttaactaaggagattctggggctggagaggctttgggtctgggagatcccaggcag

SEQ ID NO: 10557 - DNA, 1219 bp, Homo sapiens
cctgtcaggactgctgtcagtcccccctgttcccaaatgactagaatggaactagtggacagcaggaccaggagccaagagtccgtgctctgcctctgcctgactgtgggacctggaacaagccccagctcctctccaagccccggtcatcccatctgtaaaatgggaacaggtattgaagactgttaggggccccttcagccctgacaccttgctgccctgtgatcctagactcccctgggacaagaggcgggtgggtcccaggtctcactctcagcagcttgtgccctccagcctccctccagccctagtgggctcctactccaagatggaaggtcaactgcctgcccctcccctagccccaggagccatgatttatctgggaaaaaacctgctgtggggttccaactacataccagaggacgggcttgtaagatcacgcctgggaggggcgagccccggcctcacttggctgcagcctgagaaggcgtgaggctgggctgggttggggcttcctcagccagagctggatgtagatgttctagctggttgctcctccagcagatgctgagcccccctcaacaggacacagcaggggggccttagcaggatccctcaccagccccagggtgaggccccagggcagggacagatcacaccttccttatttcacagttgaggaaactgagggcaggtgaggcgccggtggccagggccagaacactgatctctgcatgccaggccagggcttgggaacagacccagagaaataaagtcgaacccaggtttcacgaagcctgattcaccccacattttttctgtcaggcccccgccttcacacactgaagtcctggcccacagcttggctctgagagaatagaagcagcttaatgaggtgcttactaaatgccagccccgcgccaggtgctgagcgggcactttaccatgctgtgtaatcctccccacaactctggaaagtaggtgttgtctccattgtgcagatgaggaaactgaggcttggtggggctcggagatggcaaataactggcctgaggtcacagaactgatatctggagggactgggccgagacccccagtctgcaggccctgagcaccctcccattccctggagaagcagtggcactgttccttctgagccctacccctgcatgggagcaccagagcctcactgctggatcctgttgactcaggacagtaa

SEQ ID NO: 10558 - DNA, 1181 bp, Homo sapiens
tgtagagatgaccaggacatggctgggctcttgacaagctcatcatcatccagtcaagacccagaccccttctacaccacaggccccggggctccattggcctcctctgttacagtgctactgaggccggtggagcccctggctcctgactggttgatgttgatgatccctgatgacacatggggtggtcttgagagtggggagcatgcaggtgcccgaggaggagggccctcaggctggccctggatggtggctggcaggtgggagggatggcgttctggaggaggtccacagcctgggcagaagccagtgttagcctggaaaagtctgttgagccctgaggtctctgaagtctggtgagggggtttagcaaacagtaaatagcttgttgtgactggagagctggctggacggggagggagatgggacggctcagtttccaagttcttctcagcccctcctagagggcttcactggaggaagaggcacaggtgggtgatatttatggctagttcatgagtatttgctgtaactgtagcatagtaaaacctgtccccttctctttgtcttaaaagcatggctctctcccacagcagactacgctgttggatttaatggatgctctccccagctcgggccccgcggcccagaaagcagagccctggggcccgtcagcctccactaaccagaccaacccctggggcgggccagcggctcctgcgagtacttcagacccctggccatcgtttggtaaagaccccattactggtctcccgtgcttgcctgctggatgggtgaggggcagggcagtgcttcttgctgtctctcacccacttgggtctggtcgattgtggtgggtgtccaggctcctccagccctcagcagtgatatccaactggcccttgccctcctccttgaggatggtggcatggtgttccctctttgttttgagtggttttctgctttgggagaaggaaagtcaacctcccctcaacctcccatttgcatcagaaatggcttgtgccttctctgggacatgtttcaactcttgcagcctcagcgttacacccagcgtcccagctgaaggaaccaaaatacacagcatggaacatccaaatcaagctgctgtaattagatggaaattatgatgtgcttaccaccactgctgatgaaaaggggat

SEQ ID NO: 10559 - DNA, 1100 bp, Homo sapiens
agcactgaggtcctggcagggctcctctgaggccttggacgaggacgtggagtcatcagtgttgcccttgcccctaacctcagcccgagggtctccaggatgttgcctggcccaggacttgggacagtggccttgtctttgtcctccccaccccccagccctagggacaccccaggcagtcctgggtgtggacacgatgaagcaccggctccataagacaccttttggggaagtggttgtgcatattttatttttctttgactcgtgtgagttcaaagtaaacaccaccaccgtggacaactcttgaattaaatccactagagcgagctttaaaactaatctgagcataacccccaacgtggctctatgcttgtgtacctttgcacatattttgtttagtacagtttcatatttgagtttgcagaattatctaatagtctttttttggctaatatttttataacgtggttcttatttaactgtctagttttgatagaatttaccaggtctggctgaatgaagatgttggcacgtgtcattttagtggtttaaatcctcttatttatggttttaactctaagaaaattttaaaaggaagagatgtttggatgacaaaaaaatgccttattgaaaaactaaagcaaattctttataggaagaaaatatgggaatttgattacacatagatgatgatgtttatttaaaaaaaaaacaacagcaacaaaaaatcctagcctccagttgccttttcctttctttagctcctgtttttggtgaattactaaactgattgactttcagcctttttggctagatcctgagaggctatttttcttacgaatataccaacatcctgaaagttaaagaaaaaaatctaatgtatgaatgtgactcaccaatttttatcaactaattccttttttttattaaaggcatgcagggattaacaggacttctgtttacaatggaaatctgaaatggaagaaacatctttaaccttgtgtgtctgtgatctcctctgtcttaatccacgctcaggctaaagatggggataatgtggaaatggcagttgtcccgagggcgtggggtggggggtgctt

SEQ ID NO: 10560 - DNA, 1219 bp, Homo sapiens
ccagctcttcccaggcaaaaactatgtacaccagctacagctcatcatgatggtgctgggtaccccatcaccagccgtgattcaggctgtgggggctgagagggtgcgggcctatatccagagcttgccaccacgccagcctgtgccctgggagacagtgtacccaggtgccgaccgccaggccctatcactgctgggtcgcatgctgcgttttgagcccagcgctcgcatctcagcagctgctgcccttcgccaccctttcctggccaagtaccatgatcctgatgatgagcctgactgtgccccgccctttgactttgcctttgaccgcgaagccctcactcgggagcgcattaaggaggccattgtggctgaaattgaggacttccatgcaaggcgtgagggcatccgccaacagatccgcttccagccttctctacagcctgtggctagtgagcctggctgtccagatgttgaaatgcccagtccctgggctcccagtggggactgtgccatggagtctccaccaccagccccgccaccatgccccggccctgcacctgacaccattgatctgaccctgcagccacctccaccagtcagtgagcctgccccaccaaagaaagatggtgccatctcagacaatactaaggctgcccttaaagctgccctgctcaagtctttgaggagccggctcagaggtgccttgtgggcaggtcgggtgggcagaggggagacttggacttggacaaggcttcaggcttttaccttctcccctgcccaacttccccgcagatggccccagcgcacccctggaggctcctgagcctcggaagccggtgacagcccaggagcgccagcgggagcgggaggagaagcggcggaggcggcaagaacgagccaaggagcgggagaaacggcggcaggagcgggagcgaaaggaacggggggctggggcctctgggggcccctccactgaccccttggctggactagtgctcagtgacaatgacagaagcctgttggaacgctggactcgaatggcccggcccgcagccccagccctcacctctgtgccggcccctgccccagcgccaacgccaaccccaaccccagtccaacctaccagtcctcctcctggccctgtagcccagcccactggcccgcaaccacaatctgcgggctctacctctggccctgtaccccagcctgcctgccc

SEQ ID NO: 10561 - DNA, 1641 bp, Homo sapiens
cataaagactgagagagaaggctattttttttcaaatgcgtacaactcaacaaaaaaaatatcacaagccacacaataaagcagggaaatataaccaaatcaaaggaacaaaataaatctctagaaactgcctccgaagagatggagatctataaactatcggattaataattcaaaataattgtcttaaagaaacacagtggcttcttttccgacaaaacaccaaatggcggatgacgccggtgcagcgggggggcccggaggccctggtggccctgagatggggaaccgcggtggcttccgcggaggtttcggcagtggcatccggggccagggtcgcggccgtggacggggccggggccaaggccgcggagctcgcggaggcaaggccgaggataaggagtggatgcccgtcaccaagttgggccgcttggtcaaggacatgaagatcaagtccctggaggagatctatctcttctccctgcccaattaaggaatcagagatcattgatttcttcctgggggcctctctcaaggatgaggttttgaagattatgccagtgcagaagcagacccgtgccggccagcgcaccaggttcaaggcatttgttgctatcggggactacaacggccacgtcggtctgggtgttaagtgctccaaggaggtggccaccgccatccgtggggccatcatcctggccaagctctccatcgtccccgtgcgcagaggctactgggggaacaagatcggcaagccccacactgtcccttgcaaggtgacaggctgctgcggctctgtgctggtacgcctcatccctgcacccaggggcactggcatcgtctccgcacctgtgcctaagaagctgctcatgatggctggtatcgatgactgctacacctcagcccggggctgcactgccaccctgggcaacttcaccaaggccacctttgatgccatttctaagacctacagctacctaacccccgacctctggaaggagactgtatttaccaagtctccctatcaggaattcactgaccacctcgtcaagacccacaccagagtctccgtgcagcggactcaggctccagctgtggctacaacatagggtttttatacaagaaaaataaagtgaattaagcgtgaaaacaaaacaaaaaaaagaaacacagtgaccttcaagaggacacagataattaaatgaaatttttaaaaatgcaacaacaagatgagaaaatcaacaaagagatagaatgataaaaaaaagaaagaagcggaaatttttgagctgaagaatatagcaactgaattgaaaaattcactaaaagagttcaaaagcagacctgatcaaacaaaacagtggactaaacaacaggtcatttgaatctttgagtcagggagcaaaaagaagaaaaaatgaagaaaagtgaggatagcctaagagattaatgggacatcatcaagcagatcaacatacacattaaaggcattccagaaagagaagaaagagaacttatttaaagaaataatggctgaaaacgtcccaaatctgacaaaggaagtggacatccaaattcaacaatctcaaaacaaatattagtaaattagtaagattattagtaagatgaactcaaagaggc

SEQ ID NO: 10562 - DNA, 1553 bp, Homo sapiens
acctgtcattcttgtgttggagttatagaattctacatcttataaaacctaactggcatttaaaaaatactgtggccgggcgtggtggctcatgcctgtaatcccagcactttgggaggccgaggtgggaggattgcttgagtccaggaatttgagaccagcctggacaacacagtgagacctcatctctatcaaaaaataaaaattagctagatgtggtggcatgagcctgtgttcccagctgcttaggaggctgaagcaggaggattgattgagcctgcgaggccaaggctgcagcaggctgtgattgcaccactgcacttcagcttgggcaacagagcaagaccctgtctccgaaacaaataaaaaatactgtaataaaagtacttataaacatactaatcctctttcaggaccctaaagttgcaggttagtaggtcttcaaggacaaatctgtaagtttcttatttctgtagtgcaagtaaaatttcactttttgaaactatagagagatccctttctgattagcctacagaacttaaagtgagggaaccatttcctctcacagacaaagaggcctgggatattaggactttggggtttgagagcatcatggggcagacagatggtggatggtctggacaagaagcgagtaagccactgcggttggtcatactgaagggaattgatggcaagaggatcccctgagcaagtcagaagttactctcatcagtcgttcatggtcacaacctgaggtactctgctgagtgggcaaggctgaagaagaggcctgtggaatgcagcattacctgctggacagagcagggcaggcagttctatgccttggagctcctgactgcagggactctgtccccacactcaaaaagactcagctcactcaatgagagaatgtgatttactttatagaacgtataatcaactttgttgaataatttgttctattaaggctgtctaaagtatgtgatgtcttcatcatagtatgaagtgttgaaaattaataacgagcctagtttaggaaaaagctgcttaaaactgtggctctaagagagtaatcataaaataccttagataaaattgcactatggaattttcattgagtatgtttaaattattggcttgtctactaatacacatctgcttcaaaatgaacatatttcataaaattggcatcaattttaatgacgctcctggtatggaacctcagatataccctattggagacaatcctttgatcataaattctccccaactataaatcattttatgtctttatcatagatggtatttgtcaactttttttttctcattttaaaattcttagctgagaagattttctcaaactttatgttctgctgtgtgtgttgggggtggtggttagtagctatagtaaataggtttttccagtggcatcctcctacccccagttgctgatctagaacaagtgtttctgtaagcatatttgtagaacactaatcccgcaagattttacacaaaaaaatggtcctgccaccagtcctgtataccactggctt

SEQ ID NO: 10563 - DNA, 1309 bp, Homo sapiens
gtaactattggtttagtaaatattcacccattcagtcaccctgtaagtggcaggcactgtttacagggacacaggaaggaataaaaacttgcaggcaccttggagcttgcattctattgaagaggtaatggaagttgggatagcagctaaactatgctggtattggccaggcgcagtggctcacacctgtaatcccagcactttggaggccaaggtgggcagatcatgaagtcaggagatcgagaccatcctggctaacatggtgaaaccccgtctctactaaaagtaaaaaaaaaaattagccaggtgtggtggcgggcgcctgtagtcccagctacttgggaggctgaggcaggagaatggtgtgaacccaggaggcgaagattgcagtgagccgagatggcaccactgcactccagcctgggtgacagagcgagactctgtctcagaaaaaaaaaatatgctggtagttttgattcaagatggcctttggagcccatgatttaggtctcgtacccaccaaggtctactggaaaacatcaggctctcctgctatagacccatagggagagctgcagccgagagggggagctgaagagaagtgccccttctgtgtcctgtcagcctcatccttccgcaaggaccagttgctgtgccactccattcacttgctgcaagactggaggtttttcctcaggtgttgagcacctggtttacaagatgtcagcatcttgatgcctgagaccatcaaggcaagtctctgaacagggcttaccttagagtaaggcttagaagaggccgtaaagtcagtctcagctccgtggctctgcagagctttgggacatgtgaattcttaaaaacaagactattgtacagttactatatgcatgcagtataaaattataaccttggaaaatcctagctagctgttgagctaattccataaagtaatcagctcctgagttctgcagtggtaataataatcagcataatgagtaaacactgtgtgtgccaggcagcgtctcatttgatccttgtgataatcttgtaagtactgattttctcccttctttaaacaaagttttttttttttttttagagagggtctcactatgttgcccaggctagtcttgaattcctggcctcaagcactcttcccatctcagcctcccaaagtgctgggattataggtgtgagccaccatgcctggccattttttcccttcttataaagaagacaagcttaagaggtaaaggaggccaggtgtggtggctcatgcctgtaatcccagcactttgggaggccaaga

SEQ ID NO: 10564 - DNA, 1151 bp, Homo sapiens
tgagaaagtcttgaatgaacagagaatttattccattgcaatatttgattgtatagaggcacactgtttcatcgacagaagaagcaaaaaggctttgtgtaagtttttggtactatgtaccacctctgttattcttttaaagctgaagtattcatgtacttaaaccatattatatttaattgtgtttgattttaaaatatatatatatgaattctatttaaaattgtgtcaactttctgctttcagggcatttatggctcttctgttgaaatatattgatctttccaaatattttcatttgctttctaaaaacccagaacatgagccactactggactttgccttgtgtttgaagtgtatggcataaacccaaggtttttattagtcatctatgctgtgattaattcattttgttcttttaacaaaatatttccatccacttcacattgcttcaatctttaacagaaaagcaatataaaggttatagaataaaatgtggttttgggcaactcttgctgcctctgcatgttttggaataacaatttctacaagactctaggctgtttaaactagtgctttcagttaagataaattctaatcatttctttgtatatacattttgtgcttctgagctagagatgccaagtagttgtaaactgcttataaagagaatagcagcaaatttgagactcggctacttttttctgccccacctgctttgagacacagaagcggagtgtggcccgaaattattagccagatttaatatttgatctaaagtaggtccttgtactcattttaaagttggaatttgattcctccaacattgagcacccaccatgttccaggctctgtgcattgtgcccacaaaataagattccctggtggagtttttatgggttcaaataatcagttgaacacccttcatctttatcatgttgttgacattgacacaaattgtttaaaaagaaaagatattagagagaaagtggtacctttgtaacttgatgtgtcttcatcattcggtaagatttgatgaaagtaaaaagcaaatgtcagccaaatccagtgaacagcaataaaacagggagtaactttttataactttttctacttggatttcaacattcagtagagcttttcgaaatgta

SEQ ID NO: 10565 - DNA, 1134 bp, Homo sapiens
agtcttgctccagcgtccaggctggagtgcagtggtgcaatctcggctcactgcaacctccatctcccaggttcaagcaattctcctgcctcaggcctcccgagtagctgggattacaggcgctcaccaccatgcctagctaatttttatagtttttagtagagatggggtttcatcatgttggccaggctggtcttgaactcctggtctcaagtgatccgtctgcctcggcctcctagagtgctgagattacaggtgtaagccactgcacccagccttatgcattataattttaatttgtaaactgtacaaagggataatacttgtagtacaacaagaagtaaaaacatttgttataggtagttaacatttgtaaccagtagaattataggtaaaatttatttatttaaaacagttttagttggatttgatttcaactttaaaataatgcttttcatctctatcaggtctttttgcctggctttttgtccagcaatctttattataaatatttgaatgatctcatccattcggttcgaggagatgaatttctgggcgggaacgtgtcgctgactgctcctggctctgttggccctcctgatgagtctcacccagggagttctgacagctctgcgtctcaggtattgactgattgcgtctgccattagggagaaaagcatacacatcctttccttcacatcccagtaacagatcctattatttgtaaattttaagttgtggaaaaaaaagataaaagccaggcacagtggcctgtgcctgtaatcccagcactttgggaggctgcggtgggcggatcacacgaggtcaggaattcgagaccagcctggccgacatggtgaaaccccatctctactaaaaatacaaaaattagccgggcatggtggcaggcacctgtaatcctagctacttgggaggctgaggcaggagaatcgcttgaacccaggaggcagaggttgcaatgaaccaaaatcacgccactgcactccagcctgggtgacaaagtgagactgtgtctcaaaaaaaaaaaaaaaagagagaaataaaattagcctacttactatcttctaatcaaagcatttgtggtaacttaaaatatactgtattgtaaagtat

SEQ ID NO: 10566 - DNA, 1214 bp, Homo sapiens
ctcaaaaaaaaaaaaaaaaaaaaaaaaaagaatttacatggtctgaattgccattaaaagagatatgagaattattgagtaacaaataactttttaataatttaggcaagttttggacgattgtactttgtttagaaaccaaaagcatagtatttgtagtttttttatttactttagttgctaggaagtaaactttattcaaggtctctggtaccagttgttgctaaaagtgattgactaatctgtcaatctgaaattatttgttgctgaactgctaattcttttgcttctatcttttaggcagatcttgtctggactaccagactcaagagaccaaatcaagcctttctaagacccttgaacaagtcttgcacgacactattgtcctcccttacttcattcaattcatggaacttcggcgaatggagcatttggtgaaattttggttagaggctgaaagttttcattcaacaacttggtcgcgaataagagcacacagtctaaacacagtgaagcagagctcactggctgagcctgtctctccatctaaaaagcatgaaactacagcgtcttttttaactgattctcttgataagagattggaggattctggctcagcacagttgtttatgactcattcagaaggaattgacctgaataatagaactaacagcactcagaatcacttgctgctttcccaggaatgtgacagtgcccattctctccgtcttgaaatggccagagcaggaactcaccaagtttccatggaaacccaagaatcttcctctacacttacagtagccagtagaaatagtcccgcttctccactaaaagaattgtcaggaaaactaatgaaaagtgagtatgtgattttcttgtgtgtacatatgtgtctcactttctttttttaatttactaagcagaacttcagatgaggaataaaatgattggaatattttttttctcctctaactacttgtaaatttgggagaatttggagagtgtagtagagtcagatcagtgtatggaaaaggagcaggagtgactggaccttctaagaagtgtgttatcagaattagtaaatgaagggtcaaatgtcctacttttcccctccactgattttgacatcaaaccattatccacatagccttatttcctccctcggtcttaattttattaatattttactgcactttgcagataaaatttttaaa

SEQ ID NO: 10567 - DNA, 1205 bp, Homo sapiens
tggagtgcaatggtgcgatctcagctcactgcaacctctgccccctgggttcaagcgattctcctgcctcagcctcccgagtagctgggattgcaggcatgcgccaccatgcccggctaattttgtatttttagtagagaaagggtttctccatgttggtcaggctgatcttgaactcccgacctcaggtgatccgcctgccttggcctcccaaagtgttgggattacaggtatgagccaccgcgcccagccttgaaggttacttttctagtataaactaaacttgatcttggaacaaaattccttataatcaatttttcagttattgcatattattttcttagtacaattctaattctgctgactacagagtcagaaagggtttaaaaaccatggtgacaggtggtctcccagccagagctgtggttttggaagacatgaggaagaccacaactcctgaactaggatgggggttgggatatggagaggagaaggtggacagatggatgcagaagcagagtggctgacacacgctgcaacacagatgggtctgaggatgcttcagtgagtgaaatcagcccatcaccaaagggcacgtgctgtgtggtggaggaacatagtcgcatgtgtgttgttgggaggtggagtttaaggtggaagaacctctttgagggcaatttggcagaatccatcaaaatggattccacctgtgtgcagagaggtgcatgggaggacaattatcgcagtactgtttgtgataacagaaaactggaaacaacctaaacgggctgctgtctccatccatgtgatggacctgcatgtgtcgtcagagaacaaagtagcgaatggtgatggaagtaaagctagcagtgacaaaatatttaccacgtgaccgacattgtctaagtgcatctaatcttgaccacaatctcatgagttaggcattttgtatccattttacaaatacaaaactaaggcagcaagaggctccatgactgctcagagtcacaccctagtaagggatagagctgggactgaactcctgctgttgggcccagcatccagtcccttggtctctacactgaaactgttcatccagatgtcgtgaaggacctagctctatatatcttggtaagggtgcagaacatgccaccatctgcataaaagggggaaatacacatgcatgtttgcataagtgcaagaca

SEQ ID NO: 10568 - DNA, 1381 bp, Homo sapiens
tgtgcaacaattctagaaactggaacaacttaatcaatatccagactttagcaactacttgatttttgttcttacaaaattaaaatctgaagatgaacccacaagttcattgcgtggtctcatcttgaagaataatgtgaaagcacactttcagaacttcccaaatggtgcaacaaacttcattaaaagtgaatgtttaaataatattggtgactcctctcttctgattagagccactgttggtatttcgatcacagctatagcctccaagagagaattgcagaattggcctgacctcttaccaaaactctgtagcctgttggattctgacgattacaccacctgtgagggagcatttggcacccttcagaagatttgtgaagattctgttgagattttagatagtgatgttttagattgtcctctcaacatcaggattcccaaatttttacagttcttcaagcacagtagtccaaaaataaggtctcacgctgttgtatgtgtcaatcagtttatcatcaggactcaagctctgatgttgcacattgattcttttattgagaaatctctttgcattggctggtgagccagaggtatggaaaaatgtgtgccgagcacttgtgatgttgttcgaagtttgagtggatcgcctgctccctcacatgcgtaatatagttgagtatatgctacagaggactcaagatcaagatgaaaatgtggctttagaagcctgtgaattttggctaactttagctgaacagcaagtatgcaaagatgtattcgtaaggcatcttcccaggttgattcctgtgttagtgaatggcatgaagtactcagatatagatattatcctacctaagggtgatgttgaagaagacgaaatgattcctgatagtgaacaggatatatggccacgttttcaccgatcaaggacagtggctcagcagcatgatgaagatggaattgaagaggaagatgatgatgataatgaaattgatggtgatgatacaatttctgactggaatctaaggaaatgttctgttgctgccctagatgttcttgcaaacgtgcatcatgatgaactgctgccatatatattgccccttttgaaagaattactttttcatcatgaatgggttgttaaagaattagccatcttgggtttaggaacagttgctgaaggtttgcatgcagggcatgattccttgcttgcctgagcttattcctcaccttattcagtgcctctctgataaaaaggctcttgtccgttccataacatgctggactcttagccgctatgcacactgggtagtcagccagccaccagacacgtacctgaagtcattaatgacagagttgctaaaacgcatcctggatagca

SEQ ID NO: 10569 - DNA, 1359 bp, Homo sapiens
gttggtgttttagtgttaaaatacggagagtatggaactcttcacctccattttctcagcggctgtgaagcagcctcctagcttcggaagtacggacactacgtcgcgttttcaagcgtgtctgttctgcaggtaacagcatcaagctgcacgtggaagcatctcgcggttttctagaaacaggcattttcttatccctctcccgctcctttttccacaaaggtgaatttcataaatgtaatactagtaaagtgaatgaattactgagtttatacagaaatttaggtaacttctcctttagtctcaagagcgagtcttgctttttaatgggtgccgtttatgttgctgcccgccctgtgtgcctggctcctctgggtgccttggtgtctgctggtggctggcagtgggcgcagcggaggagagttgtgctgcagctcatacggtgtgtctgtcatctcagtctggagtaaatgcagtgtctgccggtgtctgatgggttctgtccctcgtattttctttgccttctatcccattgcctggctaccgctgcctggcagccaagggtgttggtcgcgaagctggagtggcctctggtggagcctgcatcttgtctcgtctgcctctgctttacatttggtgtactttcgggcgtggtggcagtaaaatgacaccgtgattgagcttgtcagcagagctgaaagagaaagtagaaggatgtgcattgtttcttgtaagatatcttgcatgtatctgtgtattcaaattcaaacagagatggtttgtccatttgtccactgagaaattagaaactagggacaagggggaggaaaagtactgaaatacagtttatgaagcaagtgtgtctcgggctgtgcttgtcccaggagccccagcagcatctgaactgaggcttcttcagtcctgcaggaacaggatcatctgtctcagcggtgggcagatgttttcatagacagccagggagtaaacactgttggctctgtgggctgtatggtctctgccataaatagtacagagatgtggctgtgtctagtacaacttttagacacagaaatctgaatgacatatattgttctgtgtcaagaaacttagattttttttttaactatttaaaaacgtgaaacctattcttagctcacaggccatggagaagctggtggggaccagacccagctccttagctggctgggctggggagggggtagtgacagtggcagctgctactcactgctcagtgtggaaaacacaggacttggcaatcacagcccgcagaaccatcatgtgtggcagaagcctgagggatgcggtttcttgcccacgtgctctgttcattttctgttg

SEQ ID NO: 10570 - DNA, 1109 bp, Homo sapiens
gctccatgcaccccagctgtgagtcagaacacaacggccccaaaaccaaaaacctcagcaacatatgtgatgttcccatcttctgatgacggagtacacagttggtaaacctgcattcctttgagggcagcctatcacatcaacctccagttgctaaccatgttatataatggagaggaaaggacagcacctggacaccaggtgtctctgagtgtggcagccaacagcatccaaggagaaatgtcctctcatttccatctaaagggagagcgcccttcattgctgccatttcctggaaacctgctgtgtgctcggcactttcattcaaccttagactcgggctgagctttagacaggtgctgctgctgtctcagttccagctcttgcctgggtctactgtctccagtgtgaacactaaggagacccttctcttccatgtcaggagggaggttgacaatttacctggaaaatgaagaacgacccatcacatctgtgtccacattttacccagaggctcctggaacgtccaggaagtgttaggagctgggacaagtcaccagatctaatcacccatttgtcctcctaccaaccaggaaacctgaaaccctctgacaccctaaccaaagactggctgtggccatttttatcatctgtctagggcagctgtttaaaatacaagctcaggccaggcacggtggctcacacctgtaatcccagcgctttgggaggccgagacaggcagatcacgaggtcaagagattgagaccagcctggccaacacggtgaaacccccatctctactaaaaatacaaaaaatagctgggtgtggtggcgcgtgcctgtagtcccacctactcgggaggccgaggcaggagaattgcttgaacccgggaggcagaggttgcagtgagccgagattgtgccactgcactccagcctgggtgacacagcgagactccgtctcaaaaaaaataaataaataaaatttaaaaaaataacatgttgctgaccatgttatataatggtcataaaatataggctcaacgacgccagagttgggatgtggtgcaagatgtcggtatgatgtgctaggagatttgtaatccaat

SEQ ID NO: 10571 - DNA, 1180 bp, Homo sapiens
cgggcaccgcctgcctcttcaccccgttggcgctgcccttagattattcccactacatttccctgcccgctggtgtgctgagcctggcctgctgcaccctctatgggatctcctggcagtttgacccttgctgcaagtaccaagtggagtacgacgcctataaactgtcgcgcctgcctctgcacacactcacctcctccaccccggtggtgctggtccggaaggacgacctgcacagaaagagactgcacaacacgatagcactggccgccctggtgtactgtgtaaagaagatttacgaactctatgccgtatgatttcagtagaacagggagcgaagcaaaaccacccggcccacaagagacaacagagtattcagatcgccacactctgtgaggcagcagagcctgggcaggtgtttggcttagtatttgttatttttaaaaaataacagatcacgggtgtacccagggtttttcagctcattacactaagatgtggatttccataacccaagaggggggtctgaggctgtggaagtccgactgggcagtggaatgctgatggaggcagacgctgccgagggggtgtggacgtgctttgggggaggtctttaagtctattgtttaactgtaccatccagagcccaccagaagctattgatcattaaaattatgagaatttcaactcccgctgttctctctttccatgactgcccgcagctgctgctgcacatctgctctgggtggcggcttgcacatggaaggagcaggtgccatggtagccaccctgccctgctcctagctgcggcccagtgttaccacttacagcgacgacaagcctagatccaaggtagtcctggggccaaaccccgcccaggagcagtctcctggctcaccttggcctcatcattccgaaggccatcactgccaccatgctgttcaggaacatggtaggataaggtgacgaggcttggaggcctttgggtgtccacttgagttcacgtggggaactctgggctccaggatcgctcttcagagatctgaacacctgtgttttctttgaagcaccaaaactcttcctactgtggaccatgagtttattaacccattgccctaggctgacagaagagccctcggagcaatcttggaagcaccccctggcctcagtgctcgctgtt

SEQ ID NO: 10572 - DNA, 1189 bp, Homo sapiens
gccggggccgcacaccctgtgtgatgcaggtgcacggcttcatggcggccttcctcttctccatcgagacgcagaccaccatcggctacgggctgcgctgtgtgacggaggagtgcccggtggccgtcttcatggtggtggcccagtccatcgtgggctgcatcatcgactccttcatgattggtgccatcatggccaagatggcaaggcccaagaagcgggcacagacgctgctgttcagccacaacgccgtggtggccctgcgtgacggcaagctctgcctcatgtggcgtgtgggtaacctgcgcaagagccacattgtggaggcccatgtgcgcgcgcagctcatcaagccgcgggtcaccgaggagggcgagtacatcccgctggaccagatcgacatcgatgtgggcttcgacaagggcctggaccgcatctttctggtgtcgcccatcaccatcttgcatgagattgacgaggccagcccgctcttcggcatcagccggcaggacctggagacggacgactttgagatcgtggtcatcctggaaggcatggtggaggccacagccatgaccacccaggcccgcagctcctacctggccaatgagatcctgtggggtcaccgctttgagcccgtgctcttcgaggagaagaaccagtacaagattgactactcgcacttccacaagacctatgaggtgccctctacgccccgctgcagtgcgaaggatctggtagagaacaagttcctgctgcccagcgccaactccttctgctacgagaacgagctggccttcctgagccgtgacgaggaggatgaggcggacggagaccaggacggccgaagccgggacggcctcagcccccaggccaggcatgactttgacagactccaggctggcggcggggtcctggagcagcggccctacagacgggagtcagagatctgagccaaccttggccgacatgcagcatccacccccggctggggagaggccccgcggtcgctcaggggccccgggtttgagcagaacgggcccagtgccctgggttgcagactcagtagcgttttagtcgttttatgtttctttgcaacggcctcagaagtttggccggagagggggcagccagagcggcagcccccggcctcagaggctatcacaggctcagggcaaagaagtggcct

SEQ ID NO: 10573 - DNA, 1189 bp, Homo sapiens; identical to SEQ ID NO: 10572

SEQ ID NO: 10574 - DNA, 1242 bp, Homo sapiens
gtctggtcaaaatgccacagaaaatgagctgctctgccagcaagctgtggagctgcctcctctccaggcctggcatcccttggtcagcccctcctgggagggcacagccgtattacagtgccagtgtgcctggccatcagcatcttcacccttcccagtctgtgtggggaggctgtaaaccccgtggattcagctccgtgtggagtttctgtgctatggtgggactgctcattttgccccatcatccctttggcctcccacacacctgccccttcccagggatcacgtgtgtctccagcctttcacctttctattgcaatggtggcctttgtccaggcaagagcaggcctgatggatgtactggtgagccccacagttggatgtcagctcagccgtccaactgggaggaacagtaggctcagttcctccctgacccctgacaccaggccgcagtgggcatgcacaggcccacagaaagtcagtctgggttttgcttttctcgtgagcatcacagttaaagaagcgctcattgagcaactacagtgcacttggtcttctgcaagtgctgggcacctagagataggaacagtcatggtccctgctcttaaggaactgatgacctggtggggccctgttgtcttcaaggaacccagaagccactgggccccaaaggtggaactgaaggactgggggcagctggctctcagcctgccacctctgcactgcctgcctttaaagaaccccaccccaccccatgatggccccctctgttccccttgtatttcagtgactgtgaattgaggttaggaaggcacacctgcccttctgtgtgctctctccacacgaaggatgacagatactgtgaattcagccctcacggccaactgtgaaggggatggagaaggctgggagggctcggggagagctcttaggggctgcggaagtccccacgggggtctgagagtggagcccaagctttggccctccaggcatccccagtttccagcctcacctctgaagccctgctgcctttaaccaccagagccgcagccccctgggtttctgtctaactcgaagtcttgaatcctagctagtttggggttgtgagcagtgtgtagcaaagttgatctctccatgtcaccaaatcaaaacaccctctgtcatcctacggcatttcctcttgaggtcacagagaggaatggcaagccctggaaacctgtgttattctgtgttgatttggtg

SEQ ID NO: 10575 - DNA, 2485 bp, Homo sapiens
catcccttaaggttattttcctgattgattattgaaattattacttgtaatacctacatttactttacactttgaagtaggcactgtggaaaatacttcacatctattatcatttattcatcccagtatcctatgaggtaaacagcattatttctttccaaatgagaagagattaaggcacttgctcagggccatacaactagtaaatgacatgtggttttcaagcctacatattagccactataccagattgcctctccatagataacaggtccataaacaagcaacttagaataaattcaacttcaaagaaacaaataaaaatccagaagtggaattaattttttcagaggaagagaggaaaacaggaagtagtgaattacccttttgtccattgtgacattacaactaatttctccatctctgttttcttccagttccactgttgctcagccatctgagatgcccccatctcctctggtgtgggagtgatggtggaagataatgtactactgaagatgtaatgtagctttccactggagtctgggatttgcaattctggaggttaatcatgcttgtactgtaattttactaatgaagttttaaattaacaaccactacttgtatgatatgaataatatttagaaatgttactagacttttaatcttgtaaagtggttgtgcttttagaagaaaaatattttacccagagttgcacatgttttatgaatttagtgcagctgttatggctcacctcagaacaaaagagaattgaaccaaatttgggagtttggggttttatgttttgtttttcttttctaaaatgaagtgagattgttcacacacacacacacacacacacacacacacaaacacaaaggacagtcatacattttgatatttgagccattcctaaagatttggggttttctaaaactaaagaatctaggaaccttgcctgcgaccaatcatggagccacgtgagctgatcgtggctgcacctggggggagggtagggaggaggggcatgccacctaatgatcaagccctataattagcttctcattagagccgtgatggtgatgtgtgctgtctaaaatccaatgttgtgggtagagagaatgagtttgtgactaggagagactaaacttttgttttccttacccagtataaatatatatatatatatttaatctatttttattagaagtttttctgctctttcttacataaaagaaccccaagcatgcatctttcatgtgtgtaaataattcatttctgggctaatttcaaaagaatcccaatattgctgtatagaaagagaactagcttgcacattttaggtctgtgaaattttgtgagacttttcctgcactggacagtaaaaaaataataaaagacaaaaacaaatttaaaaaaaaatttaagccacaaaaaaaggcacatagggaattatgtcaaatgtgtttgtgtccttaggcaaagctgtgggagtcttgaaatgtcacagtagtaaataacttattactttttgacaagttctttttttctgttggaacactgaattcttctgtgcatatgtacatatgaatacaaatcgaaggcctctacctcctggagttatacaacttggcttgtttacctccacatgctgatgatgactattttttttttttgagttcagtgtggagacttgaaacttgaatgtcccttccaacttttatattaaaaataaaaagacaagaaaattgaagatcatttttcacctgtacaaggaatactaatggatcgtcttaaaattggtctaggaaaaaaccttggtgtgtgttatggacaattaactgttaaagttattgtaagttatctgtatttagcagagtattttcaacttgagtgatctgagctgaatttgaagactattaataagttatgtttggaagttttaacttcaatgaagtaattatttgctgtgaaagaaacaaacattgaattactaaacaaagatggtgcaatatctttgttttttttttatgaggctcctgagaatcaacccaactgaagcatttcaattcacttgaatgagaaacgtgtttagtatcaaaagagcccaagaagacactggtgtgaaaggtacaatctcagaggttggtcaattaccgtggcacactttctggtcactttgtacaatgtagatttgaagtacagtggtgaaaacattaaatgtgacatttgaaaaagatgtgtcatctgttttatttcagtttctttcctttgttttctcttcagtacagctcgtatcctgactttgcaaagttttgagacacttcctatttatatttccactttgatctttgaggaaattggttgtttttaaaaatcttctcaaaaactttagattgacaaaaacatattgaaaatttagttaaatcaatatcaaagatgtgatttaaatatacacaatagagaagtctttttagaccttgga

SEQ ID NO: 10576 - DNA, 1128 bp, Homo sapiens
catcctcctgcctcgggctcccaaagtgcagacattacaggcatgacccaccgtgcacagcgtcagctttatttttttaatgctgacttactgcagaaggcccaagggccagtgcagttttcatactgctgttgtagtggcgaacggagccacgagggaagggagcgccgccggcagctgccgggacaccaggataccacgcggccagcaccgaaacgctaggctcgcgctcacaaccgcaatctacactgagtagccgcgcgccgaacggcgtgactaagccccgcccacacggcgctcctggcggccaatggaaatggcttacgagacgccttctccacgcgctatacttatacggaccaatgggtgcgccctgtggggagtgccgccccctgtccacgagcctcctcttctcgccagccaatggaagcggtctgcctagccctcgcgggggcaaggcggcgaccgaggcgcgtgggtctgggaaggcgcgcggatttggcccctcttctcacatcagcgggtccaggcccaaccgacagactatgggggctccggcaaccaggcgctgcgtggagtggctgctgggcctctacttcctcagccacatccccatcaccctgttcatggacctgcaggcggtgctgccgcgcgagctctacccagtcgaggtgaggggcgcccctcttatcccggcccgctgaggctctcccggcgctgcgtccacagggccttcacctcctccgcgctcgcgcactctgggttccagttgcctctctcgggtcctgcccatgcctcccccgctcctaacccaactttagttcggtgttttcctcgggctttgtctctatcccagccccttctcccaagcggcgggggcgaacgctttgtttcctttaaagtcacttcttccctgggtttaaggtttcccgcgattccacctctggccggttgtcagtgtctgagggaagtagtctggatgaagtggtgtccaaagtcacatgttaggtttgctttaagcttctggttttttgtttgtttgtttggaagggctttaaaataccagtctgatcccaaagaaaaaatccgagtagaaatagacctgtctgaaggtttagcaccttggtt

SEQ ID NO: 10577 - DNA, 1832 bp, Homo sapiens
gcctaggctcaagtgatctgcccacctcagtctccctaagtgctgggattacagacgtgaaccactgggcccagcccaaaccttcaccttctaagggcactgggatgaacagaccgatcggcttgagggtgggcaaaggggtgtgggctaggttataaggaagtggtaccaaataactgtgtgcctgagttccaccgcaagattactaaaagcaggaccagaccagaaactgctaaagaacatggcctgtttgacatgttcatgagtcacctgacccacagcatatatgcttatgactaaaccctccactcctgattctcaagagtgtatcacctgtcagcaaaatgaatagtgggatattttgggccattttaaatgtgaaattttgcctctttaatgttaattcaaaactatatcaatgttttcttgttcccacctctaacccaaggaaaaaagagaaaacatactatgcaaaggaagtttaaacttaagttttccttaagggtcagcccaacaatgactttcagtcaaatggattaaactggaaaatgtttttgtttctgttgtaaacagatcatcctaggcgaaagttttttttgtttgtttgcttttaaattagtttatttctaaatcttagtcttccacatttctagaggccacctgacacaagtccctgtatctgaagtctagcatctcaaggctgatctggaagtgtgctagtatgctccctagtggataacttaatcttttaatacagttccgtcattcccatcttgttttcagaagagaaggtggctacagccaggcataacatatccactgtgtgcatagagggtctcttcacgttgatgcttggcattccatcagctttctctaagtctttgctcaagttcaaccttaaaatgatgttagacaacaggtcccagtcagttccctctattttcacccattttgctcacaagccatattggcccgattagtggtactgtctgactcacgtgtgtgatccaaataaaggtagctgctgaccactgcctggtttgttttgtggactaggggatagagaatccagggttctctcatgaggagttaaacatatttcaagagcaacaggaaaaaaggtacatcaagccatttgaaaacaaaaatttattgcttctccttccaaagctttgtgaatttacaaaaaaaaggatgaaagtttacaaactgcttagttccaactaagcataagaggtgagaacgtacactgcagggccaccagcagcagctgtgcactgatgttaaaactggctcccccagacttgtagtgctgtcttcagggggctgcattccttacacgccacctcttgtgacataggtcattggtcaagccgctggaatgctacagaggtttttttggttttgagaggcttttttttgttttgccttcctactataaaagcgaaattttcagttcatttctgaaaaataaattggtcaataaattcattttgttctgcttctactttacacaaagcttcatattcaacccgatacctgaaaaacaaaattgttagaggccctgaaaaaaagatgaagtaaaccacagacctaattcttctagagaaggatatagaggtttaaatgatttcaagaaatggtgtgagttcagaatgaagaaagaaagaggcaaagccctacccagagccacccatgagaaatctccagccctaggaaagtcttctttcagagagccagccaacttcgtggaccctttcatgctcaaactactagaggtggtttgatattaacaagttttctatttccttcccatcaaatgtaattttatt

SEQ ID NO: 10578 - DNA, 2057 bp, Homo sapiens
tccgacagagcagctctggctttgcagcctggccagcagctcagagtgcaccgaggagggaaggatggctaagctgggaccggcagtcctcacagggtgcctgtgagaaaggacattttacccccacatcatagtcacatcactgactcctaggtctagcacgactgctctttgtgattctcttgagtacccttggcttccagccatgctgtcctcacatacggtaaagccaaagagctgtcacatgggccagaaacatgagccacggcaggaagaccgtggagcccgtgggcactgcatggtgttggctggcatgcccatcagctgaggacagcaaactcccagcagcccctacagaggtggcacatgcttggccacacatctactccctgcccacaccatctatgctcttggttggtgctggctgggatggcggttctgcccagtggtgtctctgagcgcgggatgacaggagcaaccgaagcaccctgaaggccttcactccttgttgggtaactcagccatggagatgccaagcactagccaggaggtgagttcctctttagggctttggttttcattcctttttgtttggcttggccaaaccagaattcagcttatctgaattattttccaaaggaatgctgtcagggagggactgttctgccagcctaacaaagcaacgtagccacgtatagtacccactttctgctctttggagagaacacaggttatcaagttcatctctcttgactactcttatgatagctgatgccacagagcctatgggcaaatgccagacccagggttagacacaaggacctgaagtgacatgacggcgggacaggggaaatgtgactttctaattaggcattttatgttagtcacagtcttgaatgtataaacagcactaagactctcaggtcaggtaccttggtgatcagctactagttcttccagccctcattgaggtaacaagataaagacaaatccacttctttggccaaattcaggctttggctttatgactttcccacagagactggaatgcgtcagcctgagaccactggcctattttctcagctgccctcttgaggtcctttaacactcaaattcccagctccccactgaggtgttgtgatgcttgccttttgacctccccatcccctttagtccctgcttactactttgacattcacatcctcagtgtctcagtcttttttgccgagaaagcacagtagtctgggactgggcatttatcttctctgactgaaaatctctccttggtcttaaggaaaatactaacattgaactcactgacatgatcttagcttctttaatcagactttgtgacttaaaagtttgggggttttctttgaaagtttccagccctattcagaaagcaactcttggctgtgtgcatttttcaactccaagcagcccaggggtaagtaaacaaagtatggatgaaggtcagattttcttgtcagtttctgagaaacctggcagcctgctgttaacaacacaggccagtattgggttttattgaatttggtatgtgaccaaggtcggcctaaaggatggcgcaggtcctgggcaggaaagaatttttcctttatcacataactgtaatatttggttgctcagcataagtgatggaagcaaacactaatttctaataaaattgtgttaaactcaatggtacagagccatgtttacagtgagcaggccttgaccagcttgcggccatgggctgagttcctgtgcttctgtttatcatctgaccttgtgttctagccaggtcgtaagcgcgactgtactgttgccctgcaaccccagctccccctggaggactaaggacaagaataacaagggctggaactgtgatttaatattaattcaagaaaactacctctaacaatcactgcagtggcggaggaaaagaaatcctaagaattggggcaagatgcagcacaattcatctctggctcttggaaatctgagagaagctcaggaagtagcttgacttagtcatcaatccatacctaaagctgctc

SEQ ID NO: 10579 - DNA, 2027 bp, Homo sapiens
ccattctcttgcctcagcctcccgagtagctgggattacaggcatgcgccaccacgcccggctaattttgtatttttagtggagacggggtttctccatgttggtcaggctggtctcaaactccccacctcaggtgacctcaggtgatctgctggcatcagcctcccaaaatgctgggatttcaggcgtgagccactgcagctgtgtttttcttttcatggataaccatgaggggctcttgggtctctggaccagtcatcctgtcatgagctagagatagaagagagctcaggctcacatgtcctctgtggctggcagctgagggcatggggccatccagatccttaggaggcctcagccctggctccttctaaaccagcttctttctgactgtaggggcacgttccgctttgaaagacctgatggctcccactttgatgttcggattcctcccttctccctggaaagcaataaagatgagaagacaccaccctcaggccttcactggtaggccagctgaggccccaagtgcccaggcttggtcaccgggaagaacaactctcatcccacaattgctgcagaactcttctctccccatcatgggccacagtgggtctcttaatttgattgtggggttctttttgtggggaggggtggtataacttttcttcagaagacccatgtgggacacctccaaggctggcctcctcataagccctgcctacaccatgttccagtaaacctctccaccaaggaactgtgttcagctgccacaggcctggaggagtttcctggcctgtcacgtgaggtttgatcagtaaaccagtgcacgcttggccacccttgccatttctgctcccagagtctcaggctccccttctgacccagtgtgcgcccttgactgctttctttgctgcccttccagggagctgcccccctggtagggcatgtgcctgtttccctctcagcctggaggctggctggacatctcctagggtcactgtgcctctcagctagttggcgggggtgctggactggactcttgttcactttaccttctgccaaatgcagagagggaggccagtgtcagggtcggagtggcctggctcttagcactgaccgaccattgccatttctggcctcgctaggcccaggagaggagggaggcaagccagtcgggtttcctggagcaatgggtgtgccagccctcagcatgactctgccaagcatccagaccacaaatgcaggaatttggctgaggagcagctttaggtatggattgatgactaagtcaagctacttcctgagcttctctcagatttccaagagccagagatgaattgtgctgcatcttgccccaattcttaggatttcttttcctccgccactgcagtgattgttagaggtagttttcttgaattaatattaaatcacagttccagcccttgttattcttgtccttagtcctccagggggagctggggttgcagggcaacagtacagtcgcgcttacgacctggctagaacacaaggtcagatgataaacagaagcacaggaactcagcccatggccgcaagctggtcaaggcctgctcactgtaaacatggctctgtaccattgagtttaacacaattttattagaaattagtgtttgcttccatcacttatgctgagcaaccaaatattacagttatgtgataaaggaaaaattctttcctgcccaggacctgcgccatcctttaggccgaccttggtcacataccaaattcaataaaacccaatactggcctgtgttgttaacagcaggctgccaggtttctcagaaactgacaagaaaatctgaccttcatccatactttgtttacttacccctgggctgcttggagttgaaaaatgcacacagccaagagttgctttctgaatagggctggaaactttcaaagaaaacccccaaacttttaagtcacaaagtctgattaaagaagctaagatcatgtcagtgagttcaatgttagtattttcctta

SEQ ID NO: 10580 - DNA, 1222 bp, Homo sapiens
aataaaattgacttcagtgtggtaaactctggatgtgtggttctttttctatatcagctttgttctgggtccactgggatagatttaggcccttctaggatattgtaggtaaggaagactttttgtttgttcaacattttatttttctgtgtgcctacaatggactaggcattgtgcattagggttaaatcagaaagcaaagtagacatgattcctgctattgtggagtttctagtctagaaaagaacgatttgcaaatggccaatagctgtacattgtgctaagtggaagggaggtcagggaaggcttcctggaggcctaagcttttacctaaaggatgagtagagtcagccaggtaaagaagaaataagagtgttccagcattggtctggttgatcacagacttcaagggaagaggtagcaagaccttgtgctggagttgcctccacctgtgttgctttgtggtctggggcccacctggatggatttgctggactgcagactcactgaggcccctctttccttccagcttttccttcatagcatttttggctaccgaggtgtcgtcctgtttccctggcaggccagactgtatgaccgggatgtggcttctgcagctccagaaaagtaagtttccctgtggttgtgcctcacagtatcctcaggaggagatggcagacatatgtaattggggtactaggggtgaagacagcgtcctcctaggccttggaaacatccccagagtacttctctgggactaagacccatggagacaaaagtgctgagtgccagggatagtctaagtcagagagtccctttaggcctcctcagaatgctttcctaagccattcctaattttcattatgagtatcccagagggcatttgggggacaagtcttcttgatttcttgatgttcagctggagtctttccctcaatctcacatcatccctagaatacattaaaacagaaaaggttcagccccattaagtgatcacagacagtccctgggatataagaagacaagagtactctgggccctggggactgaggtggcaatttgattttctcaacatggcccccttcttttaagaggtatccacacggtcagatgatggctccataccatggtcttccatgctctattatttgccccaactgaggagcagctgagctgaggtgctgcagagcaggtgtccagctggtgctaaagcccctttaga

SEQ ID NO: 10581 - DNA, 1265 bp, Homo sapiens
agttagtcagaagaccagcccaggccagctgctgtttctgtggggagccctaatcttctgtgaatttccaaagggagcattggaggagattgagataacacatctttaaaacagaaagaactggtcttggtctatcagtacctcttcctgaatctggtacccatctgccttctccagttcattctaaacactgctgggactagggtttttccatcaggagcaaatggaatccaggccttcccagaagtagaccatactgccttgaacttgtccatatgtacaaactgatcaccagctttctccatacatttttaatgcagacctgtaattgagttcagaagcctccaagaaaacagaaaggatcccctttctccagtttgtgctggaagaggagctgatcagagacatcaaataagagaaagatgggttgctagaggatggtagaactggaagcaaggcagctacctttttgcaaaaggaaatggtgttaggccccttttccagaagataagacagactcatagagattaaatgatcactatggtccttcttctgttaaatggagccaaagacgcctatgttgttctgaagtcttgtaatgtttaacttctgagaacttagattagtggtgtgatgatagagtctgtataacgcattgaaaagggtatcaggcttagttatttatccaataaatatttattgtatgcagggtattcctattttaactcctgtgacaacacaaagcatagcgatttccatagttctaactgttcagggtctgctcctcctggtacactctttttggttcactgtatgtactcctgttgtctttttttttttttccaaagcacttttctgttttcataaattatatactcattcactcagtggacacttcctctacaatgtttgccagtttctgttagttgggagaagtgtcagctgtgaaaagaaaaagtaggtggcattttacagtgtttccagtaacctgagctatataaaatttgtgttaaaaagctacactgggccaggtgaggtggctcacacctgtaatcgtagcattttgggaggctgaggcaggcggatcacttgaggttgggagtttaagaccagcatggccaatatagcgaaaccccatctttactaaaaatacaaaaaaattagccaggcgtggtggtacatgcctgtaatcccagcactttgggagaccaaggtgggaggatgcttgagttcaggagtttgagaccagcctgggcaacatggca

SEQ ID NO: 10582 - DNA, 1240 bp, Homo sapiens
ttccatcgtcctttctgaaggaacagctcctgaaaccagtctccctgggctgagacaacctgggctcttcttaggaaatggctctccctccccctgtcccccaccctcatggcccacctccaacccactttcctcagtatctggagagggaagggaagtcaggcttgggcacgggaggttagaactcccccaggccctgccattgggttgtctgtctccgtcatggggagggtccctgctcagttctggagacactggagttggggtgggggtggttctgcattcccttctcctgctgatagcagtcagcttgaggaggatgaaggaaggcagcctcagacaggaattaaggcaatgcccaggcgggcctgggcactgtattctgagcaaaggcctgggcccaggagccagccagggatgagtgccatcatggctctccactcagactgtgcctggcccctgcacttacaacttcctgccgctctgtggccttgccctgtaatcactcagtgcccttagctagcctgactaagtcccagatcccctacagcttccttcggtgtggtatcttttgccacatccagggcgagggttgaggcaaaccagccctccctctgacttccttgtcactgcagccagctttgctgcacttgctggtgcacaggagcctcctgtttgggcctgggtctgggcatggggaggccgtgcctcaaagcccaccctaccccatgccttggtgctgtgcctcaggctccttcctggtctggcccagctggcttccccagcccctcagccatccagggctacccactgcttactcagggaccaggcagcccccatggcagtaaaagcagcctagacagaacctgcagctctgtggaaagaggcaaagtcctgaaaaggcaaagggttgtcacttagggcagcttctccaactttaacatgcatccaagtcacctgggaatgttgttaaaatcaggagatctggggtggggcctaggactctgcatttcttacagattcccaggtgagctgatgctggtggttaagggtagcaaatctctaaagcacgaagccctcacaaatctttgccatttcccaaacactccgctccatggtctccagtcatcagagcaactctacctggtattatcatccccattttacagataatgacactgaggctcagaaaggttgaggataagcccactttcctgtcattagtggcagccccagatcc

SEQ ID NO: 10583 - DNA, 1163 bp, Homo sapiens
taccaaacgaaagtttaaatagaaaacaaagagagaaagagtcctcaaaagagctgggcatgtgtcatctaaggacacaatcgacagaataaaaaggcaacctacagaatggaagaaaatatttgtaaaccatacgtctgagaaggggttaatatccagaatatataaagaactcttacaatccaacaacaacaaaaaacaagtaacccaatttaaaaattagcagacggtttcaatagacattctccaaagaagatatacaagtggacaagtatatgaaaagttgctcaacaccactaatcactaaggaaatgcaagtctaaaccacaacgaaatatcttctctgcaacattccaattttaatatgtgggctgccgaagcaagcacaaaaccacaatgaaacaccacacacccactaggatggctgctgttttaaaaaagacaaaacactcttcctaagccggcgctcggcaagttctcccaggagaaagccatgttcagttcgagcgccaagattgtgaagcccaatggcgagaagccggacgagttcgagtccggcatctcccaggctcttctggagctggagatgaactcggacctcaaggctcagctcagggagctgaatattacggcagctaaggaaattgaagttggtggtggtcagaaagctatcataatctttgttcccgttcctcaactgaaatctttccagaaaatccaagtccggctagtacgcgaattggagaaaaagttcagtgggaagcatgtcgtctttatcgctcagaggagaattctgcctaagccaactcgaaaaagccgtacaaaaaataagcaaaagcgtcccaggagccgtactctgacagctgtgcacgatgccatcctcgaggacttggtcttcccaagcgaaattgtggtcaagagaatccgcgtcaaactagatggcagccggctcataaaggctcatttggacaaagcacagcagaacaatgtggaacacaaggttgaaactttttctggtgtctataagaagctcacgggcaaggatgttaattttgaattcccagagtttcaattgtaaacaaaaatgactaaataaaaagtatatattcacagtaaaaaaaaaaaataatgagtattgttgaggctgtgaggaaatcggaacc

SEQ ID NO: 10584 - DNA, 1266 bp, Homo sapiens
gtggcgggactcaagctcctgacctttgcccggcctggctgggcctctcttgcagtcagcgagatgatccgccacccgtatgagacccagtctgacagcttctacttcgtggatgaccggctggtgatgcacaataaagcagactattcctacagcgggacaccctgaccccacggctgccctgaccccaggaggctccagttctgggctgggagctgtgacctccccaacgctcacccctcaaccccaagtcctctgcttggggagttctccaggagctccggaccctgagtcaatgttgggaggaagggtacctggtgtccccagtcaagcccatgaagcccatgcggcctgctacatggggtggggtcgtagggaggctgtttgcctccacgtctaggaaggcctgtgagaggagcagtcaggacttccggacaacttagctgggccctacttgggcccaagtttcagaatagtgttcccctatcaaggctgtgactagatcaggcagggatccattccctgtcccctgcccactaccttcaggccatttagagttgtaaatttacaaagatccacggtgggctccagctgccaagccacccaagggagtctgggccctaggcctagccccatccctccccatgaggggccaagacactgcctaaggtgtgggagggactggctgagattgcagcccatggtaggagctggaccaactgtatatagttttcaataaactttttccttttctgttctctggtgtggccagcctctgtgtgtatgggcaaagaagggagcagggataggcaggaatgtgcttaaggcagtaaaaatttctcctacctcccacattccagtgcactctcaccccttagtcttcctgtcccctgattctctgtaccctgacaccatatagagtcagcatttagaacatgatggagctggagagggtctttcttgtgatgaaggagacccagaccctgagaggggaagctttggcccaaagtcagagccaaccctggcagaacagaggccgaaacaaaggccctgaactccagggtgcaaggggaaggtgtggggggtgggggtttggccttgtcctccacgctaccttccctgaaccccagaggccactaggaccactgggttgtgtttttagccctcatgatagacggtggcagggctttggctaaggcctggagccatctccttgccctcagctgccttggggagcccccatgcctgggtagccctgcacataac

SEQ ID NO: 10585 - DNA, 1242 bp, Homo sapiens
ggcagaagagttggcgtctgggcacctggcatctgcctttgtcgccagccaggaagctgtgacatcctctgagcttgccttctttgacccgtcactcctccacctcctttatttccctgatgaccagaagtttgccatctacatcccactcttcctgcctatggctgtgcccatcctcctgtccctggtcaagatcttcctggagacccgcaagtcctggagaaagcctgagaagacagactgagcagggcagcacctccataggaagccttcctttctggccaaggtgggcggtgttagattgtgaggcacgtacatggggcctgccggaatgacttaaatatttgtctccagtctccactgttggctctccagcaaccaaagtacaacactccaagatgggttcatcttttcttcctttcccattcacctggctcaatcctcctccaccaccaggggcctcaaaaggcacatcatccgggtctccttatcttgtttgataaggctgctgcctgtctccctctgtggcaaggactgtttgttcttttgccccatttctcaacatagcacacttgtgcactgagaggagggagcattatgggaaagtccctgccttccacacctctctctagtccctgtgggacagccctagcccctgctgtcatgaaggggccaggcattggtcacctgtgggaccttctccctcactcccctccctcctagttggctttgtctgtcaggtgcagtctggcgggagtccaggaggcagcagctcaggacatggtgctgtgtgtgtgtgtgtgtgtgtgtgtgtgtgtgtgtgtcagaggttccagaaagttccagatttggaatcaaacagtcctgaattcaaatccttgtttttgcacttattgtctggagagctttggataaggtattgaatctctctgagcctcagtttttcatttgttcaaatggcactgatgatgtctcccttacaagatggttgtgaggagtaaatgtgatcagcatgtaaagtgtctggcgtgtagtaggctcttaataaacactggctgaatatgaattggaatgatacaaagtctgagctctactctttctgcattcacgcgtaagtaacagtttcctggtgtttgtcctcctgtgcccacaggtccactttgcttccacgtggccatgtgcccttcctagctggattgcccaaggctgttagcatctgctttttacctgagatactaattc

SEQ ID NO: 10586 - DNA, 1223 bp, Homo sapiens
ttgtataaacataaacataatttacccattctattgctaatggacatttggattatttctaggttttactgttagaaataatgctattatgaatacttgtttctttgccatgtgccatttttatatcagactctccagttgtctgtttattccgcttttcttgctcagcatgccatctctgagtttccatttcaccattttaccagcccctgaagagttagatgctgcctggacccatgtcaactgggaaaaagaagagaacggagacaaatgaaaatactcaatatatactcatagctcagaaatgctgagttaatagctcatgaatctcaagagaggtgcaaacctgttggtcattggcaaaggggcagattcggaacagtaggagccagggtgctttttggctttcttttctgagccatgggcattctgtctcttgctcacccccacaggacatgatgagctacattgggcccaagaggacagcagtggtgcgggggataatgcaccgggaggcctttaacatcattggccgccgcatagtccaggtggcccaggccatgtctttgactgaggatgtgcttgctgctgctctggctgaccaccttccagaggacaagtggagcgctgagaagaggcggcctctcaagtccagcttgggtagggcaccaggctctgccacatgaagggagaggaaatgaattacatggggcaggagggaaatctgcatgccaacttctttctcctttcttctctagtctcaatttttttcttatttattttatgttattattattattattattttttttagttatttattttgagacggagtctcactctgttgcctgggctgagtgcagtggcactatctcggctcactgcaagctccgcctcccgggttcacgccattctcctgcctcagcctcccaagtagctgggaccacaggtgcccgccaccactcctggctaatttttttgtatttttagtagagacggggtttcactgtgttagccaggatggtctcgatctcctgacctcgtgatctgcccgcctcggcttcccaaagtgctgggattacaagtgtgagccaccacacctggcctatttattttattttattttttgagacagagtcttgctctgttgcccagactggagtgcagtggcgtgatcttggctcaccacaacctctgcttcccacgttcaagtgattctcact

SEQ ID NO: 10587 - DNA, 1700 bp, Homo sapiens
tcccgccagggctcatggctgtttggctaatggggctggcaggcagatcctcttttcaggagcctttcattttagaatccatgaataaatatccttgggaaggggcaggtgcatgaagtgagtggcttctatgcctaccctctccatgacctcactcagattattaaattcagtgtttactgagtgtttcgtatagcaccattgattttagggaactgagagctaacacaacctaaagtttagaaggggttataattagactgtaagcttcttgaaagcagagaccattgtatgtgaattgccccattgtgccttggatgtgtttaataaatctttattgtcttggttcattttgatttattctgcctgcccactaatatttacattttcttttactcctctccaatctgccaggtaatcaaagagaagctaaggctgaagtctgcaacaggctctgaggtccggggaaagctagaaactaaatcggacctgaacatgcaacagcaggaagaggaggagaaagcccggctcctcattggtttaagtgtgggcgacaagaaccctggcaagaagtccatctttggcaggcgcaaatgatttggcgattcgagtggctgcagtacaggatctgactctggctcaggctccagggacttgtggggtgggaggggcttcccgttatccacgaggatttgtgggtgtcagagcccataggcatcactcttcagcacctggtctgttcgctgcagggcatggtggacagtaatgctgagttctgtctcacactgatcaggctcagggccagagaggcaacaagagagcaagacccagggaatgggcccagggcaggaccctattcccttggggtcaagtgaaagggtagggggatagtcctgatcaagtgtgataaatttttatagacatatataaatatatatatattatatatatatttctaagtgtaactgtccttcctctgtgccaggaaacgggagggggctgatcctctgatcctcactccactgtcatgtttgaaagaggtattggtgttctggagtgggggtcaacccctccccagtctctgtgctaagttcacttgggaggatggcagtaggagccagggctggccatgggtcccctacccttccccgtaggatataccctggagaatggcaaaatgatttaaagagaaaaaaaaagatattttaaatttgatgctcatttttgtgtgtgtgtgttgagtgcatgcattcaatctgtgtattcctccctcatcaacccagaacatcctgcagctgccactctgagggtggccccttccttcctctgccctgaagctgtatcacagaaatttctagtcctagtgtgactctggccccatgctgatgggtttctgcagactggaagaggcggggctcgtgtcacgcagcatcagggagaggaattgcttatataactgggacagcagatttagcagagagaggaggcagaggctgggaatgggagcagtaagctgtcggcaggggcagcacacccagcagggggaacacacccgggtggctgtccctcacaaggtaggctgtggggctctggcagcctactgaggggaggagagggagacatgggcttgagtcctgggaagttcctggttaggagcatggaagtgattacccaatgtgggggtggggcagggaggctgt

SEQ ID NO: 10588 - DNA, 1700 bp, Homo sapiens; identical to SEQ ID NO: 10587

SEQ ID NO: 10589 - DNA, 1183 bp, Homo sapiens
gtcttttttcccctttcctagtccatttgcatgtttttagcacggggcatttataacggcccttcagtataaatccactatggaaaacaatgtggtgatctgagagggtgaaagcttgcccagcttagcagtaccattgcttctcctctcattctgcagaggatttgtgggttgctttatggcaggaaggacattgggttgggctcttctttactctctatcctacaggtagtactgcggccccagagctcctgccagtctgggcgacagctagctctccgcctcttcagcaaagttcggccccctgttgggggtatctctgttaaggagcattttgaggttagtaagcagtcccttagggacctgggaacaagggacattcaaaagccacctgtgtgttacacgatattaggagtaggtaaactgatgatggtatctgagcttaattgcttcttgaatctttttcctttttaggtaaatgtggtgcctctcaccatccagctgacacaccagttcttccacagaatgatgggctttttctttcctggccgaagtgtggaagatgatgaagttggtgatgaagaggataagtccaaactggtgactactggtgagaacttttatggtggagccccagaagaatagggtagcaaccccaaagacagctgagacttcagaacgaggatggatgacagctggtacacttgctttttcataggaataccagtggtgaagcctcggcagctgattgcaacagatgatgcagtaccactgggccctgggaagggtgtggcacagggtttgactcggagttctggggtcagaaggtcatttcgcaaatcgccagaggtaccaaacatgcccctgatgatagaaaaatgggagagtcttgaggtcctgtttggtgtggcttgggatttcttcggtttcctctaagtccattctagggataaaagaagagggagatgtttggggtcctgagtttcttctgatggattcagggctcacactccttgcctgcctttcttagcaccctgtggatgacattgacaagatgaaagagcgagctgccatgaacaactccttcatctacataaagattccacaggttccactgtgtgtcagctacaaggtctgcacctctcaagcactttgtagaacagggtgggaagggaaccagata

SEQ ID NO: 10590 - DNA, 1176 bp, Homo sapiens
cctcctgccttggcctcccaaagtgctgggattacaggcgtgagctgggattaccacacccagctgaaagatcactttggtggccttgatactatgcatctgaactgaaaatatctttttttttttaatgaacctgacataaacatatgaaaatgtcttgaagttgatcagtatacagttgcagataaaattgtaggaattattagtgggaagacactactttatcaagaagctatagagctgaaagatgggatttgtgctcctatgacctagaatgtcaggagcaataaattcagtgaaaaaaatgtagggactggctaacccagaataggttaatttctgggtttacctcctgcatcattctagagcattctatcccacccccaacccatgtgctgtttcccttactggctttggctcccctgtccacttacaggtgttttaaggatttccaactgcagcgggctaacaagatggagctgcgaaagcagcaagaagatgtgagtgtggtccgtcgcactgagttttactttgctcaggcacggtggcgcctgacagaggaagatggacagctgggaattgctgaattagaactgcagaggttcctctacagcaaggtatctggggtatatggtcacacaaaggcagctgtattgagagacattgacctagcttaggagtctaactcataaaagagaaataaaagggggttaattattgtatgattattaatgatagtatcattaatattaacgagctcattaatcatattaatgagcagagcttccttagatatatctgtttataatgaatgatacacatatagctctgatgccatagggggagagtaagaatgaacaaagaaataaaataatttttaaaaaatgatacaggccacgtgtagtggttcatgcctgtaatcccataactttgggaggctgaggtgggaggattgcttaaagtcaagagttcaacaaaaattttaaaaattagctgggcatcgtggtgcatacctgtggtcccagctacttgggaggctgaggcaggaggattgcttgagccctggagttcgagcctgcagtgagctgtgatcacaccactgcactccagcctgggcaacagagtgagaccctgtctctaaaaaagaaaataaataattaaaaacatatatgatag

SEQ ID NO: 10591 - DNA, 1095 bp, Homo sapiens
tgaactagcaactcagattaagccacctgaagttcttgagaaccaggaaaaggaagatctcctaaagaagcaggaaggtattcagggcttgaaaggcttttaggaagggactagagaaattgtgaaagtagttatttccttggtggttttgagacagtagagttattaaaaatccactgtgcactggcattaacatttcactttgctctactttttgtaagttctgctatgagaaaataacctctattcttggagggagctgggatgaatgggcattgtttatgattctgaagtaaacatgtttctgcccatgagcaactctcaccctttctgtggggttgactagtggggtggttccaaatgtgggttaagagatggagtagatatttaggtagaaacttgagccttttatttagctgctaacaattatctaggggctgtggataccttcacccttatccaccatgagctggaaatttccaccaacccagctcagtatgccatgatcctggacattgtcaacaacctgctgctccatgtagaacctaagcggaaggtgagcatgggcccttgtagaatgctggttagcctcacaggaacacccagactttgtgctttatttgggcttctgtaacaaaagccatgcttcacactgaaaaagggccttgtggttggtagattctcttagtcggcagtgacaattgaaattccacttacttaggaaaggcctgaatatctctcagaccgtagggcttgtttgcctgattgttttctcctagtcatttctctactcagtcacctagacacctctaaaaacatttactattccctgcttccacctccatcccatcctgttgggcctgacctattgtgaaatccacattgccacattttctgcattgacctactactgttgctattaccagtgacagataaaggttagctttctagaagagaccccccccatttctttctcctttctctatttcactttactacaagacttgtctacttaaaaatcatattcatttccctttccattcctttaggaacatagtgagaagaagcaacgggtcaggttccagcttgagatct

SEQ ID NO: 10592 - DNA, 1099 bp, Homo sapiens
atggatctgaggagcttagacctgggagaaggaagagggcctggagacataatcaggggaagcagcagacctcagagaatataatgacattgatggcaagagagtggtttcaagtggaaaagagtggtcaaataacatgtaaaataatatgaaatgaaaaaagaaataaaatgggggtaagggagagatcatagagtaatacctaagagaaaaaaatgttacctagcatttctaagtttctgttgggaatctgttacttttattaaaattgaagggaaagtgaaataacccttgttttgccttcatgggtcaagggatgggctgggctagagttttaggtttgggaggatgtattctaagctcttacctagccagataaattgagggaagatcaatttggctctggaaagggaaaagtctttccctttgagactgtgacctttccctgcttcctatttctctgccaggtgcttacatgttgcagaagctaattgaagagacagataggtttgtagtgttcacagaagaggaatcaggcatgagtgaccagttgtgtggcattgctgcctgccagacggatgacatatacaaccgaaactgccttattgaattggtcaactgtcaggtaccttctctttacaagttacctcaacatcaggctagatcatgatcatattgttccccttcccccacctctaaatatgaatgggtgaatagagctccaaaaaatttggccttctcataggtatcataggtaatcacttctatgtctaaaagccagtaaaatttacttggtaagccagcattagacctagctgcagtggttgatacaatgtgctcactaacctcatcgtccttggtagcttaactctgcttctatctctggcatagatggttcttcgtggagcagagacagaaggctgtgtcattgtgtcagctgccaaagcccaactgctgcagtgccagcaccatccagcctggtatggtgatacattgaagcaaaagacatcctggacttgcctcttggatggcatgcagtactttgccaccactgaaagcagccccacagagcaggatggccgacagctctggttagagg

SEQ ID NO: 10593 - DNA, 1135 bp, Homo sapiens
gtaggtatagtttgaatgtaatataatataaaagccaagaccacttagtttttcttctccagggtctgtctccccaccacgcccagtgaatttttttttttttttgagactgcgtctctctctgtcgcctgggctagagtgcagtggtgtgatctcggctcactgcaacctccacctgccaggttcaagcgattctcctgcctcagcttcctgagtagctgggattaccagtgccagccaccatgcccagctaattttttgtatttttagtagagatggggtttcaccaggttggccaggctggtcccaaactcctgatctcgtgatttgcccacttcggcctcccaaagtgctgggattacgggcatgagccatggcatctggccaacaggtttcttattcaacaaacttttatcactgcctctgtggcactgggggcaatttccatgctaccctgaagtccttttcctgtttcttaggagctctctgctcgtgatggggatcctacctttcatacacatcagctgcacttagtagatttacggatttcctggacaactaccaatcgagacattgcctttgggttatatgatgggtacaaaaaggcagctgtactcaaacgtaatctttctactgaggccctgaaggggttaaagattgatccacagatgccagccaaaaagccaaagcggggtgtcccaactagtgcctcagccccacctcgtgttaacactcccagcttcagtggacaacctgataaggggtcatcaggaggtaagctcggggagatgagactttttgggtttgggtttagaacatggatatgggcttggacaggagttttaaaaggactgagtcatggtgcttctatctaggtaaagaagtgaaactattatttttccttcttaggccacctaagtcttacatattaagtaacagtgatgttggggcattaaatggtctggtcctatggccagaagagaatcagaaggggagtgttggagccaaaacaagatgagtaagggaaagaagcaaagtggtaaatgccataagagagaaataaaagaaaatgggagttggatgggcacagtggctcactcctgtaattccagcacttttggaggccgaggtgggt

SEQ ID NO: 10594 - DNA, 3499 bp, Homo sapiens
ttcagacaatttagaatccagttgaagagaacttaaaaagtataagtgctcttaaatgtcagacactatcaactgtcagctcagcacattagtgctaacaggaacaaagcaaggcagtaattaatgtgattactcaggaacaacttctgggtggagatggttcttgagccaggtgtgcatgtgtcataatccttgccatctctactgttttgtgacatggtaattgacagatccttttcttctgctccctaaaggttcagtgtggtgcagggctgaccttactttggagccccccagatcacatgtacctgtaccagcatgtcctggccactctacagtgccgagacctactaagagccactgtgtttcctgagactgtaccatcccttgcactagagacttcaggaactacttctgagctagaaggccgtgcccctgagccattacccccaaagcggctgctaaacctaaccctggaggtgagcacagccaagctcacagcttttgtagctgaggacaagttcattaccctggctgcagagagtgtgtcactgagccggcatggaggttccctgcaggcatactgtccagagctggctgctggctttgatggcaatagtatcttcaacttcaaggaggtggaggtgcagctgctacctgagctggaagagatgatcctccaccggaaccccttccctgcgctgcagaccctccggaaccgtgtttggctcctctctttcggctcagtctcggtggagtttccttatcagtatgacttttctcgaactctagatgaggctgtgggagttcagaagtggctgaagggactacatcaagggactcgtgcttgggcctctccaagccctgtcccactcccacctgatctactcttaaaggttgagcacttctcatgggttttcttggatgatgtttttgaggtgaaacttcatgataactacgagctgatgaaggatgaaagtaaggagagtgccaaaagactacagctactggatgctaaagtggccgcccttcggaagcagcatggggagttgttgcctgcccgcaaaattgaggagctctatgcctctttggaacgcaaaaacattgaaatctacatccagcgttcccgtcgtctctatggcaacacacccatgcgccgggcactgcttacttggagcttagcagggctagaactggtagctctggcagatgcctccttccatggtcctgagcatgtggtagaacaggttcaagagcttgatccaggcagcccttttccccctgagggattagatcttgtcattcagtggtgtcgaatgctcaagtgcaatgtcaagagctttctgggtaagtagtgtttcctttatttgcagaccccgtgtttgcccgctgagctctggggagctctcagtgatttcagaggaactaggttatattgggaactgtgccgttttgggtgggtggagtgggatgggtgggcttcccttccctttctttgttcctgaatttcaccgtgaaattgcttggctaacataaagggaaagctaacacagtcatctttaaggttattgtgtctcttggatctcagtgctatgcccttaaccacctgctccagggtcactgtcatttttcagcttgctgtgtcaactgcctgcccttgttctctcaattgactttgtaaatatagatgggtaaaatagtggtgaggaaaaagataggcccgagagtgctcagactgcccctgagtagccagtgtgtacccttcctctggtaacagttcggatcagggactatccacggtacctgtttgagatccgtgactggcggctaatgggtcgacttgtgggcaccgagcagagtggtcagccttgctcccgtcggcgtcagatcttgcacttggggcttccgtggggtaacgtggcagtggagaggaacatgcccccactcaaattctaccatgactttcactgtgagtagagatgaggcagttggtttggctgagggacgtttgtgatgggtgaaatgggaggtgagctgagacccttctggagtgaaggaggaagagaggggtaatgttgtgaacaagttatagcctttgttcctctaccccagcggaaatattccagtacacagtggtgtggggcccatgctgggatccagcctggacactaattggccagtgtgtggacctcttgaccaagccctcagctgaccccagcccacctttgccctggtgggacaagagccgtcttctgttccatggagactggcacatggacattgaacaggcgaacctgcaccagctggccactgaggtgaggggtgtcatgatacttttatcctatcaggatggtatggttgaggtctgtatagcacatgtgggaagagagacaggtgctgatttgggagatgaggatggttttcttacctatatctcaccaaattctcgggggtggtcataggatccatacaacacaactgaaaatatgcactgggagtggagccacctgtcttttcattggaaacctggtcagtttgtgttcaagggtgacttggatatcaacgtgagaacagcctctaagtgagtggagtgaagggagggtcctccatgggatgaggggctcaggttggagggagggggaagagccaaggggaagtgagtgaccagggcactgagggctggggttccattgtgaggcaggtatgacgactgctgcttccttcacctgcctgacctctgcatgacactggacctgcagtggctgtgccatgggaacccccatgatcaccatagtgtcactctgcgggccccagagttcctgcctgaggtgcccttgggccagcttcatgactcctaccgggcctttcgctcggagaacctcaatctctccatcaagatggatctgactcggcacagtggaagtgaggcttgggcctggggcagtggggaggaagggcttgggaggacgggcatggatgctggggactttagcttgaccctctggggaggggaggggaggggagaagggcaagggagaatctaggttaggacctttttttttgttttttggcaggggaaagggttggtgtcttagtcctttttggctgctataacagtaataccacaagtttggtagcttataaacaacaagcgtttatctctcacagttctggaggcttgaaagtcgaagatcaaaaagagctgatagattcagtgtcagtgagggcccattcctcatagatggtgcctttttgctgtgtcctaatatggtggaaggagtcagtgagctcccttggaccacttttaaaagggcactaatcctattcatgaaggctccaccgtcatgatctagtgacctcccagaggcccacctcttaacatcattaccttaggggtatttcagcatgaattttggggagatgcaaacatttagaccatagcagtaggggaaagcagagagcttagatccttgaaagaagagggagttggggatgctga

SEQ ID NO: 10595 - DNA, 1627 bp, Homo sapiens
ttatggtttagaagtgatgcttcttggttattttaggttcaagcgtatagtattgctggtgttcattgtatttggcctatgaaaatgataattttatatgagtcaacctaatatccttttggggttcctgcagattaccattaagagtagcaataaactgatgagttcagccttttatcttctaggtgtgtctcgtcctaagaatcacaataaaactctgaattctcactctgattgtgagagcttcagaaactgttccatgataggaagctgcagttcttttcttaccaaacaatgatgtcttgttcctatgcagaaccttcccccaaatcctggctcccatcatctttagcacctccatctccaatgtcaacatttccattcaacttggagatacaccaccttttgccttgggattcaattctatctctctgggtaaggctctcagatggaataggaacaagaatctgtccgttagtggagctaggcccaattgatggccacagtggctccatgcaatccctctttctcacctttgttcagattaccagcacctcaggccacaaagcatccatcagcggggcgtcctaactgtggaccacctctgctggcgtgtgggcagtgactcccacattcagcgggcgccacacccacccaatatgcatgtttggggtgaggcacttgttctggactccttcacactacaggtaggtgagggctttggtgaataggggcctgcacagctttcctcatcctgtcatgcgtcagagcgctgagcatcctaatgcagcaggaagtgcattagggcattataaaactgtgcgcctgcatacttctaatgggatccgtctgcttcttctctagggtagctataaccagcctctgggcctgtccagcacccagtcagataccctttttcttgattgtaccattcgaggacttcaggtggaagcatcagatacctgtgcccaatgtctgtctcgtatcttatccctgatgggtccacaatctgggaagtcagctgtctctaggcactcttcatttggggaatctgtgtcattactgtggaaggtggacttgaaggtcgaagacatgaacttgtttaccctttctgccttggttggtaagtgggacaaggagtctatactgaagtgtgctacttgggagactgaggcaggagaatcacttcaacccaggaggcagagtttgcagtgagctgagatggtgccactgcactcgagcctgggcaaacgagcgagactctgtctccaaaaaataaaataaaataagtaaataaatatactgaagtgtgtagtgtgtaaccttagcagattatgttggtttagtctgctcctcatttaatgaagctgattatctggaatttttctaaattagaggcacgagatgcttgaaagtcttgcataaatattagacttcttggtatttcttaagggcttatgaaaggcaagtactaagcaagacatataagaaaaagccttgatctagtcaagagagatccatataactttttatttccttgtgtgtttagttctagagagtaaatggtatgtctctgtgcaatttgtaggagttaaggaacaactttgattctgccgaatctagttag

SEQ ID NO: 10596 - DNA, 1190 bp, Homo sapiens
cagagtcttgctctgttgcctaggctggagtgcagtggtgcggtcttggctcactgcaagctccgcctcctgggttcagaccattctcctgcctcagcctcccgagtagctgggactacaggcggccgccaccgcgcctggctaattttttgtatttttagtagagatgaggtttcaccgtgttagtcaggatggtcttgatctcctgacctcatgatcctcccaccttggcctcccaaagtgctggggttacaggcgtgagccaccgcgcccggcaaggccaagtgctcttaatttttttcctttcccaggctaatctgtgaggtgagcttatgtaagatcaacagcaaagttctaaagagtggtcagctggtaagtatgccatgatcattcagatgcctcatttcctcctgggcgtaaagtgtgaaggagcttagggcttacatcctaggttctttgaccttagggggttccctcaagtcagtacccagtgttccagatcaccacattttgacctaaaacttccaaactttcttacatacaccttagaggcttatcatccccacaggaggacacctgcctagtggagctttcactggccctggacctgtgtctaaaggtgggcattagcagtcggcatctcactgctatcactgtggatgtgtggacactccatgctgaactgcatgagggcctcttccagagccaactgctgtgccagggcccaagcctagcatctaagcctgttccctgttcaggtaaagccccagtgattgagcttcttggctgccttgttctcagggtttgttttggaagtagaaaaaatagtggtctcactgcttatttagatgtgattcactagtcaccatggactttgaccctaaggatagttagaggaaatagggcatttgcttgtgctgagtggcagaaccagcattgagtgggcacctatcatgagttagacctgtactatgggttttttttttttcctttttttttaaaaaaaaagatggagtcttgctctgtcacccaggctggagtgcaatggcgtgatctcggctcactgcaacctttaaccttctgggttcaagtgattctcctgcctcagcctcctgagtagctgggattacagtcatccgccaccatgcctggctaatttttgtatttttagtagagacgggatttcgccg

SEQ ID NO: 10597 - DNA, 1465 bp, Homo sapiens
cttagcagaggcaggtgctctggatcctctgagggccctgaccacatgatatgccaggaacactagtttctgggtgaagacggaagagggcagtatggcagccagctgctgctgtatctgccttatcccagtagaggggctgctgcccataggtatgaggttcctttctgcaagggtacagtgattggtgggaagacttccttctagcaaagtcccaatctcaacttttcttcccctcccaggtccaacagccatgcagccatcgactggggaaaaatggcggagcagtggctgcaggaaaaggaggcagaacggcggaaacagaagcagcggctgacacctcggccctcccccagccccatgatcgaaagcacccccatgtccattgctggcgatgccaccccactcctggacgagatggatcggtagggggcctgctcctcggactctggttacctctgaggctgggaaaggcctggctgcccactgcctccctccctgcccctccttttatgtccataaagtggcgtgaagtgagacgttctctttggtggtcaacccggatgggtgacaggctggatggccttgtgaacttgagctcagtgtatgctaggcaacaattctcccgctccagaccctcaccgaccacctgtcctgggaccaggctgggaggggagtgtggcagggaggaggaagaggaaggtgagaatgagtagaacagttttgtattctactccctacaagccattttgaacttctgccctcaccggactctgggctgtgactggggcaccaaactcagcacatgagtctcccctagctctcgtggggagagggatgctatttattcagtttggggcaggagggagaggagggaaagtatttctgaccctgatgccaacagccgggtggctgtccaagcaggattgcaggggacacagggaagcactgcccagcccctgcctggctgccctttcccccctgctgctgccaccgcttcctgcctgtcatttgaataaacagtgtttctattgagctcttgccaaagcctctctctccaactctccagctctttgaggggtggctttcaaagcagtgtttggagctccaaggactcccctgactccctcttctgatccatcagaggcaaagattcatagactagaggcagcttctacatcagactgcctggggcacatccctgctctacttcccagccgggtgaccctgtgccagttcctgctgcctttcagctggctttcttacctgtaacatggagatagtgatacctgcctcatcagctgctgtgaggaccaaggcagcgtgtgcaagctccttggcccaacgcctggtacgtcgcaaatgttacccggtattattacacccactcactcacccacagcacagctgccccatccgcccatgcctgctggtcttctctggcaccctggagaaaggccacaag

SEQ ID NO: 10598 - DNA, 1152 bp, Homo sapiens
gctgtgccctgtgtccccagacccagcactgcccctgagcacctatctgctctctgtgtcaggtgagaatgtccgagaattcttcttccgtgtggcagcactgacctttgaggccaatgtgctggctgagctggagaaatcgggggctcgacgcattggggatgttgtccgtgagtgcttgcctggttgagggtggcagagggcacagtgagcctccaatccctgcttcacatattttccacccttctttaggcatcaacagtgatgacagcaacctctacctaactgccagcaagaagaagcccacatgttgcccatgagggctgaggagactgttcagagactgcccagccctagggcactgtgccaccctcattcctccagagcttgacccctggacatttgcactgactttatccagaccaaagagctgcctcttggtggcagtattcccacagaggggtagctgggatcatgctagtcacttcctgcccccaggcaccgtgccaaagactggatgccccctactcctcaggggactgtccagggcgcccagtggtagtgagggagagtgtctctgttcttttgctcagcctgctgggccctttgtgtttgaggatgcttaatgattccagcctctcactgtgccttatgcattaaaatttctttgttacgagcactttggggctggagttctttgttggggatgatggatgtggaatgggcatgactgtgtggccattttggcactagagtcccctggggatgctgtgctggccatccctggcccctgggcaggttcaggtaggctgggagctgaaacatcagtttgggggctgcactgggccctcactgggtgaagtctgaatggctggctttgagagccctttcccctgatcctttccccacacgtgtcctcctacttggtgcttatacccaaattttcaccactggagaatctttttctttttttcacccttttcttgccttccctttaagaagtacttttccaggcagggtgcggtggctcgtgcctgtaatctcagcactttgggaggccaaggcaggcagatcacttggattcaggagttcgagaccagcctggccaacatggtgaaacccgcgtcaccattaaaatccaaaaattaggcc

SEQ ID NO: 10599 - DNA, 1746 bp, Homo sapiens
ttcctgcctcctggcatggcaatcctcttccctgagactggcagttgctcaagataggaagctcccgggaccagacccgagcgccagccggctacgccgtccgctggcctgagcaaataaacgcgtgtcttcaaaaaactacaatccccatggtggcacgcgcctgtagtcccagctactctggtggctgaggcaggagaatggcgtaaacccgggaggcggagcttacagtgagccgagatcgcgccactgcactccagcctgggcgacagagcgctcaaaaaaaaaacaaaaaacaaaaaacaaaaaactacaacccccatgaagctttagtgcctttgaggggaggagtggcgcatgtttgttcacgcacgaaaaagaaattaaacctaactaccgttcccagagggcgccgctctgcaaattacccaatcagctctaagtacaaagcatcgcgagtctttagtgctctttggcgctataagcccgtgggaacgagcattggagacccttttcacaagatggcgccgaaagcgaagaaggaaggtgtgtgttggtgatggggccgcagctggtttaccggggattgccgcgccgcagagcgaacgaattgggaacacggctgctgggctaagccctgagggctctgctccggggctgctccctgcgtttcggacacgctgcagtatacgtgggccgcgtgggcccagcctcgtgggctgagttccggtagagggagttgggggggggcaacgcggcaggcatcatccgccagggagggccagacattcggttctgggaagctacatgcatccactggttggagctccatgtccccgggcctgtaaggaattagtgccctcagctttaaccattttccttctggttcatgttcaaccgggctacattacccgcccctctctccgcagcgtggttttgcgatggggtatgtgtaaaattcgtaggacattttctggaaagtatcaagcgttcattcagtgctactttgtttcatagtcgtatccctggagttacttagagttggtcgctttcgcctctggtatcgtgcatatgatggaaaagttttaatctcctgacacttgtgatgtcttcaaaggaaccactgatgcacctgtggccagggtggcccactgcagttcttggggccggaagtgaccgatttctaaatcccgcacccacgttttctttccttttctcccagctcctgcccctcctaaagctgaagccaaagcgaaggctttaaaggccaagaaggcagtgttgaaaggtgtccacagccacaaaaagaagaagatccgcacgtcacccaccttccggcggccgaagacactgcgactccggagacagcccaaatatcctcggaagagcgctcccaggagaaacaagtcagtactgccccctgtacccatgaaaagatttgggtattctccattggtaatttggaaattcactcactctgcgtgatggtttctcaaacgcaaattgtgtccagtgtgcttctctaattggaagtatgaggagattgtttctgctgcatttacaaaactggcaggatcagcccagaggccgggcgcggtggctcacgtctgtaatcccagcactttgggaggccgagggggggcggatcacttgaggtcaggggttcgagaccagcctgagtgacatggagaaaccccgcgtctattaaaaatagaaaattcgccgggcatggtggcgcatgtctgt

SEQ ID NO: 10600 - DNA, 1746 bp, Homo sapiens; identical to SEQ ID NO: 10599

SEQ ID NO: 10601 - DNA, 1228 bp, Homo sapiens
ttcatccctggactcaagaggggcaaagagcccaagagaggctattacaggctccaaggtagagccagcccagttgggtctaggggtgggaactgggcactgcagtcagctctgaccctggccagttcccccatccctacccccagatctacccagacccggagctggaagtacaagtattgggcctgcctatccgctgcatccacagtgaggagggctgccgctggagtgggccactacgtcatctacaggtgaggctctgatgtgagggctggcaccacctctcccttggcaggcactaattgcagccttcccaccagggccacctgaatacctgcagcttcaatgtcattccctgccctaatcgctgccccatgaagctgagccgccgtgatctacctgcacacttgcagcatgactgccccaagcggcgcctcaagtgcgagttttgtggctgtgacttcagtggggaggcctatgaggtgggtggggtctggctgaatgtggaggagggggtacctgatggcctaggcatctcttaactcagcacctctgacatttccagagccatgagggtatgtgcccccaggagagtgtctactgtgagaataagtgtggtgcccgcatgatgcggcggctgctggcccagcatgccacctctgagtgccccaagcgcactcagccctgcacctactgcactaaggagttcgtctttgacaccatccaggtgaggccttccctgaactgtgggttgcagggtaggtgacaggtagtcaggatattgactcctgcctctctacttctgtggccccagagccaccagtaccagtgcccaaggctgcctgttgcctgccccaaccaatgtggtgtgggcactgtggctcgggaggacctgccaggccatctgaaggacagctgtaacaccgccctggtgctctgcccattcaaagactccggctgcaagcacagggtgagatgccccttttcctgtcagcccccttttgcccttgaagccctagacagaggctcagcttctgatgtacttaggccttggtggtccctgctgtgctgctctgaaaccctcagtccttccctctgctgccagctccagcctcttcctaacaccctctgtcttcctcacgtagagctgggtgcctgctaccctgtacccactcctctcctctccctggacctccccctactgataactctcctcccttcccccatg

SEQ ID NO: 10602 - DNA, 1840 bp, Homo sapiens
tgcctgcctctgtgcatgccctcacaggcgtggacctgtctaaggtatgtgcctgcctagctgcggtggggttgcccaggtagcccgtcggactggcccaggcaaagtggtcctgggctctggagccaaggtctcatggcatctcccatccttgcagatacccctgatcaagaaggccactggtgtgcaggtgtgaggctcctgcaggcccactctcttcagcagccacccggccctccctccagcacccgttttaatcccacagaacaacgggaacgttactgactctggtgccttatctcgaagggaccagaagtgctgcgtgttcaggccatctctggctgtcttcctgtctctcctgtctgtccacctcctcctcttcctctcctttaccccactttcactgccactttcatcaggtttgtgtctcatctccctgcgtgtcttttcctttgtctgtctttttctttcccccatgcacatcatgtagattaagctgaagatgtttattacaatcactctctgtggggggtggccctgctgctcctcagaatcctggtgccttgaagttctctgtgcatctgtccatcctccctatggccctggccagagctcagcatgggcaggggttctgggtaggacggtcactgtcctctctcctggactggtcttcccagccctaaaccctgccccaggaagcccacagcctcacctgctgctgcccctctaggtctgggcagccatgacctgcagggcccagagacactgtccttcccctcatccacccaaggccccagccagcgctcataccctgtcctttctccctgaccccaagggcacagaggcaaggcctcctgtctacagcagcttcctcagtttcctactgccttaggaggcccctgcttgtgctcagggaaggcctcttcatgggcatgttcctgctggggcggtgcggtttggtcccaactctgctaagttttctgagatgagggtctagccctgttggggacagaaaagtgtgtagaccttcttcctgctagggctgcactgtcctgggtgttgggcccttctggtggacaaggctgtgccaaccctgtacagaatcgagtgctgtagcctggccagaccccagagcccttgtgccatctttcttcctggccagagtgatggggttccagccatggggaagcaacccaatcctctgtctccttgctccaatggaggcagaagagcccaggacccaagcgtcttggcaggggtgctgtgaatgtccagtggtcccagctccccaccctggccctgccccagcctgtgtagctcttcctgcatgtggatgctgcatgtctggtctggggcttggatgttgcactgccccactgcctgtcccttctggtaaaataaagaactcttaatgcccacccctgcattgtgtcttctgtgaggagagagactgcgaaccgagaaccaaccaggtcccctacctctcttcagcttcaaggcagcttttagcctgttcttccgcattctagccactggggagcaacagcacactggccttgcccccagttgcgccttggacatgactgattggctaagatgcttaggccaaaccccagccctggaacacctggctccatcacaggcagaaggtggaggggactagcagggtgcagttgcacatgcctgtagtcccagctactcaggaggctgaggtgagagaattgcttgagcccaggagtttgagtccagcctgggcaacataggaagactccatctcttaaaaaaaaaaaagaagaaaaggtggaggaaactgccaggttcactgcacctctgtaccggt

SEQ ID NO: 10603 - DNA, 1196 bp, Homo sapiens
tgctgagggcctaggtgagggcttcctgccccgatccacctcttggcttcacagggcagtgaggttcagccatgctgtaggcctcggcgaggggttggctgagtaactcaagaaggagaggcaccctcggttgcatcccccaaccctctcctgccctgtccaggctctttccttctctgtctgtgtccctattgctcattctgcttctcatactctctgcccctcagcctgagggtctcccacgtgtaggaagcctgcaagggaggaattagctggtgaggggacagtaggctggaggggtggggagacaagccccgaatgcccaggagaggccgtggcagggcctggggctgtcagtgcaggagaagtttcatagtgagagaagcccttgtgctgctgtctccccactagaggcttcagacagattccagccccccagggcctccaggtctgaaaaaaggaagggaggaggcacagccaccatcctgcctacctctgggtctggggcctttgtctgcctcgctccagcctagctgaagcgcctttgtcgtcactgacaggtgaagatcatgacggagaaggaactcctggccgtggcttgtgagcagtttctgggtaagaatgtgcaggacatcaaaaacgtcgtcctgcagaccctggagggacatctgcgctccatcctcggtgaggccctgttcagcctttgaggagcctcacggggcccctaagccaaggcagggaggtgtgcagggctgggcagggggcctgtttcacaggagtttcaagctaaaacacttttcctcaaatatttaatttcaaaacttcaggtgacttgagttaaggagagggtatgagtgaaggggtgggatgggggctgtcggtctgctcaggaacctagtgctgcttgggacacttttcctcattcagcctggactgtgcagcaggaagctcggtgttaagtgctgttgagaagataccccaggaagacccagctcagagtgcagcaccccgcatgcacccctacctctacatgcatgcctcctcccttccccagctggctgggtccctggggagccagcccttgatccctctgcccccagggaccctgacagtggagcagatttatcaggaccgggaccagtttgccaagctggtgcgggaggtggcagcccctgatgttggccgcatgggcattg

SEQ ID NO: 10604 - DNA, 1232 bp, Homo sapiens
tgttgtttttttgttttgttgtgttctgttttgttttgtttgagatagagtctctctctgtcacccaggctggagtgcagtggcgccatcttggctcactgcaacctccggcctcctaggttcaagcaattctcctgcctcagcctcccgagtagctgggattacaggtgcccaccaccacgcccagctaattttttgtatttttagtagagacagggtttcaccatgttggtcaggctagtctcagtctcagtctcctgacctcaggcaatccgcccacctcggcctcccaaagtgcagggattataggcgtgagccatcgcaccagccccatccatctttctaatcataaatgtaactgaatcactggaggaagataggggagaatgttaggatcaaggaggggagaatgttaggatcaaggaggggaggctgttccacaggtcaaagttagtttgaattttccttttcttgccacagaaatggccaacatctcttttttgcaggagttgccgtgtggctcctctcatccagtgtgactattgccctctcctgtttcacatggattgcctcgagccgccgctcactgccatgcccctgggcagatggatgtgtccgaatcacatcgaacatgtggtggtaagcacagcagtgtccattcagtcctcaatgggcatagctggagcgtggactgattagcagaaagcatattaaggtcagcttggtgccaagttcaccacattgtcataggtactggtttctgcaggccaccctactcaattctgatcattttgacatatttcagctatgctttttctcacaatgttttgtttcagctgcccatacagacttaactcactagtgcttggttgtttgtaagtgacttatagggaattaagcagttgatgttatagccctaaaaggggagtatattagatccaaccttaaggaaataaatcgttggctgtctggggtacatgtgtcccaggcaccaaatgaagtttagtaaataagctgttgaatgaataatagtgtgaaggtcctattgctttctcttccaagagtcttgggtttattttccagactgaggctagaaaagagctgtcacttgctatctccaaaagaagtttaggacatctctttataggcagttagaacagtcactcacaagattgaatgggagaggatttgaggaggaggagctccctcataagagcagccttccaaattaa

SEQ ID NO: 10605 - DNA, 1181 bp, Homo sapiens
ttgtgtcaactttaacagaccagtgttccaagtgaccaggtagatgagtctgtgatatgtgaaggccttttacagttttgattagtggtctaccaggactttgtagcacccatctctttgtttcatggtacttttcatgatgggcccacctgttcatttgcacagaaacgagagcagaaaaaggagctgggtcatgtcaatggactggtggacaaatctggcaaacggactacatcccccagcagtgacactgacttgttggacagatcggccagcaaaactgaactaaaggccattgcccatgcccggatcctggaaaggagagccagcaggcctggcacacccacatccagcgccagcacagagactcccacctctgagcagaatgatgtcgacgaagacatcattgacgtggatgaggaaccagtagcagcggagccagactatgtgcagccccagctgaggcggccctttgagctgctgattgctgccgccatggagcggaaccccacccaatttcagttgcccaatgaactgacttgtaccactgcactaccaggtcagccaaaccatcatcatatcccttcccaaccccagtttccccaaaggaccagcacaagagcagtgctgcctgtggagtcactgttcatgtagctactgtcttgggttcctgttcctagttctgcttggagagatctttgaaggtcttagccattacagagcttactcagttttccattttctcagtttctgaacttctttccttcccctcccccagaattatctttttccttttttttttttttttttttttgtgagtctcactttgtcactcaggctagagtgcagtggcacgatctcggctcattgcaacctccgcctcccaggttcaggcgattctcgtgcttcagccttccaagtagctgggactacaggcgcatgctaccatgcctggctaatttttgtattttcagtagagacaggattttaccatgttgttcaggctggtcttgaactcctgacctcaggtgatctgcccacctcggcctcccgaagtgctgggattacaggtgcgagtcaccacgcccggccccagaattatcttttaaaaaaaaaaagtattatacattcacatggttcaaaaatcaaaaaatattaagggctacaatgaaaatttccct

SEQ ID NO: 10606 - DNA, 1223 bp, Homo sapiens
ccagcaggagaattcaggtttggtcctttttttttttttttttttttaatctcaggtcaaccaatcgagtggcggggtgaagtcgtccaaagtctttgaggtctaagagtcccagattcaagtttacatactggctgtgtggccttggggaagatcctttcatctctttggactggcttcctcgtaatatttcatagggttattgtgaagagtaagatagcctatctcacatgcctaggccgtgtcttacacataggagtactcagtgaccaaatcttgccctctgcatctctcactgccaccttgggaaaagctaagaaggtggttcttgccgcagaacgctgactcctcctattttggtttggggatagaactttaaaagggctagtaaacaaaggtcccttttcagcttaagtcagaattataggcagcagggaacatggaactcctgcttgcccaagttggaactctaggatctggaggcagggctgcagctccagggaccacgccgagtgtggggcatcagtaggagaggagccacactgggctgtgttttctccaatggtgttgaaacgagagtgcacttgaactgacggaggcagtggaggcaggaggagtacgggaaaggtggccccaaggctttgggagaaagaaaagagaaggtgaatggagctgtgagatgaggtcccctcttccctgttcagtgctgtgatcctgctccatcagggggaagaggcctcttcacatctgggatagctggaggcctccagagccagaggcctgatgaagactctgagttatgttattgtaccaagaaaggggcttttccccttgggccatcctaaaacaggtcttcccagcctctccttcctgagcctccatttcttgttagtagatgatggcatggtcaaagctgaaaattctcacaggcctcagggagccatcattaggggaaagggttcagatctgggagtatttgacagggaaagcgcctcctcctcagaaggaatctttttaggaatcactcgcctaagagagcccctaccctagacaagttgtactcaccagacctccagtctccaagccaatgtggttcacggactgcctgcttcagagccttctggggaaggactgaaaatgcagaattactgggttgtacccaaaagccagcgattcaaggtttctaagaggaagggcccaggaacctgcatcagattcttatg

SEQ ID NO: 10607 - DNA, 1188 bp, Homo sapiens
gagatcgcgccactgcactccagcctgggcgacagcgacactccgtctcaaaaaaaaaaaaaaaaaaaaagaatttattttctgcccaccccaaccccaggctggctgataatattttgatccccattttacatacaggaagggttaagtgggttgcctaaggtcacaaagctatcaagggacagaagaggccattggtctggtggacacaggacaggcccacaggacttgtctccttttctcttgggcctagtcccttcccgcacctctacccctcaggttcccttccgctcagagagttttgtggtttagactcataggatgttaaacacaaacggcccaatcctgcagcctggctcttttattttagggatatagaggctgggggaccagtccgaggtagaaccaggattacaagcagatgcggggttcttccctcacattcagcccctctctccaggtcattttttgctcagcatcccactgcctggcaggagattcattaggcttagagagatgctctctgcttggaatctgatgattgtttagtctctcctaattcagaactccagcaaagccatttacctctgagcacaggatctagcttttggggcttctgggttcagagtccctgcgggaagccctgctgacctgagaggactctacatgcagtgtcaataccgacaggcccaccaggctgtacccagaacactccctcagtcttggtgtagtaataatgataatagcacctttcatctttcagagtgcattcacattcattaccttattcatcctcagaagacccctgggggttaggtgttattctccccacattttacagaaaagcaagggaagcttcggggttgcttgcccaggtagccaatgaacggtggagccagagctcgaccccaggcctcctcacccagagctctgccacaccctccctctgcctggctgatgggcctgcctgctgtgtctttcttccccacctacctatccagagcctggctagccgtctcaaggaaaacatggagaagctgactgaggagcgggatcagcgcattgcagccgagaaccgggagaaggaacagaacaagcggctacagaggcagctccgggacaccaaggaggagatgggcgagcttgccaggaaggaggccgaggcgagccgcaagaagcacgaactgg

SEQ ID NO: 10608 - DNA, 1113 bp, Homo sapiens
gtcggggctggatgcccagggagtgggcagtcccagggaaaatgagagtctaagccaggagaccttcgcagacttgaggggtccttccctggggcctgaagggggcagagtgcacgcaggccagggcctggactgatagtgccaggatgatgggtcatttgttctgggcagaccttttctgccttctcattagcctcaaaggagctgccaggaagcagctgtcattcagctcagaggcccagggtctgcctgtactgcacacagccctttccctcatctccctggtccagagcgggacaggcagctccttgagcatcactagtcctgggacccaccccagcaggcaggctcagcccattatcatcttctctacaatgcccctgccattggaggcagctggagcccacaggcacactgggcctgaggccctctgatctgtctttgcctctctccagctggaggagcagctgagccgccttcagcgtgagaagaatgagatccagaaccggctggaggaagatcaggaagacatgaacgaattgatgaagaagcacaaggctgccgtggctcaggtacccctgccaggagtgcccgtcacactctgcaccgtcaccatccttgtggtcctcctcatgggtcccccgcacaaccgcttgttttgggaggtgatggagtgggaacctcggtcccctggtgttccagctgggctgggctggttgaatgcttatgggggatcctgcttctgatgctctcattcctttcccaggcttcccgggacctggctcagataaatgatctccaagctcagctagaagaagccaacaaagagaagcaggagctgcaggagaaggtgaggaccaggggctccctcaggagagagagagtgccagggtcactaggtgtgggaggaacccccaagttcacagtttagaaggcgcttttctctgccatcagtaatccacagagcagcgtaaatgaggagcaagagctaggcttggagccatgtcaccataacagacatttgggcttcccctgcctcatttcccatctgtattccctctccgatccttagctttctcctttctctctgaagggcaatctctgtgccaagca

SEQ ID NO: 10609 - DNA, 1214 bp, Homo sapiens
tactactttgctgttgttagctttaccatctttggaaacttggctcaaagttacatagttctgggctagctcatcagtggaactaggagagaggaaaactggcacctattttaataaagttcaatttaaacgagagcttgacttgtatctattaaagagcttttcttgaaacagggcagttttatcagctttacaaatcattggatgctcttccttagtaatattttggtttatttgatcaaatagaaatggaaagtaattcaaactgaaagacccttttttgtcatatggaacttggtgacgattttttgtcttaaagctggtttaaaggtaggataggcttttacctttattgctttagcataaatttggtttactgaattgactggcttgagattagaattattcagttgtttgtaagatcaaagcactggttgttttaaagataacgtgtatcttttaaaaaattgcccaagctgattagaacaagtttaggagttgggtacatttggttcaagtgctgcaatctgtatgtactaaatagctttactttgtgtatgtgtacttataatgtgtagatgtactactacccaggttttgtcaaatcatcttttttaaagtttttttttttttaattggttcaggacctttgtaggagaggctaatatgtttaagtagaagatattactgatagcattttccccatgctcctacataaaaaataaatatttccattttatagctttttcaatatacagaagagggttacttcttcatcaagtatattgttgcctttgaggacacagcaaaacccttctatatgtatcttcattgatagtggcagttaaaaactaagttatccagttaagacttaaaaggtgacccatattaattgcatggccttaaaaggcagaaatgcaggagtgtagcaagcatcattttagatggctatggttcctcttccgcatctgtcagtagttcacttatgttcagtcttagaacctactggaggagtgaagtaatttctctgtctcgtgcagaggcactaaggagctgagttacctcttaatctgggggaatggataataagtggagtacagttatgttaaaggatgttccccccgctcaaaaaaaagtttcaatgtttgttttgcccagtcaaaaatataggtcttttctacatataagaacagtcaccagaaattttccctttt

SEQ ID NO: 10610 - DNA, 1083 bp, Homo sapiens
tttgatacctttcctgtagcacagccactaacaagagtgaatgaattataaaattctttttgggagggaatcaatacaagtaactaattcttagctgatattgtcctatgaaggacaataacttaggaatataagaattctgttaatagtacactttttggccttaaatgtcttctactactgaaaatagtttaaatcttagctttgtttctattattccctctctctgcctcagaaagaggaattgggaagaatggcttaaaggacgtggtgtcattgatttgttgctgatcttttagaaaacatttgtctatgtaagctggggacttattttttgtttgtatatagaggggaaatagtgctgccctgaaccaatcagatttagtttaaatcaaatcaatcaaaactccagctgtttctcttgtctttttacttagcaaaggaaaactttagtgaatgctacttgacaagaagaaaagtcatttctcaagcacatacccaaacttgaaggtgattgaacccaaaataatgggtgggaaacaccaaatgaggtggaggaatgagaaagatgtgtgggccaaagctatctggttatattttgatgttgccaatatcgcaaagccaaaattttaatttgcttatttaatatatttgttggccagagatctatttttatatcaatgtgccttgcatgtatattaaaaaaaaaaaattggaaacgccatgtagtaatgcctgagatagtcgatggttcttaccacctcactaatttttatgcagtatgaaatgctcattctattgcccaactggtgctctctgtttaaagttacagatcttgcgaaactggaactattttataagctggggaagtgatttactttttttgttgtatcttttttgttcttagtctgttagtggctgtcctgtagtgggaaatagtaaaaggattcttcactcccttctcccctcagcaccttcttcaagtaaacatttcttgtgtgctttgaaaaaagtttcagcttgctgtctcttttagtgttttaaagaagtgttatacaaagcattgtttgcaaaatataggga

SEQ ID NO: 10611 - DNA, 2002 bp, Homo sapiens
aaacatctttagaaagctattgcttttctaatttccttccatatccctcaggcctcagtgttcagagaagccaaaaagaatgtatcacttctctgtctgtccaaaggtttttgagagtctcacttctaaatgaaacaatgcaacatttcactttgatttctccactgaaatttccttgattatatggttagaggtatgtagttaggaatgtctgttaactttctgagaaccctagtgccccatcatattaactgtcagtattttgggggcattaggttaatagacttaattgcctaggtacaagcaggactttgggacaaatctctttgtgctgtttggtaacacttaactctatttgttgcaatctttctccttaggtcctcacacaattccttacagagcacttattaaaaaaaaatcttaagagttgatctgttttctgattattttgtgtaagcttctaaacaaacttcagctgtgattaatttagcacatttaaataacgtgttattgtttggtataaagaattttccttcaactcagagtattagtactgtagcataaaccaaatacagtctagaggggatttttaacatccctccattataaagactgaaaaaggggtgtgtgtgtgtgtgtgtgtttatgtatgtatgtatgtgtgtgtgaggaaaagatggagatattaaaaattagtaaatgaatgtgtataagacattagtattcagagaatgaacttgtatttattttgtgccatttgttttcattacacagaaaaaagtcaggtggtttaaatccttaaaagggtagtattgaaaaatggcactaagaatgaaattatgacctatttttttaatagctatgaagatactaattatgggtgaagatttctttttaaatctgttttgattattgtaggcttctgtgtcacataccactcttgtaggtgtcctcaataatccccttttcccacaaaatacacagggtgtattatctttctctttattcacccccactttgctgaactgaagttaattacatagcctttcttctaacctccttagtaatgaaccttcacataaagtgtatttacagcgtctgtggtagccagcccttcctcctctactttctaggaggggatagccaataactaggaatttaatgacagatttttttttctttgaaataaatggccagagtttctccattttagaattttgttgtcctccttaatcatctgcttacctagtcattactcaatctgcagaaacttcataaaggaaaagtgctgcattgtttttacaaataacagtttgtagggaaaatatgacaaacctcaactatgggagttgtccacaatacaaaattttgaaaaaacattacatagtgataatatcatacttggttgttaggcttgttgcttccccacatcagaggcatctaatgatttatcttttgtaattgctgtgaacttttttaaataagccatttagtgtgaaattgtcatgtatcaaatggctattggaaatggactttactcaattttaattccactgtaaataaggacggagtcattcctacaaggctctcttcagagaaatagattaaaagtccaatttccaggtattattagtatagttatgccgctgggccacatcctcaacaacagctgatccctcttgtataaatatgttaactgtgcagaacagttatgttatgggacaaatataatggtcattatggtcagattggttgatgccacaccagtcaaggtagagtctgatagggcagtatcttaataaccctacccatgacttaactgttggatttgaaaggaaaacgtaggatttgctcttgtccccttacccgccacaaaattttgataatttgtttaaaagggagaggcagaggaaaagactagaagcataaatagctgctttaggtttgccagaggcacatagcttaacattagttcttaatatcgatgttatttttactaatg

SEQ ID NO: 10612 - DNA, 1365 bp, Homo sapiens
gaatacagacttaacaagtgtggttctaaagttcctgctgtcatcaacttgggcaacaaatgacccactggaaaggcaaatccacttaaaagatctctgtatcttgttctgtgactgaagtgatacactaatcacggggaacccagaatgattcaacattttccccccactcctcccttgatctttttggttttactttaattaagccctgcgagaatgctggataaatgccttgaagttagcagggtgtatttttttagcgaatatgatttgcatgtcttgccaggagttaagcggcctctggggtgttggggaaatactttatttctttccatttattttttgtggggcggggataggggagggcattgaagttctacaattctggaatagttagttgatggtacatagttaacttggcttcggttacatattggactttaacaactgaagaatctatgcgtgtcatttaaagaaaagttgcagaacaagcaattggcttagatatacaatctggaaaaatattcctgtgcccatattttaatgtaattgtataactgggagcaaaaatatattctgcttttcaactgtaggtgctccagacttgctctccgtcactaacactaaatgtgctgttttccttgtttttcatcaaacatttaagacaaacttagacctttctgtaaattatcttttaatttctcagcaaaatctaaaaggggaagaaaaaagtccatgaaaactaaaacttttcatgtttttagccagtgagaagataataaaccctgactgtagaaggtgtgttttcatgcaaactatacttctgagcttgttagcttctaattatatcttaataaatatattttattactagagcaagatgggtttttaaggaaaataatgtgaaattctggaaattttctttggggcagagaagagcattagccctgtcttatcattacattgccatcctgttgcactgcagcttgtgtatagcatgctaaaataaatttttgtgtgtgtgtgcagaaattaagggtccaattgagattgggtgatgttagtaacataataacaagttgtctggcctgacacagcatcacatcacacacacagaaattagtatatccatgtatgtcaaatacaggttaaaatatcagggcatttatataaagagttgtagtcttctgataaaagtagactggatcccctggggtatttggggagaaagtaactactttggctctacccctagaaatgtccagttttgagtgactgtagtatggatgggttttcttgttttgttgattatttgaggcttttaaaacaagtagttcatgaaagaagctgttggactcaacatag

SEQ ID NO: 10613 - DNA, 1554 bp, Homo sapiens
aaggagcagataatgatggtagtggatctgagagcggatatacaactcctaaaaaaaggaaagctaggcgcaatagtgccaagggttgtgaaaaccttaatatagtgcaggacaaaataatgcaacaagagaccagtgtcccaaccttaaaacagggacttgaaactttcaagcctgactatagtgaacaaaagggaaatcgagtagatggttcgaagcccatttggaagtatgaaactgggcctggaggaacaagtcgaggaaaacctgctgtgggtgatatgcttcggaaaagctcagatagtaaacctggtgtgagcagcaaaaagtttgatgatcggcccaaaggaaagcatgcttcagctgttgcctccaaagaggactcgtggaccctatttaaaccacccccagtttttccagtggacaatagcagtgctaaaatagttcctaaaataagttatgcaagcaaagttaaggaaaacctcaacaaaactatacagaactcttctgtgtcaccaacttcatcttcatcatcttcatcatctaccggggaaactcagacccaatcatcaagtcgcttatcccaggtccctatgtcagcgctgaaatctgttacttctgccaacttttctaatgggcctgttttagcagggactgatggaaatgtttatcctccagggggtcagccactgctaactactgctgctaatactctaacacccatctcttctgggacagattcagttctccaggacatgagtctaacttcagcagctgttgaacaaattaagactagcctttttatctatccttcaaatatgcaaactatgctgttgagcacagcacaagtggatctgccctctcagacagatcagcaaaacctgggggatatcttccagaatcagtggggtttatcatttataaatgagcccagtgctggccctgagactgttactgggaagtcatcagagcataaagtgatggaggtgacatttcaaggagaatatcctgctactttggtttcacagggtgctgaaataattccctcaggaactgagcatcctgtgtttcccaaggcttacgagctggagaaacggactagtcctcaagttctgggtagcattctaaaatctgggactactagtgagagtggagccttatccttggaacccagtcatataggtgacctgcagaaagcagacaccagtagtcaaggtgctttagtgtttctctcaaaggactacgagatagaaagtcaaaatcctctggcctctcctacgaacactttgttaggctctgccaaagaacagagataccagagaggcctagaaaggaatgatagctggggttcttttgacctgagggctgctattgtatatcacactaaaggtaactcatttgtttcctatacaaagatttttattggccaatttagtatattgtttatattaagagaattttaagagaattagttgttcatattaagagtattttaagagaatgacaatgtggataagcagctggtgtcaaactaattcagggtccttggaacta

SEQ ID NO: 10614 - DNA, 1945 bp, Homo sapiens
aacttaataattgagagtggcaattccgctggagctgtctgccaaaagaaactgcctacagacatcatcacagcagcctcctcacttgggtactacagtgtggaagctgagtgcatatggtatattttattcatttttgtaaagcgttctgttttgtgtttactaattgggatgtcatagtacttggctgccgggtttgtttgtttttggggaaattttgaaaagtggagttgatattaaaaataaatgtgtatgtgtgtacatatatatacacacacatacacatatattatgcatgtggtgaaaagaattggctagataggggatttttctgaacactgcaaaaatagaacgtagcaaaatggcttcagttatcacttttgggtgtctgtatcctaagaagtttctgaaaagatctaaagcctttttatcccatatcccaaattcttatgagccactcacagcaggcagcatatgttgaaataagttattactggtacacacctgcattgcctcaccagtgtatttatttgttattaaattgatctgacttctcagcctcatttggactaaaaaaagaaagcagaaatccatgaacacattgcttctcggccttttggctaagatcaagtgtagaaatccatgaacactaaaggacttcattgattttttcagagagtagaaaacaacttagtttttcttttttcctgaatgcgtcataggcttgtgagtgatttttgtccattcaattgtgccttctttgtattatgataagatgggggtacttaaggagatcacaagttgtgtgaggattgcattaacaaacctatgagccttcaatggggaagaccagaagggtgagaggggccctgaaagttcatatggtgggtatgtcccgcagcagagtgaggagatgaagcttacgtgtcctgacgttttgttgcttatactgtgatatctcatcctagctaagctctataatgcccaagaccccaaacagtacttttactttgtttgtacaaaaacaaagacatatagccaatacaaatcaaatgccggaggtgtttgatgccatatttgcaaattgccatctattgaaattctcgtcacactacatagacataattgttatctccttttggcttatgtgattttctgtttacaagtagaatagccaattatttaaatgtttagttgccacagtgaaccaggagtcactgagccaatgactttaccagctgctgactaatcttcatcaccactgtagattttgctgcatgtgcaggtcctctatttttaattgctgttttcgttgctgcagtactttacaaacttctagttcgttgagacttagtgaccatttggcatcaagttaacatcacacaataggaaacaccacttccacaagtctcaagcctcagtgctaaagtactactgaaaaggaactaggaagtttggccaattaaaaaaaaaaagtaaaataagttatagtggtcagggaatctcttgacgaaagctaactcttatttttcagggggcacatgttttgttttgttatgttttgttgtacaatgaaggatgaacccaatgctaaaaagtcagttattttcttggttttccatttcttgtatataaattgtgttggaggtgggtaggaagctgtgagtatgacttgaagaaaaatatccttttcagtgacaaatcagagtttcttacaagttattgtcctgctcccttccaagttgtcttgaagaatccttgctgctaactctggatcctgcttttcctatagtcagagggctccaaggtagaactctctaagtccctctcaatggcactctttgcctagaccaaactaatgaccaaacagtaatcaatctatcactgttgaagtcctggttttctcaaccaaattttaagtctttcccaggtatgtcagtcgagt

SEQ ID NO: 10615 - DNA, 3246 bp, Homo sapiens
gggaagcagatcacttttgcatacaaaaactctttcaaacccaaaatattattggtggtacattttaaagtccaattgtggacttaaattagtcaaattgagagttactgagtccattcagatctccagtagggttttgtatctaatgtatttggccaccagttttacatgtaggtcatgactatacctggattttatcattaagttaactttaaagtatatacagtttgcaaaaaatgattcaaattaattggtttgtatatgtttgtgagatctagcttctgaggaatctcatacatagtaggaaccatcatagagtaaagcttgtagcagaaaaattggaagggttttgagatatcctagagaaagagcaagcactttctgaatcagtggggaaatatcaatatttgatcaaattaacactacctccttcccagtgttggtgttcactcactatatgtctttaagaaaattaaaactatggaaaatttgtctagcatatcagaagttgtaaatgctatatctggtatccagaggctggctgtaaaaagttccttggggtcactctatctcacattttttttggttagcattttaaaaatgcaaagccacatactttgaaatatattattccaaattgagctcccttccctttgcacatattttttcctccccttattgaagtcagctctaaccccaaattctagtatccaaaagtatttttatttgtataatgctatctgaaaaatgtgtttatattatattttcagagctgcaattcttattcgccatttcaatacctagagatagagagtcttgtatttgaagccacacacactggtgtaatatgcttagtactctaggtcaaggatttgttggtaaatggaacattttagcatagtcatgatttttggttgcctagacatcaggtaaacattcagtacactaaagaaactatcctggacactccctcctgcttccaccaatttttttctcacccccttttcaaaaattgaaaactctatgagtgtctttttgagaccataaagcagactttagtaactttctatttctgtaagtactaaatgtctggcattttaaacttttgtagaatacattatgttggacactggaataatactatttattttcacctgtgaaaaatgacttcattgtacttgaaacacctcctttgcatttctccatttgtgccattcactagtggaaataaattgtattataccatgatctactggctttttaaaactgtattaaatatgcacatttttggtatagctattatcatttgtatgtatatattgtatatacatatgagtgtctgtatgtgtgtatagatggatggatgtaactcatactgtacatttccatcagggcacttaaaagttctgttatttttgtttggttttgttatttcagtcctcagttaaggcaagaatgcatgtgtttcttaagaatgagtactctgcgttgatgtttatgagaaggtggtcattagatgcagtcttttcctttttaatcccctcttagcacttctgtgagtggagaggacattaagtaaaatttggaatcataagttgcaatgcagtaaaatggtgctggggaaggagccagttagtgtttctgtgagtttgtgttgtgatgcaataagagataagtaatgcagagagaaatgaaccatggaaagtaagaacactgatggtgattcctctgcaaagatgataagaaaaagaaccaataaatcacacaatctttatgtgctttctatatgtatttcttagtagtgataccattgatcctcttactttttttactccattaatactaataattatatactttgctgaggatcaaaacagccaagaaaggaattactgctaaagcatctaagattctcctgaactgtaaaatcaacaggaaatggccactgggagagaaggatttggtattgggtgaggggctttctccctttacctgcctcttcttgcttgctaatagtaagttctttgtgcaccttccaccacttctgagccactactattcaagtagagatttgccccaacacattaactttttccttggagatttatatggtcctgcattttgtcctgtgctcacaatgtgaagtgtcttctgtattcaaatcaaaaaataatatatttaaggtatataagtgtgaatctcctataatgatggaagaagaggttctcttgtcttagatagaaaagagccttctccaagagcaatgtcaaaacttgggctgtcatctttgagctgtttaccaaaatacagaccattattgaagaaaaacaaattatctattttgttttcccccatctaacatgatagtgcccccaaccaggttgtagcattgccttttaaaagagactcactcactcttagtttttaagaactggaaatttcccatcctcagatcccttaaaggatgaagagttggctgtacacttagcggacttgcctcttgtatgcaaggactactgattgaagtctgttttgctgtgtctggttatgttgtctgcacttttatgaaatcactacaataggtctgcattggaaatgactattaatttgtaaagaagtaagttttattaaacactgtctagaaaaagaaagtgaagctgagaactcttcctttattgtgcatttatattttctgctgaattccggtagttccctttaaagtcatgttgactaatgttttcctccttgtttgtattcagatttccaaaatttcactcatacaagggaagagactccatttagcttaacggtagtctttagatcataagaaatatataaattagtatgcaccttatctgcctgttgtgggtttcttaaacttgcacttcctacccacccaaagatagatatcctttaaagaaaataaaggcagagaattaaaactggggagccatttactatgtcaccatcactgttaactgtttcccagcaatctaaactttttgaagtttcagaggtgtattttttttttgtatatatgtctgtgtgattgtattgttttgtttctaaatatacaaggaattctttaaatagagaaaaaggttaatcctcactgaaacaccaggatgcccactggatatactaatctgaacatctgtaggtagtttgtcatgaaaaagtggagagaagatgagacttttgaatgaatgaaaaagggtatcttgatacccagaattccccccaaag

SEQ ID NO: 10616 - DNA, 1224 bp, Homo sapiens
taattcaacctgcacagttttctttcactcaaagtgttcagcacttgtgagtgaaaaatcatgtaattatctgtaaatatgtagctaacaaattgacctagtttctgtatttttttgtttttgtactaaagtttataggtctgtgccagctagagagaagttgctgtcattaccagttgtggtcctagcatctaaccctgaaaccatcctaggtgacatttttagaattaatacttaaatgttaaacagggggaaatgaagcttaatcatggtcaggtttgagatcttttgcagtgaaataattttatttaatataaatgatcacatgtcctcaatcatgaatgaggtagggagcctctctcccccagtggccatgtttacaaaagtgtgttttgtctataaagtgcaagtgttttaatgtttatgtaaattatgcaggtgataacatggtttggaactgtttattgggctctttaactgaattttcaaatgaaatgaactatgcttattgctggcacattgatcccatttctggaacatttttcctatttccagagttacatatgttcttttgtcattacccaatttaacctccctttctctgatatgccttgtagccaaagtattaaaggctgatgaacatagacaagggaaatgcatttcttagaaatccgtgaaccctcagttgtatgctttcagtactcgtgttaatatgtttctatggcaactctgaggtcagtggtttagaaatgagataccagtgttaatgaaaagtgtgtgctctttgcttttgcatggcttggcttagtatccaaggtatattagggccacttgaaagcatgaagaccagttatatagggaacaggtttctctcagtggcacattttgctttttctgagccccaaatacattgcctgggcatgaacattgttaccgtaaattgcacatggtcatggactgaattatgtgactttaaaggatgtaactgcccaacatttgcagattctgggtggtctatgtgaccatttgtctcgtatccaaaaaccccggggctattggaacccttccaacactttttcctttgtcatagacaagtttatatataacttaccaagatgttggctgtcctggtgtattgccagacagctctcttttggttcccattccaaatgtgctgctgtccttctttgcatttcacaatatcaaagaaaccaccacccttct

SEQ ID NO: 10617 - DNA, 2367 bp, Homo sapiens
ccagcacagaggatgtcatcttgaagacagagcaggtcaccaagaacattcaggaactgttgcgggcagcccaggagttcaagcatgacaggtactgagtggagggggaggtgagggggatgcagttcctgttggcttctagggtgttgcagagagcatgaggggccctgggttctgctgtccctgggaacctcccttgagagccccctgctttatagcctcccttctccccgcagcttcgtgccctgctcagagaagatccatttggctgtgaccgagatggcctccctcttcccaaaggtacaggggccaaagagaggaccaggagtgggagggcctcgagctggggcaggcgtggagaatcccatctgatcgctacctgggtggagacacagacaaactgggccctgatctcagctggtggcttaaagtccaaggtccagcctcactcctgccccctccagaggccagccctggagccagtgcggagctcactgcggctgctcaacgccagcgcctaccggctgcagagtgagtgccggaagacagtgcccccagagcccggcgccccagtggacttccagctgctgactcagcaggtgatccagtgcgcctatgacatcgccaaggctgccaagcagctggtcaccatcaccacccgagagaagaagcagtgacctctctccccacaccctcacctgcaccctaggacctcactggccataggagctgggccactccagacattaatccccaccccaacagagccactggcacaagtgcccttagtgctgccacactccctggcagccaggtgccctggtgcccacccctgtcgagcccctaaggatggggaggtgggggggcaggagcttctgtcccccacattccatgcacctcccctctgtatatagcatctcccccctcctagtgagcaggggcctgcaaggcatcactcccagcccctcgccttctagggcaccctcagcaaaggggcaggtggggacactccaagtggggcagctctccgtacatgcgccccacccccatgagccagttcagccctactgggggctgagcgggggcatcccctcctttgtacatagtctccatggatgtccctgccctgtagccaccagccccttgctgctctccctttaatgccatatggcccctgcctagggcacaggccccaacctgtgtgctggggtccccagcagcaaacactggaaagtctgttttttttttttctttcttcttccccaccccttaattttaactttgtggtaactgagtgcccccgcgtgcctgcgtgttgagtgtgtgggcggcagtgccgttccggaggcctggtccatctggagttttgaggggtgaggggaccagagcagtgggaccagcatggggatcagcttcccttccccacctggagccagggactgtccgggtagccagttttggtcctgccagctgcctccctgatccctccccactctcgccccttctctatgaacttaaatcaaaaaccacttccctccatctcctcctgctcctgcgtggagggggaatgtgtgctggctagggtggaggactgagcacctgagcctggggctggctccccggggtccccgactcagctggtggctgtggagctgagtcccctccccgtaacctctgcaaggccagcacccaccatcactacctgcacctgctgtggtcccaccctctggaggcctgggaacctggctgcagcctgggaaggctggagaggcagacggtgggacccaccagctctctccccatcccgcttcttccctgggggccaggccctacctgtgtggtggtgggtgggctgtcaagacgtgtcatgtacatttgtatcaaaaataaagaagtgaccatgagctgtttctgatgcttagagaatgggggctggagggaggtggcagacatgaagggtgactgcaagtgccccaggacccccgccctagggaagcccctgtgctgggaacgtctgtctagtggaagagttagtttgcgaataacaaagctaacatgtatgacgataacgccaccctcccacgagcacattcctaaagccccatgtccagggacaggttggccagcgggggcgggctgcctcaaacaccacctccatggcctaggacgagggtccgggtgggagtctctgtgcggcagatgcacaagctcaactccagagtctactaaaaataatttaattagaaacggagttttggcaagggaggcagaagcggctccttttctccccttggccgcccactcagcaaccaacaaggaggaaagcccccgcagtgctcggccagtgccgcgccatcgccaccaggg

SEQ ID NO: 10618 - DNA, 1258 bp, Homo sapiens
tgcatgtctcagaggtatatggtgcctgccggggcagcaggcctgaaggtggggtagggcggggaggcatttggtgtgcagcatctggggtgccatctccccgggatccctgcatgttggggaggttgctggcatgggcctggccacctctcaggtctctcctctcctcccaattcccatctccctctgccctcagccttgacttatccgaattggccaaagctgctaagaagaagctgcaggcggtaagtctgctccaacagtgccctgacacttgaagctggcccctctctgatcccccaccctctgctcttgcttcctctgcctctgactcgatgaccttttccaagtctttgacctgtcccctcactggcctcagcagtcccctctccctgacctccctacaaggggatggactggtcccttctctcccaccttggagtttggaacatgatccctttccactttcccattctgagactgtaggggctgggcagcacaaggaaggccaccggttccccaaggctcacaacatgctggggagctggccttggcactgggagccgatgcatctgacaacatctgggcccctctcttcctccagctcagcaaccggctttttgaggaactcgccatggacgtgtatgacgaggtggatcgaagagaaaatgatgcaggtgagtcagggagcaggagtgtctggcgtggaggacccgagcggcccaggcatgggtctctggtcctttactgggctaagaaggggtgcctggggttggggctgctcagaggcctgcagatgagcccctgctggctgtgagcctgcctgggcagcatcccaggctgggtagagtgctgagggggaggcggctagcgtgctcctcccccagcctcagactggggctcctcttgctctggcagcctcccactttggctgtctccctggtaccgctccacccccctgcatcactccttcctggccacagccggattccagcccaaactctgggtttggatgagtggcactggccttgttccatttgtctgtccccagccggccacgcccagccttgccctggcccggcctagctctgcgtgcccaaagaccacccctgttctgaacaccagtgctcagtaggcgtgggggcagctaggaaggctgggctcagtgcttccccacccccaccttgggggcctggccaccgtggctgatctgctcctgtccgtcccctacagtgtggctggctacccaaaaccacag

SEQ ID NO: 10619 - DNA, 1216 bp, Homo sapiens
gcggggcggagggcgcccgagggcgagcgggcaggcgggcacggcgggttccgggccagccccggggcggacggttggccgggcgcgcggagcctcgccggggcctcgccggagccgggccgggcagcaggggccgccgccgccgcccgggcccgccgcccgcgccccccacgctggcccagagggctgcggccgcgtcgccgctgaggatgtcccgaaaggggccgcgagcggaggtgtgtgcggactgcagcgccccgggtaagcgcggcggggccgggggcgggaccgcacagccaggccgccgccgggcgggcgccggggcctggcaagagcgctgtgcggggccggagggctgggcggggcggggggctgcggcctccaggctgggcccccgcctcggccactgcggagctgcgcccttggcgggagggccggcctggggtgcccatgctccctggaggccgtggactagcgaggaaggacgttcccggcgccgcctcccgctcctcggtctgagggaggcgggcagctggctgctcctccacctccatctctgtatccgacggaagcgccagcctggggtggcaggagggccgtggcggaggccgtcagggcttgggaggtgggggcgagtgtggttttatgtcatctcagtgccacccccgcgtcttgcacctgctgctcgcgtggtcggtacgcctgccggggtggtggagggcaaggagcagagggccgggcagatgcgccagtggggcctgaataccgtctcctcaggagcagatgagcggtggctactcccaggactccctgcctcgggttcctaaggctagcgctccttgccgggcctggcgttcagggccagtctagacccgggtgtcttctcgggaggcatccccaggcctgctggtggtgactgggaacagctcggctggaccctgctgttcctgttcaccggtaaggcctgcttgggaaagtgagcttggcatcaagctatcctgggtgcgggcccctccctgtcccctagcccagtctggccagaaatgggtgggaggccgtgccgagattccccgtatcctgctggcttcctggcctgtctcctggctgtatttacatggtggttcccttccttttcctaacagagttaggactgggctggagtgaaaccccccaggcctgctgaggaagtcaggggtaatgatccaagaggctgctc

SEQ ID NO: 10620 - DNA, 1132 bp, Homo sapiens
tagacatgtagtactatagtaccgtaatattcatctctcctcattttagttgcctttcagattctaaatgtttgggatcattcctatcatcttagtctcttcaggatctttagtattttcctggttctgaggaggcttgagacagggttatggatttccttgttctgtgtctttatccctactgatagttcctctttctcattttgcaaactacccagagctccaaggacagcctgaagatctcagtgcctcaggctctgaggtactctgctcacaggccccagacagatgctgttgggtaaactcaaagcttcctatgagaagcttctgagatgtagcaggtcacagaagtgttcacctgtttcatctgaggatttcagttctgaagtgatctaggcatgtttggtaaaaatgtttttgtgagagttctttttttaagaaagcattatgcaaaaagtcacttttaagggcatttaaaaatttttaagtaaagccattctttggcttttttggactatttgtggatactttgtttacattttgaatattaaaatgtgcatcatcttgtcggccatgcagtcctgcaggcatcagtgccctggctgtcctgtgagtcctcatgcagagcagggccatcatggtcagcccttgtgagtaagtgggtatacgctgaagctgacttccgtctgtgtcctgccctcccatccagcactctctatggaaatagttgtcatttcctcagtgatggtgtgtcttatagtgatggttgtaatggtgaatggctagtgtcattttgtttaattttgttttgctttttgatggtggataagatgaaattttagctgtttcagcatcaatccaacttaaaagcatcttggactttgttttcccttccaaactaaaagatcaaggcatgtattagacacaagcatatttgctgcctcaactcctctgacacccatattaggaaaaggcctgccaccaaagcaggaagctgcacactcctaacccttctcccagggtgtggggtcccttgacgtcatgaagagctattgcaaggtgcttctgtacttttccagcctggaaatggagggtgactggccctggctcctgctatgagaagataaccagc

SEQ ID NO: 10621 - DNA, 1771 bp, Homo sapiens
aaggcccagctctgaacctcaccatgtgacctgggcacatcacctagttactcaagacccggttttctaatttttctaaaaatagagccatgcctgtcctatctgcttcacagaattgctaataagatttagattaaatgaaattacagatgggaaagctgaaaaatatgtatgaatattagttttgtaaaaggtttatcctacaaaaagggtttctgctctttgtcccttgccctctggactcataagtcttctgttcttttctccaggttacctgtgcatgacagatgagtggttctctgagtatgtctacgaagtggtggtggacaggaagcatgtccctgaagaggtgctagctgtgttagagcaggaacccattatcctgccagcatgggaccccatgggagctttggctgagtgatactgccctccagctctttcctccttccatggaacctgacgtagctgcaaaggacagatccagggactgaagccaaagttatgcaagggactgtgtgttgccacaggacacagtcagatttccagtctccaccaggaacctcttcagaaagtgtgctttatgctgaaacagaatactgttaaaggaaaaaaaagaggggggaagatcaggtcatactatctactctcctcatctctaacagctcaggatctcttagcattttaattagatgtaattgtttgtctttaactgtcaaaaagtttggttctgtgtctgtgttttaataagacgagaggacgagcgattgaggtgtatggagagaaaacagacctaatgctccttgttcctagagtagagtggagggagggtggcctaagagttgagctctcggaactgcatgctgctggacagtatcactgtctttcctagatggcagtcactgaattccattttttcaaggtaatttcttgtgcctctaatagcccaagaatgggaggttgatcagatctgacatgattccttcctgttctgaactgtggggtgtgcacatctctgcttgagtcaggtttgagtagaggcttagagacagttgggtgagaacaaccaaaatcttatcatggtctcagtcataatcattagggggaactctagccaaatggtttaacttctgcctgtggaactggggattgggtgggcaggaaaaggtgatatccattctttctgataactagatggtgctgagaagcttttgaataaaaactttgctaaatgagaataagctgatttatgtgatctgtctgagaagtgtttgtttatctacaaaagaaagcagccaggtggctcatgttcttgaaagtgaaaaaacaggaaaagggcttccctcttcagcttctctgcaagatgtgtactctttcccagaccgccgattctcaccggcatctgcaaagggcttccaagcgcctgtttaagaaggactgttcccctaccgcataaatgttctacccagatccagggtccctacaagggtggggagtgaggctctgttgggcccagccttagaataggtcagtaagttatcttactgagattgggccaccctttcaagaacaagggtaaaatagaaaacattttcacaaaaaaaactgaatttgccccaacagaagggaagtgatcagtatggaagggttgaaatgtatcaaggaatgtagaataaagaacatgattgttatgttggtcagctacacaaaaagcaactgtagaagagtcttaacagggttggaaaaaaggtaaaacgaaaatccatgaaggtag

SEQ ID NO: 10622 - DNA, 1504 bp, Homo sapiens
gatcctaacagcttgcattatttggtgcatctgctcaatcaagtctaatagacacaaggatggctttcatcggctcaggcagcatcatgatgagtatgaagatgaaattcgcatgatgtctaccggctccaagaagtccctcctaagccatgagttccaggatgaaacagacactgaagaggaaacattatattctagcaaacattgaaaaacacattttgcatatctcccagcataagtaccaagcaaaattacagttcctcttgggagaacactgcattaagaagagagactctcttgcttcttcaaagagctttgggaaattaaattgctaaatttgtattctctgtgaatttcactggcagttttgaacttcccttccttaaagtactctaaacctttaaaaaaaaatctgatttatgcagcagagatgggacagccactttttctttttaatttaagatgagctatttggagcttatgtaataatggcataaagccaactagaggatgttgtattttgcacatcagatgtttactagtggctttagtatttttctttgttttaaatggccaaaagaatccagaaacattaaggcagggacagcagtcagaatcgacataaagctttaaaaactcaaggttttttcaacctactgaggagtacttttctctagttgttaaatagctggagtttttcttattcaggtttaatggaggttgaattgatttttaaacacatataacagtaggaaatgaataaatgggcttctgcatttggctttctacctgttccaaggctagatcggaactggtagactacgctgtaagcaggatttcactacctctcttaaggtttagcaaacttctaaatagcccattttaagggagaacttactaactttattgtgaaaggtctaaatgcccacttgaatgaagctgagagagagatctagcaaaagctaaaactcatgttgtctatctttgaacttggtaaaaacccacaggtgctgctgcttatatctgtgaagcactagcttattctaggaatgcctgattctttaatattgcctaaatcggaacctttttctatgttgcacacatggttttcagatgacccagccatctacaagatctgaattctactgaaaatatctagaaatgtggaagagacctacttgcacattcttaacctgtatttgaacacaaaatatctatacttcatgctccagcccaagcctataccctgtaatagcatactattattgaaatcgcttgaccggtcttgttcacataggcctctgggagtgatttggttctttgccctaatgtttcatttgacggtctctttttgatcaaccaatttttctaaaagttcagtcgaaagcttttaagtatagcttcctcccttgaaaaaaaatgtaaactatgactgctgagtgataaaacactgtggtgtgaaagtgtcatcttcactgccaatcaggcaaagaccggaaagatt

SEQ ID NO: 10623 - DNA, 1634 bp, Homo sapiens
tgtaaaatttttaaagaaatgaacatacacatagttattttagtaatatttcctgaaagaaaaaccaaattctgctataagtcttgatcttcaatgaacttttaaataatgcatttagctggaaaacaagactttcccagcttgtattacctagaagcgtgaatgtataggatacctgactactaagactatattctcagccctgccctgtcttttatttgcgggtctaatctaatattagaatatattaaccgcttaaggcattgaagccatatgggatggggaatgcatttcttcagtgtttctccgagagactttccatttccttggagttatggcggcaagtaagtatcatagtattaagaaatttgcctaaatctgagttgtgcctttctttactcacaaggcatgggctttgtcctggtgatcagtttgtaagccttcttccttcccagctccttaataaaagcaaagtgattgagtaggtaatgttcaaagtgtctgcctgtgtacatgtacttgtattgattatgtagttcagtaagatgtgcccaagtcatttcagaaagaaagacccttcagttttgatgcattttgctgaacacttgggtagtgagtgggatcctatccagttgaggaatgcttgcaatgctcattgaagggatttgctttgggactttgtcatcttccagaaaggaaacatattgtatatttggcccagtgtgattgattgctttatctttggtaacttttacttgaatgggatttgctgaattaatgactattgaatttaaaactaattatgagttgacaaataaataaaaggtagtgtttatgtctgagcttattgtgtttgagctaacaccaggttactcagtaaccatgacctgctcctccatttccatttattctcaacattaaatagttttatcttgttgttgccagaaatgcacttgtgccaggtattgtccctgctgtatgaaaagcttcttggcaatgaattctgtaatagtgccctacattatggttttctggtggaattgttttaacagtgacaacccaggatttccaatatatttttgttttattgttattaccaaaaattccactatgattgatgttcagtgattttctatagcaacttttttggtaactctttgggtttctgatttgttttagctaaaattttggggatatgatttgggtctttgattaatgtcagctgaacttggatttctagttcatgaagaaatctctcccaatacccatttatcctatttttagcaataattcgttaatgattccacttgattttcagaatattgtcctggttgattttgatttgacagcatacattatgaaatttgaaagtaggttaccattttgaggcagttggatataaattatgtaaatatgtatgattatgatttttataaatggcataacatgagtgtactaactaccttctatgctggccatgctacagattttctggaggtatgacaatagtatttttttatgctcagattaaaaatcagcttttcacctctccagtttttccaagtgatactcccagttctagagcaatctacagctgtttatgtgaggtgcccaacacccattcatctcaagtg

SEQ ID NO: 10624 - DNA, 1253 bp, Homo sapiens
atggagatcactgtaaaactgtctttttcttttaaattacaagtacactggggttaactgtattgctggaaaaacatcaagaatgacagtcttatatttaaggcaccagtcattgtttccattttttttttaattcttcccttggattaatattttctactgaaaagaaatgaaatctcagttccactatgataaaagaaacgaatcaccagtgtctgtcagtgcccccactgctcctcctcataccagcattgacactggtagctgaggaaggggactgctcaatttctaatgtgatctattcaagaagccacatataaaaaggcattgagggctcactgtccagagaattgcttttgtaaatgctccacaacgtatgggcaaaagtttaaggactactgcctgatgtaccaggaatcctgagttctgtgaaaatctgttcattccaaatctgttaagcatttccaaacatccagagaatggtttcactgttgagggtgcatgtggcagaatctgtctctctctgcacctgtcttctgttaccatccctggacagtgacagattttaagccagccaccagaattcttttcgagttaaccatttcttagtttctgtaaattcatgacttgtcttactgaactacagcctggtttgtagacttccaacatctacactgctgctcttcaccattggaattcactgtggtatttatagtattggcttcagtccgagccacaggcaataaaaggatatcagctgtagttctcagctacatcatggtgtatagatgctgttattcaggcgaacttgctcatgggtggactaacacctggtttggtacagagactgagaagtttttcattctggtgtcaaagttttgttacattatgggtgtgaagggcatttgatatatttttcttaactatggggtttatttttctaaatgtgggttgattgactgttaattgattcagggtacccttaaaagaaaagaagttttcccattgtgaaccttaaatgatcagagaagtaagttcattgattaaattctctgttgggagaacaaaacttttctcccttgacactttattatctttgatttttcaaagggccttgattggtggttgtgtctcggttaaaatttatgggactttgctatgtagttggcatttataaaatctgaagtatcataaataaagttatttatttaattatactaccagtcttttttactggtctgattcttttgtgc

SEQ ID NO: 10625 - DNA, 1154 bp, Homo sapiens
tgggaaatacagaacacatggttcaataaagaaaagaagggagcccaggcgcagtgtctcacgcctatagtcctagcactttgagaggctgagacgagaagattgcttgagctcaggagttaaagatctgagatatggtgaagcccagtctctacaaaaaatacaaaaaattagccggacatggtggtgtgcacctgaaatcccagctacttgtggggtggaaggaagaggatggcttgaacccggggtgtggaggctgcaataagccgagatcacgccactgcactacagcctgggtgacaaagtgagaccctttctcaaaaaaaaaagaagggagataatgatgtgatggcatattttctatggccttcccaagaataccccatattcagcatgtgggcctgtctgcttggtccaaaatggctccgttcaaaatttttaagcagtgatgctgagagaagtcattttctgttttttacctaacataaagcttttctccctaggtggatgatgactttacagcccaagattacaggctccagtttcgtaaatgtacttcaaatcattttgaggatgtatatgtaggttctgaaactgaattcatagtattgcacatagaccccaacgttgattaccagttcagagtctgcgcccgaggagatggccgacaggagtggagtccttggagtgtcccccagataggtcattccacattggtgcctcatggtatgctgctaaccttttctctcctgaagcctaactatatattagaatacctgtattctgtgctaagggcagcacactgacaaccagctattctaagcatagatcctgaattgataagaacaacatgcaccatgtcttttactcagattacctcatgtgatttttgttttcatcagttcttcagagtccaaaaaaaatgctggacaagatttttagcctcattgaaaaccaaagattgaaaatattatgtagggcactgatattcctttttattcttttttttatatttgaatgttatttagttagtttttttgagacaaggtctcactctgtcgcccaggctggtgtgtggtggtgcaatcatgcagcctgacctctagatccttctgcctcagtctcccaagtagctgggaccacctgcatgcaca

SEQ ID NO: 10626 - DNA, 1858 bp, Homo sapiens
aggagcttttagaggagtttggccctggcagaacccctgggtgctgtctgtaccccttgcggtgtgggggctaagcagcttctctttccctccaccgtgctctatgctgatcctttttctcgtgagaaaacgctggcctgttattattagctaaggtcacacccgctgggcagctcctgggatttttggattcctccccactccagagggaaggctatttctagtggcttcttttctttgagtcctcccttctgtctgcctctctcctgttcctcctctttaccagtagggcttcctcaatgctgacagccctgtgaaaaaaggggagacatgccgagctccggcaggaaactgctggcccaggacctggcttctggggcacaaaggagaatttctgtgtttggaaaagtacagactgagcaggtgacccccgcacagccccttgggggaaacacttgtgccctttgagtctgactgatataaacacagactctcttgactgtcccataaaggccaaagccagagaacctcagaaagggacttgcaaattgtgagtgaggcatatcagctggtgctttcttttctctgtgggctgccatttatgaatctcttggtttctctctgtctctgtccctccacttttctctcctttgctggtgtgtgcattccctctgacgccctggctctcactctttcattctgttttttattctggctccctctgtctttgtgtttttttttttaattttctttttttgaggtggggtcttgcactgtcacccaggctggagtgcagtggtgcgatctcagctcactgcaacctcttcttcctgggctcaggcaatcctctcacctcagcctcccaagtagctgggactacaggctcgtgacaccacatctagctaatttgttttgtatttttggtagagacagagtttcaccatgttgctcaggctggtctcgaactcctgagctcaagtgatccacctgcctcggcctcccaaagtgctgggattacaggcatgagccactgtgcccggccatggctccctctgtctttgtacgcctgtccctttgctgtccctctcctccacaggacagcattggcatggccacctccctcagccctcttcatttcccttgcagctgcatcaacagagagtggccgcagcagcaggtgacccattaactgaggaactggctgccactgaacacctggaactccttgtgggaagaagtttgcacctcggccctggctgcccaccatcagtgccccgcagtcagcagccattcctggcagtgaactctgccaggactgaagctgtggctttatccatcagctccctgggccttccccgcaacccacctcggggatctgaggatctggtgcatagatgaacatctatcccctcctcccccatacacacctaggcttgaaatgccctacaggcccagaactttctcacatctgaaatggaggcattgcaatgaaaaggcacccacagcatcatgcaagtggcatcttgtaaaaaaaaaaaaaaagtttaatctgaatctaaccatgaggaaataatcagacaaatccacattaggggcattctgctaaacatctgacccagactcttcaaaaatgaagagtgaaagataaagtagtcaatggccgggcgcagtgagattgcgccattgcattccagcctgggtgacagagcgagactccgtatcagaaagaaaaagaggaactgaatgaaatctcagatggctgaaatgttagagaaacagagcaccaagtcccctgctctgtgactcgttgttcctttcctctgtcttcaagcaccacgcagaaatacactggatgttc

SEQ ID NO: 10627 - DNA, 1178 bp, Homo sapiens
ttatcgcgagagaggagagaaacagttaacccagggccattcacaccatgcacatatgattgttttggaatgtctggttagctttctagttgatacggccttcactatgtaaaggtcagtctttttatttctcagatacttcacattatttatgaaccttttgaatgactgcagtgaagttgaagatgaaagtgcgcaaacaggtggcaggaaacgtggcatgtctcggaggctggcatcactgaggcactgtacggtccttgcaatgtcaaacttactcaatgccaacgtagacagtggtctcatgcactccataggtgagatcaaatgaaagtttcatatagaaatacaaaacctagagaactggcatgtaagagaagcaaaaattacttcagcaaggccatgttagtaaatttgcatctgtttgtccacattaggcttaggttaccacaaggatctccagacaagagctacatttatggaagttctgacaaaaatccttcaacaaggcacagaatttgacacacttgcagaaacagtattggctgatcggtttgagagattggtggaactggtcacaatgatgggtgatcaaggagaactccctatagcgatggctctggccaatgtggttccttgttctcagtgggtaagtgattagagtaagcggggaagaaaagtgcctggcacatagcaaatccttcagaatatatttgttcaataaatgtttgttgaatgaattgataaaatttcagagccagaagaaagatgtttagttaggtgatttttcagctgtagggaagtggttggcaccactagacctgactagtgttctgtatcatttcatcctactaaaaaattccatttaaacgcattaaaaatcactgatctactctggtgtcttcatatatttgataaggtaattaggttaaacctaattttagttagttgttgcaatgctggaattggaatccacgatttgtgcctgtttactacctccagtttgctattcttttccccataatgtctcatacagttttttaaaaatttaagcactatatttgcatttgatattatgatattgtttattttaaaaactgaaagcgtcatatggctatgtctctctcttaatttaatgaaaaattttcctaaaatcacatcattcttaatacatgcta

SEQ ID NO: 10628 - DNA, 1132 bp, Homo sapiens
ttaccagttcctttctccattttacttcacctgatcaatatagattatcttatttatgtttgtgctctaacaccaagttgctaatttaagcctccagtaatgacatgaaatattaccaaaaagaaaataaattacttccattccatatcaagctatagtaaagattttctatgcatacttgtcatgtagagttatcccataagcggaatactcagtgccagttgaccatgttcagttaccagcactaatttgtagataaatgaagcaaggagcattaatacaatgtatctagaggtttgatttagggaacatgattatgtaatttttatatggtattcaaattttctaaattcaaaatgaaacatggaactttagaaattaaaaagtaatattttctgtctttacttgttcctttattctcttacagaagagaccaagcaagttttgagactcagtctgacagagttctcattacccaaattttacttgctgtttggcattagcaaagtcaagtcagctgctgtcattgccttccgttccagttaccgggacaggtcattctctcctggctcctatgagagagagacttttgctttgacatccttggaaacagtcacagaagctttgttggagatcatggaggtatagaagccaaaatgataagaaactaagttaaaatctttttttaaaaatatgttaatactatatagaagaaatattggtttattgtgctattttgtacttaatgcttaaataaaaacacttgcatggactgtgttattggtaacaggtcacttaatgacatcataataaacattatttaaacagttctaaaaacatttatgtacaatatgtattcagagtatccccttttttaggcatgcatgagagatattccaacgtgcaagtggctggaccagtggacagaactagctcaaaggtatgtcctaaattaaatataagttgtaaaaatatgcatattgttgaaaatacagctattactgtatgatcaatgttataatttattatttagtatatataaacacaaaggtttttataagttctgtggatcttttaattgcagatttgcattccaatataatccatccctgcaaccaagagctcttgttgt

SEQ ID NO: 10629 - DNA, 2698 bp, Homo sapiens
gaaaataagtgcgaccacatatatcttaacattactgaattaaaactatggcttctaagtccttatccaaactcagtcatccaaactagtttatttttttctccagttgattatcttttaatttttaattttgctaaaggtggtttttttgtgttttgttttttgtaaaccaaaactatactaagtatagtaattatatatatatatatattttttcccctccccctcttctttcctaactaattctgagcagggtaatcagtgaacaaagtgttgaaaattgttcccagaaggtaattttcatagatgtttgcattagctccatagcaaaatggaatggtacgtgacatttagggtagctgatatttttattttgttaaataatttccaagaatagagtatggtgtatattataaatttctttgataagatgtattttgaatgtcttttaatcttcctcctcctctccaaaaaaatcagaaacctctttaagaaaacatgtaggttatatatgctagaattgcatttaatcactgtgaaaagactggtcagcctgcattagtatgacagtaggggggctgttagaattgctgctatactggtggtatggattatcatggcattggaattttcatagtaatgcagatccaatttctttgtggtacctgcagtttacaaaataatttgacttcagtgagcatattggtatctggatgttccaatttagaactaaaccatatttattacaaaaagatattaatccctctactcccaggttccctttatatgttaagatataatggctttgaggggggaaaaaataaacctaggggagaggggagtttcctgtagtgctgtttcattagaggatttcagtaaattaaattccacagctaattcaataaataatggtacatttaagtgttctgattttaataatatatttcacatttatccacacagtaacaatgtaatatgttaatgtaaataaaattggttttgatactcagaaataacaagaatttaattttttaaatttgtttacagtcctgggaaaagtaagaattatttgccaaaataagaggaaagaaaaccttagtattattaatgagtttaccatagaattgttggaaatactgaagacaggtgcaatttactaaacttttgtttttaaactattgtagaggctgcattagaagaaaatgtttataatgacagagcaactatgactatataaaaaagctgaaattagaactgtgtttagaaatagatcagtaacccagtgccaaggatgccaagctgccaccatggtcttggctctcccacaacccagtgtttctggggtaagtttcacagtttctaggccctggaatagcaggcagtgtaagcctttgataactttagttcgatgtttttcttgtttttgtttgttggtttggtgcatatgatagtgggtgttatgctattttgctcttcccatcaaaataaagaaacttccagaggtttactgttaaaaatactgatatttccataaacgggtttaccaagggtgtagtatttcataccgcctgaaatgatcagcattggcacaaatcaaaattcagccgcctttgaaatgcaaaaatacctttgactagtaagtacatcctaggagtttgaaaacttaactaaggtttaaaatttaccttgtttaaagaacttctgacttttgaggaaaatctagctttccaagtaactaaaatgtacatgagataaacctctcaccactatgtgtcccttgagaaatgcaacacttttttagtcttcatacttgtaatctataaaagaaattctgaagtttagaccaagttgcccatttctgcgtaattgacataagttctgttaaaaatattataagtaattcgtttcggtttgtagatgtttcccctgacttgttaaagaggaaaccaggaactcagtcatgtttttgtcctggataatctacctgttatgccagtactcccatccgaggggcatgcccttagttgcccagatggagatgcagttcagtagatttggggcaaagtggctacagctctgtcttccattcactcaacacctgttcatgactgagccaggtgcccaggacacatcctaaacagtcagcttctatcctgtgtcctagttggggagacagagtgccagccagcaaccctcccaggtttgtaggttttaggggttttcagttttgtttgggttttttgttttttgtttttgtttctacatccttccccgactcccaggcataatgaggcatgtcttactcaatgttatgcaatggatttaggcaaaaattcattcttagtgtcagccacacaattttttttaatgcagtatattcacctgtaaatagtttgtgtaaaatttgacaaaaaaagtatatttactatactgtaaatatatgtgatgatatattgtattattttgcttttttgtaaagcagttagttgctgcacatggataacaacaaaaatttgattattctcgtgttagtattgttaacttctttttgcgactgcgttacatcatttaaagaaaatgctgtgtattgtaaacttaaattgtatatgataacttactgtcctttccatccgggcctaaactttggcagttcctttgtctacaaccttgttaatactgtaaacagttgtacgccagc

SEQ ID NO: 10630 - DNA, 1170 bp, Homo sapiens
gtgcctgtgccaggcattttgtcaggtccccctcccagttcagtacaaccttggggcgtttggttgggatctcaggagcgaggccagccgtgtacagagtcagcaggaactgcagctgtcctgcgggcagccctgtcctggacgtcccagggtctgcaggacacggggggcgcccagcctcggaggaatgggtgtgtttgctttctccagaggctggcacagtcgtttggagtccctgcaagccaggtgggcagcactgccttaggtcccctcccccaggaaggcctccttccttcctgttgccccagcctgccctctgtgtgtgggaattagtcccagaggacaagggcctcttgcagctccctccacagtgccttgagctgagttccccaccgcctgggctccatccctgccttccagtgctcagctggcctcctggagcctcgggcccccacctcagcccttcccaccctatgcccattagtcagaagcagagcagccgtcccaggctgaggctcaacccctcactgtcccgtgtgtctgcctgtctgcgcagggtgcgaggagctgctgaaggatgtgctgtcggtggagagcgcggggacgctgccgtgcgcgccagagatcccagactgcgtggagcaggtaaggcttggggggcctcaaggacctccatggctctgcctcctccttcttggtcttgcctttgctccattttcagtatctgggaggacccagaacctccctctgaggacccttcttgagcatcagagtcaagaaatagtttttggaacaggagccctgagtccccttgggaagccccagcagaatgtgtaacagctgggggtcctcacccagcaactttatttcccatctgtggcacggaggagagactgagttccagacagggaaagtggcaagtggaggggaggcaggactagaattgtttccttttcttctgcaccatcgctctctgagctgaacgcttcctgtttgtttgttttcaaacaacaacgaattctccaattctctgacactaactggtgtccagcaatcagttccacctgccactaactacccagcattagcacagactccatgagtcaaggtcaactccatgagactgccccacctcccacgccagctgcagttcttcctggataactgcaa

SEQ ID NO: 10631 - DNA, 2181 bp, Homo sapiens
gggaggaacacaactcccatcccagtcagtttccttcccatggctgcatcttaagatggatgcacggagaaaccgtctgcctggctccctgtcttcattctccacgcagcctggtgatggcaggcctgggtttggatttcagaatcctagctccgggctccactcgtgtggcagcaagactgcttcgttccagcgtttagaaacacacctgtatttgattctcagccaggggagcactcgctgcactggtgggaggcggttgggaaagttgcaggaaaaccttagtcttccatccttctgacccatggtggaaattcacaccatggatttttaatggatctttgttctaggcagctgggaatagacatggtacttaccttagagttttccaatttatctcaattttatatggcttgtgattcattttcttaatccaaatatatataaacgtgtgtggtcttattcttccccctgcagtttcttgctttcttcagcacatcttatagtatgagaaggaaggtttgggcatgttgggaagggcggtggagggggagttgcagaaagagagggcagtgagggtgaggagaggggatctggggacttgggtgtgacacctgcttgacagaggcagggctgtggccaggaccaaccttcaattccattccaatcagcctttgcatttgttggatctcgtggcttctttttaatcttttgttggggattagtttcatgctgcacataatggggttgcactggtctgacccaggactttggagccacccacactgggaagactaggctaggcagtcggtcttctaggagtttctcagccccttaggacgcgggtctccttgggctcccccaagggttctgcgaagaggcagtggaagaaggcatgaggagagggtctcttgagaatttgccaataggaaggagtggccacggctgaaaggaacaagacagatcctgacatagctttggcctgggtgttaggtcagaaggagtactggtgcgtgggggccttaccccagggttgagtattttatctgtaaaatgttatctgccctttggctgcattggaatttcagagaaggctgcagaggcctgggttacacagcctgagtcacaacgtgggaaggaatctctgccacgggaaaggtgggcggaagcagctggcagcctggggcgtgcttcaggctcctccctctaaggggcgccatgggaacaggctccggagggagccggcgtctgaaaggcccccgggacctgctgcagtgccagaggggcctctggagcaggcctggcttttaaatggggggctgaattccagctcacacacacctcaagtccaaccttactttcttcagccagaatacatttcttgtaaaacctggcttgttgcttggcttttaaagatggtgtatgtttgtaaaaatattcttctgggctcaaaagctagcttgagggggcagatgccccaggtgtcccagctccacagcccctggcagatcccagaccccttggtggcaggtcccagagcctaggtggtaggagcttgatctttgtttctgcccttacccctcagtagtggggctgcgaggtagtagacaggatgcccagttaagtttgaatttcagatagaaaataattttagaataaatatgttctatctaatacatgggacagatgttatttttagagataggatcttgctctgttgcccaggctggagtgtagtggtatgatcatagctcaccacaaccttgaactcccaggctcaagcgatcctcccgccttaactgcctgagtagctgggactacaggcatgcaccaccacgcccagctaatttttcttattttttgtagagacagggtctcactgtgttgcctcactcgagctgctgacctcaagtgatcctcccacctcagcctgccaaagcactgggattacaggcatgagccaccatgcctggccaggacatatttgaaatggggagattttaaaaattctgatgattagactgaatcctcagacgttctggtttgattgttgtgggtgtagcccaggcatgggattttttaaagagctgctcaggtaattccaatttaattgcgtgtcctacttgggttttttgtttgtttttattgtttttgctaaacctggcaaccctaccgagtagg

SEQ ID NO: 10632 - DNA, 1513 bp, Homo sapiens
cgcaaaatgaactgaaccaggagtgagcttcgtgtacattatctattagaaaatgaagtaccttctggttcagctagtccctgtgcgttgagaggctttaagaaacttctagtaaaaatgtttttttcttttagctttgaattggccagagtttatcctagattattttattttaaattggtagaattctttgcgaactgtcacagagaaattccttttcatgactttatttctgacctattaaaacatgaacaggccaggcatggtggctcacgcctgtaatcctagcacttgggaggcagtggcaggcggatcacttgagctcaggagtcctaaaccagcctgggcaacatagtgataccttgtctctaccaaaagttaaaaaaaaaaaaaaaaaagctcaagaacctgcacgagggcctaaaacagtgggctcagctttggctgtgcattggaatcacctggggagatttgtaagcttctgctgtctgggctgaacccccagaggttcggattgaattggtgtggggtgtggtccaggcatcgagatgtgtaaagacctccccaggtgatgatatgcagtccgaggttgagactgccctgtcctgcaaggtcgttggccagaggtagaggaaactggtcaaagtggctgttgggcttgtcaagcccgtggctgaatgacagtgagctctcttgctgggagggttccttttcctgttgttgaatggtcctggcctgcaggatgggaggccagatgccttcaggagctggtggatccagctgttctcaccagcctggaggttagcagaccagagtgggtgggcaggaccttggcctggtgcccctggaatcagtgggtggcatgtgttgggatatactggctacaggctcatctcaaagagcaggtagaacagagtcagcagggaactgacaggtggggctgtccccctgaaagcagccgcagaaacagctgccacctatttgcatagctgagcaggaggacatactgtctttgtgggttttgcttctggtctgtttcctgactgggttgataaagggagtcccagctcgttccctgttagccaaaccagcatcctactcacacaccggacactccaggtgctagtccactggtgctggtgttcaggggagttggggggggggggcgcggggacagaagcgcgggttcttggttccaatgagggacttagcagaagcctccaggggccagcagggccaggtgaaactgggagaaatgaagccctctgtgtcctgtgtgtgtggtggggtttaatgcattagcaaatttaaacttaaaaactaactctaggccgggcacggtggctcacacctgtaatcccagcactttgggaggccaaggcaggtggattgcctgagctcaggagttcgagaccagcctggacaacatggtgaaactcttgtctttatttttttaaaaaaacaaaaagtaactttcgatgtgatcataccaggaaagttttgcgtggtcacc

SEQ ID NO: 10633 - DNA, 1513 bp, Homo sapiens; identical to SEQ ID NO: 10632

SEQ ID NO: 10634 - DNA, 1900 bp, Homo sapiens
ctctagggtgacgctgctggctaggaagactgaggtctgctgcgccaaggggcctcaagttagaagggccatgccgttcagtggatgactttgagcgctgatcctagggacctgccaggtcctcacttcctgccctgggtgcacacatgaatggggcagccagcaggaagcgggagaggctggaaccaggagcctgccctacctgcatggcaggacaactctgaggcccttctgccatattctctgctacccaccagagaaaataggctgccttctagaaagatttgtttctaaaagcgtagaccctggggaagtataatgtcaccatgctcaccaggcgaggtttcccatatgacctccctgccccgacctcgtaggttgctcctttccccatctgtaaggtagagatgtctgccccggagctaccagctggggatggcatccaggccatgtctcctgcaggatccaagtgctgttgtccccagggtgaccctgcctcctgctggggcccatccgctttgctgtgctgcacaggctgttttcatctgcatggtttggggtctttgtccttgtgccttttcttccccatcgccactgtacaggattttccacattgcccactgcctccttttctacatcgtctcatctccctggcctttcccgagccctgtaaatgtgtactttttcaacgtgcctcccccaggtgaggccagctctcccgggcacattcgtccacaaggatcaggccccacttacccttggctcgctcagcctgtagacttggtaactttgtacagaatctttcattattgtcttaagcatggggggctaggacccacttagtccctcctccagcctgcagctaatttaggagccttgcattccagaaaagggcaactttgtgtaaagcagcttctcccacagagctttccctgcattgttagtgatgtcgggcaaagcatcactctttaacctggggcattggccccagcagggatatcatgggaccgcagccgctccgtgcactgtctctgcccccagaggaagccctgtccatggttcctggtgcacggccacaggcctgccttgaggccaccacatctggtgtctagaacagctgcgggccccacttgggcagaaggaagaggtgctagctgctgcccctgcctgctgtgaacacctgcccagcccttccttgtctgctgaggtgctcagaccagagtgccattaaataccaactgatgtcacggagcggacggtgcattgccaaggactcacagctgtgggctcccttccagctcctcccactttcttggctgggtcttctgaggcctacgtggaatgaactacacatgtggcctcatgcccaagggtttgttagatggcctctgactctgtgggattcaacttgacttttttgccccaggaggctctgtctggaaacaggcttagctttagtgctggggtgggacctgccctgtgggccccagggaggggacagtgggggtgaggccctgaggctgtccagggtctgagctctttgcctccaacctgcttctgccccaaaaggaacaggctgttggtggcaggctcctcccggggagctgtactgtacagaccaaggtgtaaataaacagtttgctcttctcgcctgactgaaccatgagtttctgtggttgggggagggtgggcagaagaggcctggttccagggctcacagggacagatggtctcccttaaaaagagcaacccccctgccccccaccaagtttgtggttcccagggtggctggtgctgtcccccaggggcagggtggagtggggcggtgtcactcttcagtccctaggggagaagacgtggatcccagaagcctctttaatgccaccattccagccacagg

SEQ ID NO: 10635 - DNA, 1206 bp, Homo sapiens
ccccgaactccgaggatgggagctgagggctgggtctttgcgggcgagatgagggtgtcggatcaactggcctacaaagtcccagttctcggcccccgggaccagcgtcttctccccggtcctcgccccaggccggcttcctcccgggctggcgtgcgctccggccaggctgcctctcaggtccacgctggagaaggagtggtgaggtgcgctcgccccggctgcgtgcggtgattcgggaaatccccgcacttcgctggagaaatagcgacgctctcggaagtgtgagtcggtcactgcttggggtccgtaccctttgggcagacgtggaccgcgccccggcgacctgggttgagtggacagacgggacccggcttacccatgggccaagccctgccacttaccgaggcctgccctgctgtgctttccagggcggcaaccttgagcttgggggtggggagaacggggcctgacttctagaattgcccctggggaggtgggaagcggaggtttggcccggtggcgcaggaagcccctgttcctctcccaaacaccatttcattaaagatggatctttgtggatgtgttcccaatggccggtcttttgttccctgaccgatgcaacataatgtggacccactctagtcctcttcaagttttttgctggaattccttaaactctcctttaaagtctcttatctattcctctagtgcgtttgcttctactccccgaaaacaaaaacccaccaacccctgaaacctcgggtttgcctggtgttggaactttggttatttgtcctttgtttgtgttgtgtttttggctcttggccgtggaaaaacatctggggacatgcagtgaggtgacttgaactgtgtgaagaactggttgacaaaatagggaacgtctggtccctgtcttacttggctttggaaaacaggagaggtttttaggagctgggaggagggagggtgagagggaggaaccatcacggccaggttggcccaccccttgccaggtcgtgtaaaaacccattcaagaggcattttcccacaggctccctgcctctgcaggccacgtgtagagtagtcctttgcaggcgtcctgcccatactgttgtccctgttttgggggcatgtgggagccaacacaggggagtcaggtgtgtggtaggcagtcaggtgtgttttggggtcagggaggcaggt

SEQ ID NO: 10636 - DNA, 1197 bp, Homo sapiens
caggccacatggacgtctctgcacagagccagctcatccggccccaggcgtcaggtgcacgggtgtgcacagagccaggccccacccagttcaggacagccccagagcccactccttttgccttcaccttcctatcagatgctcctatttttttaaaaaaatttatttatttgtaaagatgagggtctcactatgtttcccagggtggtctcaaactcctggcctcgagcaatcttcccacttcggccttccaaagagctgggatgataggcatgagccactgtggctggcccagatgctcctttttctgatggtgcctgcaccagggatggttccctgtgtcccaggctcagagtttctgggttttccttgtcttggtaaccacgacagcatagtggctaccaacacagaccaacctgggttcgaatcccagttcgacttctgactaactttggcatctagtactggtaacatgacttcccttagctgctgtttccccattgtaaaatgaggataccatctacatctacaggattattgaatgagaaaatgtgcacagagtgttagcacccttcctggcacacccaggaccccaagaactgttttgggtgcttattgtgatgtggtggacctgggtttcagttctgatgctgtcacctctgagttgtgtcatttagcctgtctgggcctcagtttcccatttgcaaaatggtagtaaggatttttacttcatttggctcattgatctaaaatatgtaaagggtacagagttgctcaataaatattagtgaatgttattattatatgagatgcaaggacttacttttttttctcaaaggatatagacaggggacatagagaagactcatttcctgtggaacagtccagacttcacatattcaagtttttataaacattattcttttaaaaaagaatacatgataaacattttggagaagagaaaaggagggggaaaaactcactcacgatcccaccacctgaatgtaagcactgtgagcaagcatgctgctgcacttccttccagggtttccacatgcattttattaagtggtcgtaattacaggatatacgcagttttgtattctttttcttctacttagcggcatatcataaatgttaccccatgtggctacatgttattggcaattgtgattttttttatggctgcataccatc

SEQ ID NO: 10637 - DNA, 1192 bp, Homo sapiens
ggaaaaaaaacaaaaaacaaaaaaacaaaactgatgaggcacagtggctcacgcctgtaatcccagcactttggaaggccaaggtagaaggattgcttgagcccaggagttcaagactagcctgggcaatatagtgaaaccctgtttctacaaaaaataaaaaaattagcctaatatggtggtgtgcctgtgttcccagctgccctggaggctgaggcaggagggtcacttgaactcaggaggttgagactgtagtaagccatgttcccgctactacactctagccggggcaacacagtgagaccctgtctcaaaaaagaaaaaaacacacaaaaacaaaccaaaacctgccactatactttaaagaagctaagagaggtattgttaaacaaagcgtcctagggaagtaacaatgagaagttaagtttcttagaaatcttgagttgaattgatatttaataaggttacctaataacactctgtcagttatctaattgtatgttttttttttaaaagatctttggatggattatatgaaagaagaattgaaccacccccttggtagacctgagaactgtggacagatctactggcgagcgatgaaaatgttgcagggagagtcagcagaggcatttgtagctaaacatgctatgcatcagactggccatttatgaagatgaagaatacagtcagctttgtgaaatagtattgcaagcaagccccgtgggcaaatttgtattgagtccatctgtaatttgctcagtgatggcagacaagatggctgtctggttttgagacacactttaattttatgttaacttgttaaatctttttaaaaattaaaaaatttttatgattgagactgggtcttgctctgttgccctggctggtcttgaactcctggactcaagtgaccttctcacctcagactcctgagtagctgggattataggtgcatgacactgctcagtttgatgtgctaatctgattccagtaaagagaattgctgatttaatgttgaggcccgatcttccacaggtcctaaatgtttcccaaaatacatggatagcatacgactgggtttttttaaaattatcccaggtcaagcatgagtatctctaatctcgacctaagagccagttaaaatgaaggagaaagtggccaggcatggtgactcaacgcctgtaatccc

SEQ ID NO: 10638 - DNA, 1151 bp, Homo sapiens
ttgctctgagtgacttggtcagaaggctggctgtgttctggagtgccattcctgctgggcaatgagaattctgtcacaatgaggactgtttgggaatgaatccctattttacatgttgattatcttaggaggaacctgcctttttaactagttttcagagcataggactaaactgtcattttatagcataaaaaaattgatacataatattttacatatttatagggtacatgcgatgttttgttatatgctgttctctaactaacattttttaaactgggagtaggtttgtctgccattgtggatttcctgggcagagtggagtgaaggtgccaaaagccaagaagacactgaggcagtctttaaggtataggctccgtgttccaagtcttgtggtgtggggaatggcagaaggttccctggttggtcagctctagtgttgcaggtgcgcctaaagcactatggagtggcctcaggtggttctgggaaaatctgttttggtatctataagttttctcacatagcttctttcttttttcttttaaattgtagaaagctctcttagctgtcataggtgccgactcagtaaccctgaagaataagtacctggattgggcttatcgaagtggtggctacaaaaaggccagagctgtgtttaaaaggtactcacagacgttcatagttgttactagtccctctaccccatgctcagccgctcatacccagattatttgaatcacagatagcatctgagggagtaatctgatacactttttctttttttttaagatggagtcttgctctgttgcccaggctggagtgcagtggcacaatctctgctcactgcaatctccgcctcctgcgttcaagtgattctcctgcctcggcttcccgagtagctaggattacaggcacctgccaccacgcctggctaatttttaaattttagattttaaagacaaggtttcaccatgttggccaggctggtctcaaactcctaacctcaggtgatctgcccacctcagcctcccaaagtgcagggattacaggcatgaggcaccacacctgacccaatacactgtttcattttcctttttttttgttttttttttgtttttttgagacagtgattctcccgccttagcctcctg

SEQ ID NO: 10639 - DNA, 1208 bp, Homo sapiens
tttgagatggagtttcactcttattgcccaggctggagtgcagtggtgcgatctcggctcactgcaacctccgcttcctgggttcaagcagttatctgcctcagcctcctgagtagctgggattacaggtgcccacaaccacgccaggctaatttttgtagagacagcgtttcaccatcttgaccaggctggtcttgaactcctgacctggtgatccacccgcctcggcctcccaaagtgctggaattacaggcatgagccaccacgcccggccaacatcagttttttaaaaaaattaaaagaattccagaaacgttcattagatagatatttctgaacaggagtagcattgggagtagcattactccactaagactgtagtcctggccaaactgaacttacttttcccctcctctttctctcttgtcgttttctttcttttttttttctactgggtttgtagatcagagattgtcagagacatagtgtgtatcaggacttcagcaagagatttgcctcttggtgagcaagatagaggagagtgaatgtgatgagtgtagagaattgaaaagttactgcttgtttatctattgtctgtccacttggaaagaggtgtactgcaagattttttcatcttgtaaatgcatggaaggtttgaataaagaaaaattatgtcagaccaattttccagtgggggagaatagctaatatgttggatgacggaatcaggattcagaaagaaccaataacaagatcacatgtttataagactagaagttttggttgggcatggtggctcatgctgtaataccagcactttgggaggctgaggcaggcagatcacctgtggtcaggagttcgagaccagcctggccaacatggtgaaacccccatctctactaaaaatacaaaaattagccgggtgtggtgttgggtgcctgtaatcctagctactcaggggctgaggcaggagaattgcttgaacccaggaggtggaggttgcagtgagccaagattgtgccattgcactcccagcctgggagacaagagcgaaactccatctcaaaaaaaaaaaaaaaaaaaaagactagaagttttgagcttagatttaaaaagacaaaagacagccgaacaaacaatatatgaaccttggctaagctattgtttttggaagaggtcctatgagtagattgctcactcaaaatgag

SEQ ID NO: 10640 - DNA, 1151 bp, Homo sapiens
ccgcgaccggctttcaaaaatgtttaattgtacaatatcctcctcctttgcttttttttttgttgttgttcttggtgttgggaagtcaggacgtgggatgggagacaatattctgaagaaaatgcatctcgtgtccctttcaggcttgagcagcccacctctctacacctggaggcgcttttcctgatggctgtccaagtctagcggcgcgcgcacttaacccctccctcccgtctagccccgcccctcaactcctgtccgctagagtcgtcctgcccaagaccagggcgggttctcgctgcaatcccacaatcggccacagggaggggacggtggctgtagaagccgaagggccttcccctaagtaggaggtggcggaagcggaaaaggcgggacctagggagcacgttacgtccggacgcgtcggtggtagggctgggtctccgaacctgaaaccgggagcttcctgctcgtgttcgctgttgagaagctacccgcggggttgtagacctcggacctcatggcagagataattcaggaacgcatagaagatcggctcccggaattggaacagctggagcgcattggactgttcagtcatgcggagattaagtgagagagggttggggagagggaagagctgaggcggcctgaggggaggttgggagtgtgtggcaggggctagatgtggggacgctcgacctgtgtttacttttcctaacgtggtggaagcccatttctcgttttcggtgatgtccagaattaatttttcattcgttgcaaggtaatccgtccgtctacttacccatcagacgttttgacagcccttcatggagccgggtcttagggctgtaaaggtgataaacccaggattcctgctcattaggagctaattgggcagagtgtggtgggggagacagacaaattaaatattttgataacagtgtactgtaagttgattgtagtaccttgtactgctgtagggatgggaacagagtgctgtgagagcccagggggagtggataaattcctaactagacttgaaggtggggaccattgaaatcagtttcatatgctactccagagcctaactacagcgcctggcacatggtagacattcagtagcgtgttaaaattatgtttaatagttt

SEQ ID NO: 10641 - DNA, 1143 bp, Homo sapiens
ggcagttactcggcctcctcctcctcctccgcggcggcagcggcgggggctgcggtgttaccggtgaagaagccgaaaatggagcacgtccaggctgaccacgagcttttcctccaggcctttgagagtgagtgtgtgcgaggctttgagggcaggaagacccactctgccaacaccggggatgggacactctgctgggcccccttcctcctcgggagtccacttgtgtggtagtggagggaggaattgaggggatgtccccctttcggagattacgtctccaggggatccggagtccagggccttgggagagctggaaaagagggtccgggcgggttcttgactcccccaagattgacgcaagaggctcgggactggggccccacgttcagagcaggcggcttttagatgaggaggtagcagttgaactgagccgcagtcacatcccgagactggttcttgttttctttcatgcctttcggactctagaaatacaggggtttcggttgtagcttttgaggggcaaaatgaagcctgtgaagggatgagtgcagtggaaccgaagaaagtgtccttagtctgaaatgccttcgcgctaacttggtgctgcaggttcctatggcacctttggatgcttaaaacccttcaaatctatccacccattttgtggatatgtaaactgagccagagagtggtcaagcatcttctctggagacgaccccggaattctgctttttctacctggcttacagaacattttcttgcgtcaatttctgtttctaagttctgtctggaaggtgaaactgacttatttggaaaggagagcaaggtgtctggaaacaaacaatagaatttattaaaaacatcgtgactatgaataatcctgattgttctttaaggaatgttatatcctgattggttcccttttttgcttttgtgtgttataatttgggtgatctttaatagctaaataatcttacagaaacttgaataaacttggctctaccgcccagtgtccttatttacagtttcactgtggcatatgttaagggcatggtatcagctgtgcttagaaagacgtattacgttgtttaatacccttccttcattctctctcattagtgcttcatgaaattctaattg

SEQ ID NO: 10642 - DNA, 2715 bp, Homo sapiens
cttattataatggttatcactgttgcatttgacaaaaatgctttgtattgctattcatattctgtttttattaaataggtttattgctgacaatcaaatgaatcatgcctgtatgctgtttgtagaaaattatggacagaaaataattaagaagaatttatgtcgaaacttcatgcttcatctagtcagcatgcatgactttaatcttattagcataatgtcaatagataaagctgttaccaagctccgtgaaatgcagcaaaaattagaaaagggggaatctgcttcccctgcaaacgaagaaataactgaagaacaaaatgggacagcaaatggatttagtgaaattaactcaaaagagaaagctttggaaacagatagtgtctcaggggtttcaaaacagagcaaaaaacaaaaactctgaaaagctctaaccccatgttatggacaaacactgaaattacattttagggaattcatcctctaagaattatgtttttgtttttaatcatatgttccaaacaggcactgttagatgaagtaaatgatttcaacaaggatatttgtatcagggttctacttcacttcattatgcagcattacatgtatatcacttttattgatgtcattaaaacattctgtactttaagcatgaaaagcaatatttcaaagtatttttaaactcaacaaatgtcatcaaatatgttgaattgatctagaaattatttcatatataaatcagaatttttttgcatttatgaacggctgtttttctactttgtaattgtgagacattttcttggggagggaaaattggaatggttcccttttttagaaattgaagtggtcttcatatgtcaactacagaaaaggaaaaaaatagaaattgaaggatttttatgaaattatattgcattactatttgcagtcaaactttgatccttgtttttgaaatcatttgtcaattcggaatgaaaaattataatgtaattttacattacataagttccttttacaattaaaaaatagcacttcttcatcttatgcctgtttgagaagatattaaattttcacattgttgacagtgaaatgctatgttggtttataagattacagaccatttgttttcatgtggataattttagtgcattgctcacccggtatgttttttttttttaacttgaacattttgcttgttttgtttttcttttttaattagataatcacacggaaaattaagctgttcatatctttaaattaggattgcaaaccaaggaaagaacgcatttgagattttaagatgtcacttataaggggagaagtgttcttaaaaagtcaaccagaaaactgttatgccttttatttgtttgcaaggatgtctttgtaatgtgtttcatgaatagaatatccaatagagataagctgacttgaatcattttgagcaattttgccctgtgttatatgtgtttcacgcacatatttgcagttggattttctccaacagaaagtggattcactactggcacattaacaagcaccaataggtttttattccaactccgagcactgtggttgagtaacatcacctcaattttttattatccttaaagatattgcattttcatattctttatttataaaggatcaatgctgctgtaaatacaggtatttttaattttaaaatttcattccaccaccatcagatgcagttccctattttgtttaatgaagggatatataagctttctaatggtgtcttcagaaatttataaaatgtaaatactgatttgactggtctttaagatgtgtttaactgtgaggctatttaacgaatagtgtggatgtgatttgtcatccagtattaagttcttagtcattgatttttgtgtttaaaaaaaaataggaaagagggaaactgcagctttcattacagattccttgattggtaagctctccaaatgatgagttctagtaaactctgatttttgcctctggatagtagatctcgagcgtttatctcgggctttaatttgctaaagctgtgcacatatgtaaaaaaaaaaaaaaaaagattattttaggggagatgtaggtgtagaattattgcttatgtcatttcttaagcagttatgctcttaatgcttaaaagaaggctagcattgtttgcacaaaaagttggtgattcccaccccaaatagtaataaaattacttctgttgagtaaactttttatgtcatcgtaaaagctgaaaaaatccctttgtttctatttataaaaaaagtgcttttctatatgtacccttgataacagattttgaagaaatcctgtaagatgataaagcatttgaatggtacagtagatgtaaaaaaaattcagtttaaaagaacatttgtttttacattaaatgtttatttgaaatcaaatgattttgtacataaagttcaataatataaaagctgtattctgttttggggtttttttgttattatgcattgttaacatgtacattaaaattttgatttagatagcatagtaagatttcagcctcaaatgagtcagagctaataagaaattaggaaaatcttaatgtgaaatcctgctttcagcagttacaactaatatgtcatttatggtattacataaatatttaaaaatttatagttcagagtaatgaaggagagagattcatttttcacagcatacctttttatacta

SEQ ID NO: 10643 - DNA, 1344 bp, Homo sapiens
ggtagggaaattggttggatctcaaggatacagaggtccacctgatggaaggagatatctggaacaaaaaaaaagtatcttaaaattcttcctactcataaacagcctttaaatagtcattatttttagggaattttgtctatgagtcaaatttaccagtatagaatgttccctggagaatatattatagaggcacagtgaagttaatgagattgaaaaccagaattttccatgacaaaaataagctcaaagatctgtagaacactactctcatataactttgtgcatgtcagtatattccttgagatgcaatgttggccatttcctctagtgctctctcttgctgagctgggtgtatatgtgaaacaattctgaaatcagctctgtttcattgagatacttgtgaattttgttttgttttgagctttacaatgcaaagctagcatccgtatgttcatgaatctggttcttgccattatgttacatgcttttctcctatgtgactctgtacactttatttactaatttactttatttcaggttttctctttttacacacactttttatccagagagggagacacgaaactacttggactgtgcttcgacgatttggttatgatgatgacctggatttgacacctgaatatttgttccccctgtatgtacctttgttttttttgttgttgttgttgtttaattttttattgagacaggatctcactatgtttcccaggctggtcttgaactcctgagtcaagtgatcctcccaccttggcctcccaaattgctgtgattaaaggcattgagccatgcccagtcacctttggttttgtaatgattttacttgttaaatatttttaaggttgatttagcacacatggggaggtgggcttcaagctaattgggaatattttagaattatagcagagctttatagcaggatttctcaacctcagcactattggcattttggaccagaaaattttttgttgtggatgtcctgtgcagtataggatctttaccacatccgtagatgtcagtgacacttccagttgtgacaaccaaaactgttgagaaattgccgaatgtaccctctgaagtgaaattatccccagttgagaaccactgattccctcatggctcaaacttttcctcttcttgtcgagactacaagtatctttttttgttcattttactgaggaaggaaaaataagatgctagacaacaaacttgttttgggagtcaagagatctcagaaatatgttgattcacatttttcttacattgttcttctccctcagttttatagcctgttcttagcttaagttgaagtaggtattt

SEQ ID NO: 10644 - DNA, 1640 bp, Homo sapiens
aacttctttatttcctgtgtgaaaaaaagtttacaaatttagatgtctactcccacaaagtagctaattgtctttattagtatctacattgtgtcattttcttaaagtaatgattaagtaattatatatatggctatattgatcaatgtttttgataagcattactgtatgcagttagcttgacaagtgtgctaatacttccctaaaagtagactgctaaataactggtatagggttttcatactaatcatgttttaaataataattatattttctgactgcaggcacgtgacacaagctgacctcaagagctccacgttttggcttcgagcaagttttggtgctactgtttttgcagttttgggctttgctatgtacaaagcattattgaaacagcgatgatataaaaagaaatactgtccctaccaaaaacaaatacttttatgtacattctgaatgctttaagttctgctagaattattgagatatttatacatgcagagttactttattaatatttgtaattcatgcataagagtattttaatgatagttataactgcagtattggctagcatatggaaagaaaacagctaacagccaaactaaaatggctaaattccagaggccaaaagggaatattttgtaaatatatgtacatattcaggcaagatatggtctcccaagctgagttctagaaatgatgtttctagacatttctaagtggtattgttagtgctcacttggctcactcttctaggtttaagttagcccagagattgtatttactcatggatcactttatttatttcacatttactcagaatgatcctttgggttctataaggacataaggtacaatttgccattgtctctccatttttaaaaacatacaagtcagtgtcagcttaccaacatgacattttttcagtcagttgtggtaggccagccttgaagccatcgcacagtctagaaacttgtgtagctgagtgtgcagctcacctttaagggtgaagttaggtaaaagcaattagcagaggcgttatctatgtgattatgttgcttccttgtcagtatgttgaattttatagccctttcaatgaaataaaaaaaaaatttgtatattaccaatgtttttagtttaaataaagagtcacccttactactgttgaatttcatcccaagtgtaaatcattctataatggctgtgtctgttatagtatattacagtaactgcatgtgtcaccaagtgttctatatcaggctaggataacctagaggcagtaattttttaaatgataaaataaatctaatgaatataaactctcatgataaacctattttttccatcatcagccttttcaagtatttaaataaataactgctgtgtactgtgatcttgagttcttttgtcatctaaagtaaatatttctgtacagatgtgagtgaagtcctctggtttctatctctcatattgaaaattattctgtataaaaggaatactcagccgggagtggtggctcaatcgtgtaatcccagcactttgggaggccgaggtgggtggatcacctgaggtcaggagtttgagaccagcctgaccaacatggtgaaaccctgtctctactaaataaaaaaaattag

SEQ ID NO: 10645 - DNA, 1596 bp, Homo sapiens
taatcttcctcggccaggacaggcccccatcggtaatccaccagttggaccaattggaggtatgatgccaccacagccaggcatcccacagcaacaaggaatgagacccccaatgccacctcatggtattcctctttttatgtttttcatatttagtggattttctaagttcacgcataaaatattaaatttatctgcagcatacgttgcacttaaaagtacaatgcgttaacaatctatttttttgtgtttgaaattcttgattttaggtcagtatggtggtcatcatcaaggcatgccaggataccttcctggtgctatgcccccgtatgggcagggaccgccaatggtgcccccttaccagggtgggcctcctcgacctccgatgggaatgagacctcctgtaatgtcgcaaggtggccgttactgatcttacttcatccagtctaataggtttggagattaaaccttttctcaacttgtgctgtttatatagccaagcttccgtcaataaggcttcattgtgactttaacaaacattatcttcccacataccaggaactattggacatttattttacatgggaaaaattatttggaataataaagcaggaacttttcctgaagttgcaatttatactgtatggcttctttttcatgtttcatctaggtttttagaagtgaagtatagtaaatttggttcgttaaattgtgaaggcgctggaattacatgaacataccaccctagtaaaggcaagttctgtaagcttacattgctatttgtaaagtttgccttcacagcatttcagatgctgttggacttcatgtccccaacctagcttggtgagggctgtaactgtttccaagtacttgtacattggaagtctgaatgtgtaacaatatttaatgtatttagagttcctcatgttgcagggtttaagaaatctgacccaccaaggtcatgtgacttttctgtactgttaaacttcattgtaataaaatgagagaaaaatttatgcctttttattcataacccagctgtggaccactgcctgaaaggtttgtacagatgcatgccacagtagatgtccacataataaaattcatagttaccaatgcagttttgatatatcattggattctgtctttgagttgtaggttatttcttagctgcatgttttaaactgaatttgcatagagttgtatgttaatgtttcagttaagagaaaaacttaagatacatgagtcattacataatgggtatgaaatctttataatcacccttccaccctctatggtgtcagtacacatcacgtgtcatagatacttaaaatgtaaatgttaacacttttccttcctgctgagatgtttagagcctagtgccagacccattcatttccttttgattatttttgagactcagtactgcatggacctcagaagcttttcaggtgcaaacttctagaagcttaggtgcatgcagtaatagcttcttgtgctgttaatgggttattatatattattctaagtgtaatgctgagaatctaaatgtgtctctgttgggatggttaacagatgaattggcaatttttatta

SEQ ID NO: 10646 - DNA, 1141 bp, Homo sapiens
ctgtgattaaatttagaataattaagtaaggggtgctctcccaaattctcaggaatttcatgtatacggttattgacaaactgcaatagggttagtagacctgtttcagaaattatgtgaagctttatttgcattttatgcaaagaaggttgatactttgtagcaaggttttttgctctctgtataggtctgatgggcaaaaatggaacttttaaatatgggatagaattctaattaaaaattaattgaaagtgttaggcattggcagataaaacttaagctcatgagttcctgagtttgtagctataggctcagaggtggtgtacccatttaatatatttgaagtgtaatttttgcatgcatccaaacgtaattaagcttctagaaaataccttttttctaaatgcttctggggtccatagtgtggttgaattatgagtggagcaaattatattcatataattaactctgactcaaccttccttaagtagtagatgaagttgagtcaaagtggatgccaactgccctcacagaagacaacttttgggacttgataattcaggcaggcattgtgattgtcataattaaggaagctgtaaggttagtagggctggcaactttggctctaccttacatccaccccttttagaaaaacaagaaaacattttgtctggcactagtttctgttgtataagttttcatactgtttaacaagaccacagcaggtaaggattaatttttgagtggctgctggaattacttgatttgaatacttagtattttagtagtgtctcacacatttgccattaggtatgaataaaatattcctactgtactcctattccactaagttacattttgaacttagactcaccttaattaaacttaattaattggggagggggattccccaacaaaaagaagtacgggctcagagtggaattgtagtggacaatagttaaaaacaaagctgctccttttgcttgcttgatcattgggatttttaaaaaaaaaaattttaatgcatgtcttttaaattaattgggaactgtttttctaaaattaaaattttcttcttcctatagccctgccataggacaggctgaggctgagtctcagtgttgccctgttcagtctgagg

SEQ ID NO: 10647 - DNA, 1212 bp, Homo sapiens
tttatgtatatggtgtaagtctgtttgaatttgatattctagtttgagatgggggagtcagggaagaaggtatatttggagaacattggtatatctagaactctttacttccttcatcaacctagtgccccagtgtttcttatatagccttgtgattgctagacaagaagagagcgagattgtgtctttctgaactggataactagatttagcattttataggtagagattcccactgtatttaaatcttaggagtaagctcataggactgttggctctaatattgtccttaggaagcagaaaacttcaaagaggtgtgtttttctcttggaagatagcacattagtggaaaatttaattattgcatggggtctagaggtaaccttttttgagttcaggaatttttttttttttttaatcctgagtgttatgagggtgggagagtgagctattattaggtattaagctgatggctataaaggagaatgtcttttcctttttcaggttctcagctgctgcgggagttgaaaaagatggacgacaaagctcttttggtggaagtacagcttttagaaagcaaaacataccatgccctgagcaacctgccgaaagcccgagctgccttaacttctgctcgaaccacagcaaatgccatctactgcccccctaaattgcaggccaccttggacatgcagtcgggtaacagacgtagctattcctgggatgtgttttcttaaagctcatcttattttataggtggaaggaatgggggttggggctggagaataaaattggctgatttggctctagcttcttcagagaaccagttagaaagctacctttctaactagctgctcccctcctgttaactgcctaaaatgtattaagaacatacctatctgtggttgaccaggcaatctgacttttagaaccaaacttagaaaggtcgcacgtagaagactcccttagctcttagccacttactcagaatagtagcattttcctttgggattggcctaccccaagtctgttgactcttggagatctttgtaaagttggttgacttttccaaagggcctcaaatcagggctgaggaatgataacccaatttcagctgagtgtggtatgtagttttccgatggagtgcgtgaatgtgaggctgggaagccatggattggcaggtggaatactttcttttgtattcagcagttt

SEQ ID NO: 10648 - DNA, 2565 bp, Homo sapiens
cgtggaaaggaaattatcacagatgattcttgacaagaaatttcatggtaagtaacagtcacacaggcaagggggctggtggtggtgatgagatggttgaagaagtttattttcaaagaagatgttctatttgtttcccccgatggttcaccctggggtcctggcccctcttccctgtgatgagaatgtgtaataagcatgtgtacatggaatagggagatgaattctatttcccttcttttctggacacagtgagtcaactagggagtgggctgcttcacaaacacttttgtgtctaacctcatcttttacctgggttgcccttgtgtttcttgcagggattttggaccagggggagggtgtcctgattattttcgatgaacccccagtagataaaacttacgaagctgctctggaaacaattcagaacatgagcaaagtagtggattccctctacaacaaagccaagaaactgacataggtgagtgctggcttcaggaccccagggctgggcagctctgtcttctgcgtgtcgagactgaaaacctcctcctggtgtcctcatggcttcctgattgacactgctctgtcttctcttgcagagttggatctgtagcggtcctttggagagtgtgtgtggcgggagagtgaaaccttgggggaaaatgctaggagattcttttttctttttgttctacttttcgctcggaaagtttttaaatcctcatttggtgcatctgtattccagccaataggtgtgccagttttcatgtaatctttactggcccaacttgggagtggggaaattgcttaaaaaaaaagaaaaagaaaaaaaaaaagattattctaaataaaaggaaaaaggcttacactacctaaagctgtgctctctgcctcctgggagagggccgcaaagccaggcaccccgccaaccactgggggtcctaatccacctgctgggcatcacctctcctcctcctcagaattgggtgtttgctgaccatcaaaagcaatgactttttattctgtttgtactgaaccaaaacaaacaactgtgtatagactgctgttttcttttttatttgaaatgaggcattttggtgttctttcccctaccatacggcctgtctgcccttccctccccacattggctccagcagagtagccgaaggtcctgccgccgccgccaccaccaccaccactgcagcaacaacagcagcagcagcagcagcgcctgcatagctccactctgacctgtgaaggaatggggatgaggccaggagctagtgtctaccacggccacacagggagcagtgtgggcccttagcccccaaggggcctgctatgcatgtggctttttttttttttttaaacacagtaaactagattagtcgtcagtgttttaattgcccctcttctcctctcctgcattcctctcctctcttctttcctctctgtcccttctctttcccctctcaaccaggagaccatcatgtctctctgccttcctcctctcccctccaggggagtcaggctgtctgtgaaagccatgagcttctctccctctcccactcctcctctcctactttcagatggatttattccttttttaaacaatgaacatcggaaatgagactgtggggtgtggtttctctctctcttttttttttaattttctttgttgggtttttgagcaacctcatgtccccttcccagggagctttttaatttacctcttagaactcaagtggatgggaagtagagcactatgtgtcagtatgctttgttttctgacacgattacacagcgaggctttaatgccatttgggtaggtgagcttctgcacttctgttgtgctgaactgtattttcttctctcatctcctctttgtctttttctcttttcctctccttcctgccttcttctgctggcctccttttctctttctttaccttccttggattatccttccaggttttcataataaatttatattttgtaaaaggattttgttgtaccaggttttgcatcctcactgaatctgactggcttttattttcctctccaaaatcaggtttttgttctcaacatctttccccatcatgtctagtcactgttttggttttggcaccatcagtatcaaatgtacaaacggttcttgctaaccaacaccaggtatatctgatgttcagatgagttccaataaaaataatttttttttttttcaaaaggtgtctttttcttgagtgctggagggcttccaagcaagtccagacagctctgtgtggccccacactagtctagctctcatctggccaaagctgttatctcatttgtgtaatgggagtccttaaggtaaatttggggtccaaacttggagggctttgggggcaagaaagttggtgtgtgagttctgaggttggaaatgagttcaggtgtcttcttccagggcagcatggtccagtgagcacatgtaagtttgggcagtagatcctctgagcctactttctcttctactcagtgaggatgctgcttccttggcaggtgattgtgatgtgaagctta

SEQ ID NO: 10649 - DNA, 1205 bp, Homo sapiens
ctaagttgatctaaattaacttttaaaaatatatggttcagtttctatcgttgctttctgtgtgcctccccgtgaattccctttcccctcttaatttacaaaggtaatcctctctgggttttggctgtcagccgagctcattagaagggtgtataaaaaaggagttaatatgttgtaatgaagactgaggggttaccttgggtatatcagtcgtagggcaagagttttaagatgtctgttttttatcttctctgctgagaggtattttttattgctttgctgtgtttggctggaaaggcaagtaggccaaactgagttctaagtaggtaaggtgctactctaaaacatattactgcccttggtatttgaattgtttgtgtggttgaacaaaccaaacatgatgagtgcatttttccacacagtgtgcaatttatgactgcttgttgacttgtggtaggcagctgctattggcagaatctgttactgtttgcatctccacctctcaggttcctattttatctgaaactcttactgaaaagaaacctcttcttcaacttcttgatttaccctaggctggggttcccaaatccagctttgtgtcatgatcacccagcttttaaaatacgcagattccccggactctgtcttctggagatggtgatttattaagcctccttagtgcccaggtgagtctcatatgcagccaggctcggagccactgtcctaggctaacgtttttcactccacagttgtgttctattaaaactaaatggactatcactgtaatgtgagctgactgacatattaacaaatgtattacaacttatccaaatagtcagtgttcttagttctgttttggttattaaatcaatttaatcgttgataatcacactttattctttatccttacaacaagttttccattttttcacccgatggttatggttatccagttttagctacaatgtatgtatttttctgtcctcagattatccataaaaactgtataatcccaccctccttgttaataccttgatttatttcctttacagtcttttctagacatataaaaaatgtacatattcaaaactttggcatcttcctgcttatacaacatatagttttgtaaactgttttctcacatagcatggtatcttaaatgcttttccatgccattaaggtgcctttgaaagtatggtggcagc

SEQ ID NO: 10650 - DNA, 1181 bp, Homo sapiens
ctactcctcactttggttttcagttacatttttttttttgagttggataaaccagccctgggccttaccaatttgtaatcaataaggaatgtttaagtgagggtgtgtctgtcctatgtttcagtgggcagcggttggggaatatgctcatctgattgactatatctgaactgtttcacaaagcgctctttggggagatgttaataggtgtgctgcagaaaatggcttccacagtcttaaataagcttgtgagagacagcctgttatattctccttggagctttaccaggtacatctcagaaggctctgaggcaggcttcagttaaccatgtttaacccagccatctccaaatttatttgagcatggagccaactttaaattgcatacctaccaacatcctagggaagggtgtgcagtttggggaatactagtcaaaaagtctatctatttgggcttttgtgcaaagtccctcatttcctaggaaacctgaccctattttctttttttccctaggacgactgccctgctcctgtctgtcagtcacctggtgctggtgacaaggaatgcctgccatctgacgggaggcctggactggattgaccagtctctgtcggctgctgaggagcatttggaagtccttcgagaagcagccctagcttctgagccagataaaggcctcccaggccctgaaggcttcctgcaggagcagtctgcaatttagtgcctacaggccagcagctagccatgaaggcccctgccgccatccctggatggctcagcttagccttctactttttcctatagagttagttgttctccacggctggagagttcagctgtgtgtgcatagtaaagcaggagatccccgtcagtttatgcctcttttgcagttgcaaactgtggctggtgagtggcagtctaatactacagttaggggagatgccattcactctctgcaagaggagtattgaaaactggtggactgtcagctttatttagctcacctagtgttttcaagaaaattgagccaccgtctaagaaatcaagaggtttcacattaaaattagaatttctggcctctctcgatcggtcagaatgtgtggcaattctgatctgcattttcagaagaggacaatcaattgaaactaagtaggggtttcttcttttggcaagacttgta

SEQ ID NO: 10651 - DNA, 1210 bp, Homo sapiens
attcctaattccagaaacaaaacctaaccactaatatactggtttaatttctttcaggcttttttctctgtctaggcttaatgttttagattttttaaatatcaattttagattattctctgtgtatcattttgcaagccacttttttcctttataacattaacattttcatggtattacatacccataattcaatgactacataaaactccattgtgtggatgtttcataaattacaactcattcttctgtcagatatttaaattgtttctactacttctttatcctggatagtgctaggatacataatttcaagactctttaggatagattcccaaaagcataattactgaacaggaacatttttaaggcatttgataggtgccatctgttttccaatcagttgcccaaatgtaccctctccccagaatcgtatgagaatccccattttacaatacttttccccacatgcaatcattcttttaaagtatctattctattttgactggtgagagatcatttcacactgttttgcttttcattttggatgaagagtgtgagaccaagcatcttccatatgtttacttcttggtgtatttcctcatttgtgaattgtgacagggcttcgtcttcatgtatagggaagcctcttagtagagaaagtgagcatgagccagatgcaagaattcaacccttgcctccttttgccagctgtgtgactctgggtgtatgtctgtagctcctgagcttctgttctctggtctgtgcaattagaatcctaatcctttcctggcaagtctgttgggaggattaagaaggtggctactttcacccacctagcacagcagctggcatgcagcagacatgcaattttagtttccttcttcttgagctctgtggtttctgtcattccctccaggtgaccccttaggtccctgtgactctgggatcaacagcatcggcatcacctgggaacttataaaggcagagtttcaggccaccccagacctatcacatcagaatctgcatttcaacaagatctccaagtagctcatatgtacagtaaagtttgaggcactctgatttaggctttgagattgaagatgatggtatgcttcccagacacaataaccagcaccaattgaaggataaagggatagatttaggagcctggtgccagggagctctaatataccacctcatccacaca

SEQ ID NO: 10652 - DNA, 1496 bp, Homo sapiens
caacattatgtaaagcacttagcccagagcctagcacatagttatctagagttgggaacgtcactcctggtgtgcatgtccagaccctacccgggagaagggcctaacctatgactttagaaccctcagttgcaggtgtgcatgttccagccaacactccactctgagtgcaggctcatcaggacaccatatggttgtaaactggctgccatgtcccaatccttccagctcttgagggtcagttctcaccttatgaacaaattaacaggctctggacctataagatcaaggaccactgcgccccctggccaccccaccgcccccccccaactttgatctgattgactttggcttccacctactgtttaaaatgtgtatgttgggggagtagggacagcacgggggaggggtttactttcctgactctagcccaggacatttggtgtttttgaataggcaccattcagccttgcttcagtattaggaataagatactttttattccatcctctatggagacaaaaagctgctcctcctttgagtactgacctacatagatttccatttctctcttcagcctcaggccaaacaaacaaccggacagggcagcagaacaaggctgtctcctcaggatcctgccaaaggcactgtcctctccaacctggacccagccccacttgcccttattggttgcttacacccagagtgcacactcacaggaaagggcctctgctggctgcaggtgatcatcttgtcccttctctgccttagtgtgtgttattgccatttcaatgtcagtggttttttatgtattttcttccagtctttgctgctgagatctgactgtatatactattttgtatcctttcatgtatttctttcatgtatttcaatgcagccctcaacatcatcatcataaatctctccagcagaatgctggaggcctccctcttctgaacctctacatgctgctggctggcatcaagcagaggtcatcactgggtgctgaacaggtcagctccctagggcaatgtgagcaaagtgttgtggctcatcctcgatcctttatgcccttttggcaagattcctttctcttctcagtcacagcagatggacacataatcttgttctcccaggggctgcattctcagtagtcttttccctgctccttgggcgcctggtcagggaggtttgtacaagcctgcgcacacacagcagtctgtcacgaggctgggccaaccttttttttttttttaaacagactcttgctctgtcattcaggctggagtgcagtggtgcaatctcagctcactgcaacctctgcttcccgggttcacaagcaattctcatgcctcagcctcccaagtggctaagacttaacaaacaggcacacaccatcactcgcagctaagtttttgtatttttagtagagaccacgtttcgccatgttgtccagactggtctcaaactcctggcctcgagtcatccacgcacct

SEQ ID NO: 10653 - DNA, 1257 bp, Homo sapiens
acttgctagtaaaagagaatgtatgttagccaagagctcagagggccttctctgctgcttaactccaggtacttatttcaagcccagaccagctcctgtgctcccctttgttttcttggctgcaggccacagaaatctagctctcttttctatttgatgtttaggaactcactgtggagtagggcacggtctttacagctcctcttttttttttttttttttttcctgtgccggaatacaagcccaaaagcttttcctgtttttagggtagatcctaatggctgtgggatggtacgaactccctaaacctctgcctggcactagagtgaatcctgctgagctgtttctcattttgtatttaaaacagttaaatgacttcttcacctaaactcttaaatagggcagctaagatttgtacttaggaaaggaatagcatggaagattggagctcatgtagaatgtatctggaagcttaaattaatgaggtaattcttttgcagcttacataaactggactgtttacttttagccaccatgtatacctacagttgttggtgattgttttctgcaggactgtgaagatcctaatcctttgattcgagccttggcagtcagaaccatggggtgcatccgggtagacaaaattacagaatatctctgtgagccgctccgcaagtgcttgaaggatgaggatccctatgttcggaaaacagcagcagtctgcgtggcaaaactccatgatatcaatgcccaaatggtggaagatcagggatttctggattctctacgggatctcatagcagattcaaatccaatggtaataagcttctgcttttacaaagagagcagtatttaaaatgagtcccttgttaaagcgtgtttaatatgaaccttgtctttggaatactgggttatggggtagctatgggaaacatgactttgtgtgtctcacagattgtatatttcatatcctaggtgtttttgaggtgagaaccaagtactaaaatgcagggatcttaaagcaaatctttgtattgtacttatgctcatatttgcccatattgcccatgatgaaaactttcatcattttcttcaggaggtttggccgtaaatttatatatatttaagattattttcttcagatcaatatttgtggtattttctggtggtgtgggactagaaactgaatgaaaatgatctttattacctaattattatcatgcatttctctataggggaatttctagggcaagatta

SEQ ID NO: 10654 - DNA, 1099 bp, Homo sapiens
ctagcagttcttcatggcaacatgtgccctgatgcttaaaaaggataaaaataatctgccaagtggaactgataagaatagaggcgtatagaggaagtttatgcttttttttttttttttttttttttgcctgagtggagcgagaggagagcagagaggcacagattaggtattaatacagtctcagaagggtatatcagtatatgccttcaccttcctttcttctgtttctgtgtaccctaggcctgaaatcttgaagcaggaaatcaaagtcttctttgtgaagtacaatgatcccatctatgttaaactagagaagttggacatcatgattcgtttggcatctcaagccaacattgctcaggtcagactttatgcagactcaagttgatgatgatttagctcttaaggtctggcctttaaagaagctaggctgtgagattgctatttgagaatccttaatgattaaccacttcctgggtttaacaggttctggcagaactgaaagaatatgctacagaggtggatgttgactttgttcgaaaagctgtgcgggccattggacggtgtgccatcaaggtggaggcaagtgtctgatggtagttaggatcatgtattggggattctgagagttctcttcacttttttctttaaaataatttttaagtttatcaaaataataaagcacacagtttcaatgttaaagaatttttaatggaaagcagctgtctctggttcctcccttccctacctagactttcttctcagagggaatatttttaactctgattttgcttttagttattcttttgattaaaataggtcctccatatccatgagttccacatccgtggattcagctaactgcggatcaaaaatattcaggggaaaagaaaaaggatggttttgtctgtactgaacatgtacagacctttttttgtctatattccttaaaaatataacaattatttacatagtatttacattgcattaggtattataaataatctagagatggtttaaagtatacaagagaatgtgtataaatgcaaatactataccattttatgtaaggcacttaagcatccatggattttgg

SEQ ID NO: 10655 - DNA, 1271 bp, Homo sapiens
ttgtaaaaatggcagtgtggctcgcacctgtaatttcatcactttgggagaccaaggtgagaggatcacttgaggccacaagtttgagaccagccggtcaacatagcaagacccccatctctacaaaaaaatttttaaaatttagctgagtgtggtggcactaaattgtagtcctagctacttaggagactgaggagggaggatcgcttgagcccaggactttgaggttacagtgagctatgatcatgccaatgcactctagcctgggtgacaagagtgagaccctgtctccctgtctcaaaaaacaaaacaaaagaacatctgatgaatttttataaaggttttaaggtctaggtcttaaaaaataattgaagggaaatttaagtcattaaaatcttctgacttaaaacctattcattctcttgactaaaagcttttacagtttggtggtttggtttagggtcccttgtttgtggttttgcctttagccttcactgttaaattagttcttagttttgccctcaataaccatagttcattttttttcatcaggtatgaaagtatcatcgccactctgtgtgagaacttagactcgctggatgagccagatgctcgagcagctatgatttggattgtgggagaatatgctgaaagaattgacaatgcagatgagttactagaaagcttcctggagggttttcacgatgaaagcacccaggtaagttcttgtctcttgtctatcctagtagttttagatgtctttggggagatttcagagaaagcaaaggttataggcagtttcttctgtgtctgtatttacatatagtatgttcatttttctcccaacagggatgtctcttctcagttttactaattttttgtttttgttttcgagacagagtctcgctttgttgtccaggctggagtgcagtggcaggatcttggctcactgcaacctttgcctcctgggttcaagcgattctcctgcttcagcctcccaagtagctgggattataggtgtgcaccaccacacctggctaatttttatatttttagtggagacagggtttcaccatgttggccaggctggtcttgaactcctgaacttaggtgatccacccgcctcggcctcccagagtgctgggattacgggcatgagccactatgcctggccagttttactgattttttttttttttttttttttttttttgagacagtttcactcttgttgccaaggctggagtgtagtggcaggattgtggctcact

SEQ ID NO: 10656 - DNA, 1167 bp, Homo sapiens
ggtgtgaatgtccatctccctgaggagagcttcctactaggtatttatgcctaaatgggaaaggaaataagactttgctgaacccaggtggaaatggaactgctgtttaagttggatacttctccctctttctataaaaacaaactcctttcttagggtacccgtaggccttttgcacagaatcatggaagctaaaattggaaacaaatacaaaatcttggatcactgtgttcctgtatcctactgagtactctcttgataaagcttctaaagaatgtgtgttctcatcaatgacgaaaaaataactgtcatgattaaaaagatgaagaatatactaatttgactcctaagaatattgtaattatggtgttttcttattgatttatcaaaactactaagatatatagcaatattttaaggactgttaatctgttcttcccaatctcccctctcccttttttttttctcctgcaggtgggacaatccttcatcccatcatcggtgcctgcaacctttgctccttcacctacacctgctgtggtcagcagtggactgaatgacctgtttgaactctccacagggataggcatggcacctggtggatatgtggctcctaaggctgtaagtaaagagttaacatagcaatactttcttaatggacaggacccaaactgtttcactttcaacatttgtgttacttctactggtaataaatcaaaggtttgggcccttgttctggaggacttagaggaagatgaaaggtggcttcaaacttagcagtaggaagcaccattagcatccttgttaaacatttttataattagacttaaaatttgacatattaattatttgagttttgttctcatgtttagaaatattgtctagtttgtcaacattgaagtcaatctagtgaaaatctagtggtatgtagtgcagcagcaggagaaaaaaatgcagagaagtcatttctcttattcctctttccccattggtattacgtatggattctagaatgccactgctcagatgtggttttcatggattttagtgtacctttttagagttccaatttaggtttgtgtcactggggctcttcttgtcttgtcttaaccttacttgatgtcactcacattgaagttcaagaggggaaactcccggttaatgaag

SEQ ID NO: 10657 - DNA, 3707 bp, Homo sapiens
tcctcctgaagttgggactgagatatagccatcctcttgtcagactgagaaactgaggcaggcagctgaaaggaccatcaacaagttaagggctttggcccttcccttttcatttaataataatccctataactcttagaaaagcattagagcagctgttgctctgcagtcagtggctttgatgtttttagtatggattatttcctaatcttatagacccacatggaatggaggtagaagcacagcacaacttgatattgattaaattgaaatgctaaaacccacagcacttattaacataatctctttgtttagctactccagtgatagaagtttctctcccactgtgtcaaaagttttcttgaactgagtgcttggatacctttagagctaatgccaacctctgtgctaatcttccatctcctttttctcctaacagctgtcactgaagtgtagagctcctgaagtctctcaatacatctatcaggtctacgacagcattttgaaaaactaacaagactggtccagtacccttcaaccatgctgtgatcggtgcaagtcaagaactcttaactggaagaaattgtattgctgcgtagaatctgaacacactgaggccacctagcaaggtagtaactagtctaacctgtgctaacattagggcacaacctgttggatagttttagcttcctgtgaacatttgtaaccactgcttcagtcacctcccacctcttgccacctgctgctgctatctgtccttacttgtgggcttctccatgctgtgccaatggctggctttttctacaccctcttttgagtgtagtttggtattttgtaattgagagctcatttcaaaagcagaaaaagacaacaaatattaaagcaaggaaaagtgtaactgaaacactgcactttactgttttatacttttgtacatatgagaaatcaagggattagtgcaaccagtagaaagcattgaaatgactgtcattaaccacacagtcctggaggcagagatgcagttacctaccctagcttttgatgggttctcttacctgtagtagccttatccctggtcatttggattttcagtttgcttttttctttttttcccctccaaactccttttccttggccaagccttcatgcttccccctttccatattataatctcatttgattgctctgcagttgggaacggtgatcttcttgaatgatgtttcagtgtgcaaaaactatagagcctgtcagcaccaaagctgacagaagttataccttactcctttcctttcccctgaacaaacctgctaatcccactaattcaggaatttgagtagagatggggaacaagaacccagatgctgtcccctcaccccctctcctgtatttctcaggtccagttcaaatctaaaattctacttttagagttgaaacagagtaataacttatctaaccctcttttcctacaaaggagaaagataaaaggcacaaaggttaccgccaaggcccgtcagctgtgtagtggcaaagccgagaccgagtctcctaagtccccgtcagtgtggttttcaccacaggactgtctcttgtcgttttcccctaatgccttctcctgccttttctgtgcctagtttttggctcttcacatattccatattgattttgacgctctgtatattggcatcaggtggcagctgaatatcttttgaattactcgaaggtaaagccagatgccagaatgaaggtgtagccagtgtttcccatatgcccctggagccccacttattgaggccagcagaataggtgcagagatgaagtgagcttagagatgttgcaaatgctctttatcccttcagctctctgatctgctctttcttcatgatacttagtctgcagggcatattaagatcatcccagaggttcaggcagttcctgtcatctctgaaaagactgggggatatgaaatcttccccctaccccacttaatgcgttggatatgatttttcaaagaatgcttcatgcccaaaataccagcctgtttagcagtgttacactgtttgatctgcgggcacttgttgcattgcctggcacccaatattcagggtccatgactaagactggtcttctcagatgccctgcttaaatcaggggcacttcaggctccacaggcgtcatgttggactgagacctaactcactggactcagaggaggaatcgtggaaaacaagagcaaaactaccccacacccctatttcatgtctgaaataaccctgtttcataccagttgcaaagcttgtggggagcggtcccacaaagcactttcttaaaccttgagaatctccaagagaaaaatatttggggaaggagggaggaaatatgtcccttgcacaccacccctgaagcacatggcagtaggaaacagcataggattgtatgtgggaggtggataggtcggtgatgtgtggagcggaaaagcaggttggtaaagttcccttcttgggacttattcctggagtcagtggatacaagtagtgcagaaggttcacactgcaaatagtgttctcatctcaaagcaaactatcattccagaaggaaaagtgtgtcagggcaagcagacaacacaatttcctatcagaatatgtccctcaacccccgaaacaaggcttctctcagcctccccaccagtgatggataacagctcctattctcagctgacctgactgagccaacccatgaactcttcactccttggggaagccacctcccatcacacccctgagcagagttagggaggaattctacttcccataaaaggacctctcctgagaggcaaaacctgttgcctccaccacggcttccctcttggctcattccaagcttggccaaattggggaagtgggatggaggttgccctgcatcccccctcctctgcctgagtgtgtctttgtaatgtcagctggcatcatacaaagagcaggagaagcaaacacccagaactcttttgctggtcagagattccctgagtgtctgtcctcacccaagcctgctctgtgtctgtgttgtgaagcttgagactctggaaagaaatggggagggggggcaggggaaatgttgccctaagaatgcttctcattcctctgttcttattgggtcctgtttttcgggagggtgggggttgggggaagcttgaccttgtgtcttcgtcaataaactcacatttacacaaaatgaagtttgtggtatgtatttttttccccagaactgacattctaggagaaaacacagcaggccagagagggacagaacattcataaccactctattaaaacttttctgactgccccagccctcccagggattcagccacatgaaattaagagtgacttgaggaagaatcatatacctcctgggggctccttttgaccaagacccaaagcaccactgcaactccaggcatctttgcaggcagggagtgctcagaggagtcaatctgtcttttcctggcagttcccctgctggggccccaggcaaatggtcccaggggcagtagccggagccacagggcctttttctgacttgtcagttggcatccagccagcagggcccagggcgagaggaatgcagcagagcttctcatcggtttattacccaggatgtctcaatcatctctcaacttacaaaagtctctcaaacccggcctcagggcc

SEQ ID NO: 10658 - DNA, 1176 bp, Homo sapiens
tattctctcccgttctaccatcaaaatcttaaccttgctttgtattcttctagtcttttttctttttctcatatttagaaaataaccgtttggaaaaaatacttactctagtttagtatttttcatgctgtgcctccagctttatgttatggtttaatagtatccctttggcttggggttgggaagatttagaaataagagtatattagatatgtaataagcttgaaaagacatcttgtggaaatagatccttgggaaaacacttagatggaaacaacatttagaactctgtgaaatggaatttactgaaaacttagaggtgctactgttttcctaagcactctacttgtgacagttaagtgtagattgagcccagggctcagcacattagagacttaaggaagaaatcatttcttcaatttttcctctgcagtggtggtgaccgcggtggcttcaaaaattttggtggtaagtgctgagtatcccaaaatgtttcagtggaaatgctatataaatctaaaagccaccaatatcccgcagatgtagtcaaaagtcctttcttactctgttgaggctggtgtgtgttgtgtgctttaaaaaaaattttatatatatatatatacacatatatatatcaaagtaaacattaaaaagccaaagttgatctcaaaacagtccaatgggttttctacacagtgaatttgcatgaaagagtctgtggtgaccaatgaatgacaccttcactggattttgacaatttgttcttataaaggtagctgacatggtgtttttaaattattagggttgtccaatcagcctttacaaccagagcttaacaaaagtgatactagcataatgctaaagtggcaggtgctgtctaggacaagttaaaggaaatgttgacattcatcttgatttcctaaactttaaataaaacataatttatatatttactttgtaaatctgtgatggttgactttcaaggattttggaagtattgacttttcatgccttggtttattactattttttttgttaatgattttaaataaattgccttaaatagctcttttttcttttcttttcccttaggtcacagggattatggacccagaacagatgctggtaaggtttatggtggtttgtcactttgccattaagaaaatgttagttttt

SEQ ID NO: 10659 - DNA, 1299 bp, Homo sapiens
tcttggaatcccttccattgtaaaaccattaatctgcaccatatacctatgctaggcactggcataagatgaagcacgttcttagagttcacatgctggtgattgtgccagacaatgagtaataaaataggtaacaatggctgtggaggaagtcagctgggttccagttatagtcgcatttcaggaaattatttaacagctgactttaacaacctaagcctcttctccatgtgtgcacacagggtagacctctgaagagtggcgctgtaatttctagggtaatggctgtgttaagtcaaggcaggatgacagttcaaacttctctcccagactgaattgcccacctcccaaaacccctcctacagaaaatttggagtcttcacttattccctggcagcccctacctaatagagtggtgaattatcaaacatgcaacaaaggatatggaaagtttagcaaaaacggcaacattttggaatgaatgaccgtaatgtgcgttctgcctgccaccctaactagcgcacattttgcaggtcccttgctctccctggaagcagtatggccaagaggaggaagggtatctctcggatttcagcttggaggaggaagagttcaggctgccagaacttgactagcatttctgaatatcccaaggcgaggtcatgtaacttccttgggaagctctgtcgtgcccctaccccacgccgccccaccactataggctgctggagtcctggaaccacctgggtcggccgcccaaatctttcctggcgaaggggagggaaggggtgttctggtggagtgggaagggaggcttgggtaggattgtgggataagatcgccctggtgacgaggagcggatctcgaacggaacttaataaaggttgcctagataaagatatggtaaataacggacgaggcggggccgcggttgctaagggcgcgggcatctggtggctgccataatggcttctgctcagtgcgggacgccaacttctgtcatgtaccggctgcgtctctggtccctatggcccctcctcacgtgacaactactgtgactactagtccaggaggctcagcctctggagtgggtccagggcccactccagctgacctccgaccccctgaggccaactgagccctgggcttggcgctcctccgatctccccccggaacctccctatgcgtttatccacccccacccccatacagacccgggagctttgataacctgaggtcctctactgccacccagatgtcagcctcgcctcaggaaccgactgagactttggttccatt

SEQ ID NO: 10660 - DNA, 1153 bp, Homo sapiens
ctttatctcacaagatgaaatacagtcatttatggctaataaccagtctttctacagcaatagagaacaataccgacagcatctgaaggagaaatttaataaatactgccggttaaatgatcacaagaggcccatttgtagtggctggttgacaacggctggagcaaattaaataaataaaatagctctgtctttcaatgaaacactcacgatgactactgcgccttctctttcgaaaaactcttaatttagtgacttatggcaaaattttatcttaaatcaatgtgattctttcttgttttgggagacggtggaggtatcctcattagttctttcttcaggcttgtgtctttagttgcgtggctgcgcaggcctgccatatgatttaagccatctcttttcattaaatgtttctcttcctgtgagacttactaaagcaacttagtggcaaaaagtaatgttgtacttataattctgtacagaaatgacaatgagctgaatatatggttttacaaagtagacatccacttgcaaaatgtttggatgtaatgttaaagcgcaatgtgcaaaatttaaaataaagaatatttattaatacgcacagtaaaatttgctgtacatgtttctacttaatatgtggcagtactttagtatttgccacttgtggacttgatgcttggccagtgttgatgttagaaaggatgaaggacagagatacagattgttgaagacaaaaatcttcctttgatgagaattgacaactgagaaaagcagttttccagtctttttcttttgaggagatactttaaatacttgctaccatcttactttcccatgagactttaattgctattattaaaggttccctaatacataatacaaagtacttcttaaattcagaggttcatattgacctagaagaataaaaacaaaacttggcagaatttcaaccaagggttgcccgataagtaattgctcaacatgtaagactgggctcagaaggctgcactgagagctaaccacattgtgggctgtttaaatgcatgtgaggttcagccttatctggtatccagtaacaaagtcactgtggtcttacagtttactcctgtcacagctgtgagtactaaaggagagagttccccccaggagtagc

SEQ ID NO: 10661 - DNA, 1187 bp, Homo sapiens
acacgacaggctcagagtcacttaggaagagaatcagcggcccgggataggaagtgactgttggggtcctgctggctggtgatgggctagtgagaagttctgggaaaaatcaccagcgccgggatgtggggagggaggcaacaagactgaattggttgaccaggaaggccaacccatctccttaaagggcccttcactggtgcgtgggtgaatgcggtccccggcctcctgggacctcgaggaacacaggacgcagccggtagtacggccagctcagctcgccgctcctctagccttgagggaggcgctgtgggggacagcctggcagccacgcatgcgcaaaacaccgtcaggaaggggccggggaggggcgggctcccgaacccggaagcgagggacccacgtgggagcctgggagcgggtggtcgtagctcggtagtccagttgtgggtaatcggggctgtttgttcctgtccgagagagctcggcggagacggctgtcgagtacccttcacctcggtgttgggagcctgggagcgaactgcggcgcgggttaccgctcccggggacgcagcaaggggcatcgagtccctggcgggagctgcgccatggcattgctctcgaccgtccggggcgcgacctggggtcgcctcgtcacccgtcatttctcccatgcagcgcggcatggggagcggcctggtggggaggagctaagccgcttgctgctggatgacctggtgccgacctctcggctggagcttctgtttggcatgaccccgtgtctcctggctctgcaggccgcccgccgctctgtggcccggctcctgctccaggcgggtaaagctgggctgcaggggaagcgggccgagctgctccggatggccgaggcgcgggacattccagttctgcggcccagacggcagaaactggacacaatgtgccgctaccaggtccaccagggtgtctgcatggaggtgagcccgctgcggccccggccttggagagaggccggggaggcgagcccaggcgacgacccccagcagttgtggctcgtcctcgatgggatccaggatccccggaattttggggctgtgctgcgttccgcacacttcctcggagtggataaggtcatcaccagccggagaaacaggcacggacgtccctcattctctatgtgccccaacttg

SEQ ID NO: 10662 - DNA, 1472 bp, Homo sapiens
acaggtggtgaagcctgagttggcagaggaggagccagaagagaactgccctttctgcactggtggaaactagttatttatgccatgtggagagccagtgagatagatagatagtctgtttgttttgaggacttggaaagttgttcctatgaagcctggagcttggatggttttgagaggttaatggtgcctccacactcactcttccctagttccaggattactgtcctagcagctaacggttctactctcttccccagagtgtagacaggcagcaggtctccccacagctctgaaaggaccctggtgacagctacaccctcagcaccaggagctggccttcctgatgagggaggcttccaggaaacacagaatccacatgaccttaagattatttacaactcagtcatggtgctgctgtcctccaggcttactggcccctcctgactggcatcaggggcttcctcaggtggtggagagagtttactttcaacaactagtttattcaagaaaagaacttactgattcctctgttcctaaagcaagagtggcaggtgatcagggctggtgtagcatccggttcctttagtgcagctaactgcatttgtcactgatgaccaaggaggaaatcactaagacatttgagaagcagtggtatgaacgttcttggacaagccacagttctgagccttaaccctgtagtttgcacacaagaacgagctccacctccccttcttcaggaggaatctgtgcggatagattggctggacttttcaatggttctgggttgcaggtgggcactgtatggctgggtatggagcggacagcccccaggagtcagagcctcagcccggctgccctggtggaaggtacaggtgttcagcaccttcagaaaagggcataaagtggtgggggacaattctcagtccaggaaaatgcattgaccattgctggctatttgcttacctagtaagaattggattcatttttgaccagattattcttctatgcttttttgcaataaatcaaatcccacatatctacaagtggtatgaagtcctgcaccccccaggaggcctgtccaggcatgtcttcagaggcagggtgggttacactcatttacctcccctctccccaccaaattatgacacaaacgagtatgtttcctctctagaaccctgtaatgcctcctcccccatccccagagctccttactgtaggtcttaccctggacaaggattttttcaagttggaggcacagaacatgagcaatctgacattcccacagcccctcaaacatgcaaggctactaaggcaggaggagtataaatgatggatattgaccaagacctgcttggacggagaccgccatattatctgttctcttcgttcacaaaacagccttcacttgtctcagaatttgatggacacatactgtgatgagcaggagcttcagatgcactctttacaca

SEQ ID NO: 10663 - DNA, 1151 bp, Homo sapiens
tctgtttagaaatgcctcgtgcttcaccattcctgtggtcatcatgacagcagctttaaaatttcatcttatttagccaatatattctaattttaactcttgttccatagatacaagcaatggctctcatgtcaaacttgaaaaaaaataaatagaaatccagcactccccctctctgaccagagaaatttaaatgtattctgcatcttcattggtccctttttatttacattgaaaatctaagctcggattattgtattggtagtaaatgtatgatttttttccctataacttagtaaaataagaattagtaggaagtaggaatagggagtgagcctggtaagtttgatgagagctaatgtgcattcagccagtgggtggaatttttgtgggctgaaggatttttaaagatgacttgcaagtccttcactcctagctcattctggttgagttagttgtaggaattagtacagtaggactactcctagagtccctcaccccatggtcctgagcatttgccttgctgctgcatgcctgtctttttggggactgtagtgccttttcactcctagagttttctttttgtctctttgtggaattgggattcttggtaagttaattacatcattttttcatggaggaaaaaaacatacatcttcatgctattttttatttcttcagaatgaagggaaactatctaccatacacctctgattaacaagagtgccactcattcagttatatgcctagctggttaactctaaagcgtatcacattttttagaatagccactttaaaaaatatgtaattatagggagagttcattgcctttgctaccctagaatagctagatggtagggaaacgagaaagatgcagttgagagggaaaaatatatatgttagtacaatgtaatacttcaacttcccccaagtgacaggtttcagctaagaaatgatacaatctatggcagcttgctaattttttttgtcagtcaaaagaaggaagaaagactatttagatgttttttttaatttaatgaaaggattgttaaatctcatttggataaagccaagactttctgtcagaaaagggtaatgatgaggagggtaggagaatctgtcagtttggacctagaatggggtggaatttg

SEQ ID NO: 10664 - DNA, 1321 bp, Homo sapiens
gaccctgtctcaaataaataaataataaaataaaagttatagcctctcaatatatagtgtttgaagccagatgagcattatgtagtttaaatattatttcaaacaaccattactctatccagacccttaccatttattcccccattactaacaaccaaaatatcaatatcacaacaagcagctttttcctactgcaaaggtttccccattgatcataattatttcctggacaccaccaaatgaaaatgagattaggaatgccttataggcttttgagaaaaatttctttgaggaaaagggaactggttttaatttatgggcatagttatcatgatctcaattttcctcccttgtagaaattaaaggccctgaaatagaatagccaaggaagttagttctcaaattgccttgcttccacgtctcagctatggtttattagatataacctctggctgacctcagatatagattattattcataacctgcctttctcacttttcattttctccatagctgtaagagctcattttggaggaataatggatgaaccatctcccttggcccaacctctggagctgaaccagcactctcgattcataataggttctgtgtctgaagataactcagaggatgagatcagcaacctggtgaagttggacctactggaggagaaggagggctccttgtcacctgcttctgttggctcagatacactctctgatttggggatctctagcctacaggatggcttggccttgcacataaggtaagagagagttcaatggtctacttatttaatctgtcttgttagttttgctgattatgttctgaaaagagcaaggatgatttcagctaagactgctttgccttttcctatgtcactgaactcaaagctttgttgaggaagtcagaaatgatgtatttttcagaaatcatgtatgttcccatcaaatttttcatgtcctactaggttttttttgtttttgtttttgttttttgagacggagtcttgctttgttgcccaagctggagtgcagtggtgcggtctcagctcactgcaacctccgcctcctgggttcaagcaattcttctgcctcagcctcccaagtagctgggattacaggcgcctgccaccatgcccagctaattttttgtgtttttagtagagatggagtttcaccatgttggccaggctggtcttgaactcctgaccttgtgatccgcccacctcagctttccaaaatgctgggattagaggtgtgagctaccccgcccagcctattttttttttttttttttgagatagagtctcactctgtc

SEQ ID NO: 10665 - DNA, 1206 bp, Homo sapiens
catatgaggttatgaataatgttcttccattttactaattgtaaaaaaaaaaaaatgctgaaaactcagggatccttacatttcccatgacacatttatgttttattttctctgtagtaatggaacggcggtatcccaaggaggtccaggacctgtatgaaacaatgaggcgatttgcaagaattgtggggccagtggaacatgacaaattcattgaaagccatgcatgtaggtggtttttgagccttgagcagtatttgtgtgtgtatatttatataaataggagagataatggtgtgttttatgtgaagttctataaataaataaatggatatttctctctttgttcccctttattaccatgagacaaatttgggactatgggggtggcagaagagaggttaaaaagccctaatgacttcccccattgccccagataaacaataatttagtagtttttctccctactttgtatcatgggaactttcaaatatatatagaagtagagataataatatgatgaactcccgtgtatccatcatccagcttcagcagttttcaacacatggccagtctggtttcatctttaccactcactcttccctcctgccctcaactggattattctgaagcaaatcccagacatcattttattttgttcataaatattttagtattaaaagtagttttaaaaatgaggacagagatggatagcttgtggagatagtacttccatcgatctcttgcctttctgtggtatttctgtgagagctctacatagttaccatttgatttttcactataaaaaattaaaagttgttatgaggccgggcgtggtggctcacacctgtaatcccagcactttgggaggccaaggcaagaggattgcttgagtcgaggagttcgagaccaatctgggcaacatagtaaaactccatctctacaaaaatacaaaagttagccaggcatggtagtgcacacctgtagtctcagctactttggaggctgaggtgggaggattgcttgaacccgggtagccgaggttgcggtgagctgagatcacaccactgcactccagcctgagcgacagagtgagaccctgtttcaaaacaaaatatgttggtatggcagtaaggcctagattgttaaaataatatggactctggcttgttctgtacctttcatcatgacatttgtgtatgtggc

SEQ ID NO: 10666 - DNA, 1396 bp, Homo sapiens
gttcttaaggcaactatgtattggaagcctggcatctttgattgtagcctagcctctggtgacttttgtgaggaaccaaatggttttatctccctttttgaggatttggaataatcccttatgccttttgttgatgtaacagagaagcctgttttccaccagtggagcttgtaacagtccctcccctttctctgccccacttgaaaagcaacctctataaaacttcgacattttctttgcttaactcagtctatccattcccagctgaataccaatccctaatacacattcaaaacaaaaccaaaaaagttttgctcatcaagcttcccctcctggccagtgacctcctacttgggtttctttctcaggtgtgtgagttgacctcagcccctgctttgccatataatggctcattgttcctgtttgtggatcttgcaggtaaacagggctactttggaaggaacagatattccctcacataataaaaaagaagggccttttgctggcctaacagtctttctttgatctgaaggcacacagtacttggttaattaccatgtttgccttgtactgctggccgagtggcaaggattagggaatgtctgttctgcagttattatttccattcgtcagctgtcaaagcaggcattgtgtgatgtttcttaactggatgacatctgggcatcagattttagagtctcctacatggttaggaagaaataggtgatagtcgggcatggtggcatatgcctgtcttcccaggtagttgggaggctgaggcaggaggatcacttgagccagggagattgaggctatagtgagctatgatcgcaacactgcactccagcctgagcaacagagtgagaccctgtctcaaaaataataataataaataagagataactactgtggtgagtagttacatttgatgctaaggtatgtgtgactgtatgtgtattttagcagattatgggtaattcatgtgccctgaatatgtaattcattttcaagtgaatgttcgggtgcccatgttgttagctaaacaggcctgagggaatgggacaggatttcctaagctggatatagtgatcctatacctaactggcctggctgcactgaactttttaatactttacacctgagaaattgtcactcctattaaatctatgctgtttcctttctctgtctataggtagacggagtgcaccacccttgaacctcactggcctccctggcacagagaagctgaatgaaaaagaaaaggaggtaacaaaagggagggggctgggagaaagagaataggggctgattattcattgagttgtcattaaaaatccattacagggtcaaaccccttttgtttcattcatctaacatatatgcacagctctggtga

SEQ ID NO: 10667 - DNA, 2243 bp, Homo sapiens
tgtgccccatggctcttccctgaccattggtgctgggactgtacctgggcatttagtgtttgactcctgaaagagccaggctgctcctcaggagcacatagttgtaaatccctaacaaacccaggcccctgagccagctggcatgtgctaaaggctcttctagtatcacaccctggctttctcttcctgggtgtgtgtccttagggagtgttctctccagagaggaagagactaaatggaatgtagtccagccacccatcagctcctataaatagttggaggttgatgtcactttaaaaaattttttgctatacctgctggattaaattacaaaaatgacagatgttaatgtttattaaatttgccgtgtcttgcagctctgtcagatggtgaggttggtccctggagcctatttagaatacaaatctgctctattgaacgaatgtaacaagcaaggaggcttaagactggcgcaggcaagagcactcatcaagatagatgtgaacaaaacccggaaaatctatgatttcctcatcagagaaggatacatcactaaaggctaaggctccaagagcttgggatcagaagtcagaagtttggaatgtggtgggtcaaaggacaatatgggtgggcattctggagagttgtttttcagctgaattctcatggtgaaaacaggggaaaggacaaaggaaaccttaagttgtattgtctactttcttctccatcctgctttaaaacactcctgttgttggtattatgctgcagagttgtgtgctacataagctattattaaatgtgagtgggcattcattcctaacacctcttgtaactaaaagaaccatagtacctcacatcacagtgctggtagaaatggaactaaaccacagtctgtaatcccaggagtccagctcagatccttatattgcgaggtaagtttgctgattatctgtcttgccttcaaacactgcagacagatttaaaataaagagaaaggttttagagcataagaaagctctcgttgaaggattttttaagctgacaactttttttttttttttttgagacagagtttgctcttgtcctccaggctggagtgtgatggcaagatctcagctcactacaacctctgcctcccaggttcaagtgattctcctgcctcagcctcccgaatagctgggactacaggtgtccaccaccacacctggctaattttgtatttttagtagagacagggttttgtcatgttggccaggctggtcacaaactcctgacctcaggtgatctgcccgcctcagcctcccaaagtactaggattacaggcgtgagccatcgcgcccggcctaagctgacaacttttatgagtaaaggggaagaaaatatccttatgatggtcttatcccaaactgcatctttaacttcggccgggcaaggtggctcacctgtaatcccagcactttgggaggctaaggtgggcggatcacgaagtcaggagttcaagaccagcctgaccaacatggtgaaacagtctctactaaaaatacaaaaattagctgagtgtggtggcacacgcctgtaatcccagctactcaggaggctgaggcaggagaattgcttgaacacaggaggcagaggttgcagcgagctgagatcacgccactgtgctccagcctgggcaacaaagtgagactctgtctcaaaaaaaaaaaaacaaaaaaaaacctttaatgtctggctttgtactttgcagtctgcctgtctaatctgcagtagtcttttgaggaggtggcaccggatataacatgtctctgttatttttagaattaattaaaatgttttgctatttaatttgtgggtgtgtcaaatattctggtaactgaaacacacttaaggtgttggatgcctgccccatcacgctgcactgtctgctgtcacatgtgtcctgaactcaccctgtttttgccctgggtttcccaggataccaagcccctgaggatggagatgatgcaacaaacctcagctttgcttggattgtgacttgaaccctatttctcaatggtgaaaggctagcctgcaataaaagctgcttttaaaacagaagtaaagcagctttatatatgggactcactagatatgagggtaagtagccccaccacatgtaaaacttggtcctcaaacgtttctgcagaataagaagccaaacttatggttatcttgtttctgttagaaacaaagttgtatat

SEQ ID NO: 10668 - DNA, 1267 bp, Homo sapiens
agcctcgtgagtagctgggattacaggcgtgcaccaccacgcccagctaattttgtatttttagtagaggcaaggtttctccatgttggccaggcttgaactccggacctcaggcgatccgcccgcctcagcctcccaaagtaccgggattacaggcgtgagccactgcgcctggcctaaatttcataacagaaccatgacagcagaatctacctttgcaataagaatgtttcccaggagttagagaccagccctgggcatgatggtaaagaccccagctaattatacaaaaaataattagccgggtaggtggagtgcatctgtggacattcgtggtcccagctactaggtaagctgaggcgggagatcacaagtccaggagtttgaggctgcacgtgacagcgtaggtgatgacagagcgagacactgtctcttaaaaaaaaaaaaaaaaaagtttcccagtttgaatttgtattgctgaagcatttttttgaaatgctatatagatgcctgtcatgtcacagtggcccagtatcaacattttaaaaagctcacttggtagctgggctggtttctattcctgagaaattccagaatgcctcagataaaattccttagtataatccccattttccttaccaaggatggtaggcttagtcactccttgggaggtgccacaggaaaattcagcagatgtcaacagaaaaaaagcctttgctatgaaaagtattcactacctttcatatctcttgaatacttgaaatgtttaattagatgccaccaatagggatccaaggagtgtgggacacggttgcgctgcttttctttataaacgtttattaaaatggctcaacgctgcattcagcttcacctcagctcttcttgtcagccaggagccccgtgtccttggaaactgtagccaaggttacttatttccatactgtgcattgtgtcagcccgcttcaccccactgcttgaatggccattaataagcacttttctttttttggtgggatgttttgcctttaaaatttttatggcttagtgtgtaatttaatttttgtctggacatgcttgagatagaagaggtactggatatatgaggatattttccatgctttatttttcctgtggctactagttagcattccataggggttgtgaatttttaattatttgaatattttgtgtacatatacatatttgaagggttttgggggggtcttatttgtttaaaggtgtcttctgtttgcctatttcaagtgta

SEQ ID NO: 10669 - DNA, 1175 bp, Homo sapiens
ggaaagtaaatatacgtagaattttttattcaatttttcttactttgctctttacaggaaaaaggtcactggtcagaacagcaagaagaaagtagctcttgaagacaaaagttaaaaacagactttaaaaatactgtcccagaaatgtaattttatgatcccagcatgaatgttattttcatggaatacttgaagtcttacagtcacctgtaccaaacatttgaaatcaactacaagtacatgggactggtgataaatgatcctaaactatcaagtcagtttcaatttgtaggtgccttttttttttcctgtagagatgagggtcttgccatgttgtccaggctggtcttgaactcctgacctcacacaatcctcctgccttagcctcctgagtaactgagattacaggcacaagctgctgcacccagctctgtaggtgacttttaaatgattatacaatggaaataacattcattgacatttctgtggtttgaatccagagagatacttcttatagaaaaacaaatgtttatgctaaaaataacaccaaaatgtggtgaactcttaaggacttttcccttcaagtgtgaaggaaggtgtgatgaatgctgtggagaggcatctggaacagaaattcaaaataaagccttgacattaaataccccttccactgctcactttgtggatggtagcatgagctgtctaccaagaagaaacctgctgctctcttaattttaatatttcctaatttgttgatggccttttgtgttgtgaaccacaacaaagagaggcctcttttgtggctggttattccagttccctgggattttaaattctttggtctattaagtatccttgtattggatacgtaataccttagtgctgtcataatgttgtacaagatcatgatcagcttctccctttcttcattttctgtgatttaaccatgttctttcctgtctctttccatttaagatattttatttgaatactgataaacattttatcctgataaggaagaatgttcttgttacttgatatacctctgtcttcattctcttacagcttatctttccttaggttgatggtgcctcatttaataagtagatctctacttaagctaaaggattatgatcatatggtgttggagactattagctattagatttttctca

SEQ ID NO: 10670 - DNA, 1204 bp, Homo sapiens
agtgagctacgatggtgcccctgccactccagcctgggcaacagaatgagaccctgtctgggtttgggggagaagttatttacaatgttttgaaaatatcctttggcccaggcatggtggctcacacctgtaatcccagcactttgggaggccgaggcaggtggatcacttgaggtcagaagtttgagaccagcctggccaacatggcaaaaccccatctctactaaaaatacaaaaattagccaggcatagtgatacatgcctgtaatcccagctactggtgaacactccagcctggtgacaaaacaagactttgtctcaaaaaaaaaaaaaaaaaaaaaaaaaagaaaggaaaagaaaatgaccctcagatataattctaatatcaccagttggcctttcttgacatctcttttagtcttctctctttttcagaaatgtgagttctttgccaaatgttttgaactgaattttaggtcattaaattgtgagttttggaatatagtggaagggacatgtgagtgttttagattagtagaatgacaatcatttcaatttctttaagtattttcatcttctgtttttaggaatggtggactcatctttggttaaatgaaggttttgcatcctggattgaatatctgtgtgtagaccactgcttcccagagtatgatatttggactcagtttgtttctgctgattacacccgtgcccaggagcttgacgccttagataacagccatcctattgaagtgagccatactttctaaccattagcctatgactgctctcgtttacaatgaaatacgtaatttgttacatagatactttggactttgaaaagaagagaaaatagcatgggtgattttactggttcatatttctagtcttgaaaagctagtaagtctaagttctaattaaacatttcttttaaaggtaggcagtaaaaaaaaattggtctggccaggcgcagtggcttacgcctgtaatcctagcattttgggaggctgaggcgggtggatcacctgaggtcgggagtttgagaccagcctgaccaacatggagaaaccccgtctttactaaaaatacaaaattagctgggcacggtggcgcatgcctgtaatcccagctactcgggaggctgaggcaggagaatcacttgaacctgggaggcagaggttgcggtgagccgagatcgtgccat

SEQ ID NO: 10671 - DNA, 2399 bp, Homo sapiens
cctgaccaggcccgtccctccttcgccagtgctgtgcagagctcatttaaatgtattcctttctaggtctgggcgcggtggctcacgcctgtaatcccagcactttgggaggctgaggtgggtggatcatgaggtcgggagttcaagaccagcttggccaaacagtgaaaccctatctctactaaaatacaaaaattagctgggcatggtggcatgcgcctgtagtcccagctacttgggaggctgagacaggagaattgcttgaacccaggaggcggaggttgcactgagccgagattgcgccactgccctctagcctagacgacagagtgagactccatctcaaaaaaaataaataatttctttctggttgtattttcaagtcacaaattggaaaaggcttacatctagggacccactgttgattcctaagttgtgggtgggtgatatcagtggcctcagtgcctgcataaccctcacctgtttatgactgatctactgtaaccttcctcaggttgagagtgagctgctgtgagccagtgacaactactgctacaacttgctgttacttgaaattcgtgtgctatgttggtagcacaggagtaggcgggcgggggttttggtgtgggcactaggtaagtgggtggcaaccggctctttgggaccattggtgctgacctttgcctggtcacctgcctgtgcctaggccaagtgaatgttacatcttggaacctgagccatggaggtggcgccacctccctgaggagaaaggtgtggccaaaggaaactcctgcatggctcctgctccttccccttccctacatttcacttgggctaatgatgtaagccccccttgaggttggggatggtgtggagatagctgcagacacccctgtaacagacatccaggaagaattagggagtgggggtaattatagttcctaggtctaggggtgagaggtgggagtagaaccagaagtgccctggaatccagccgtgtcagccctcaccccagggcccccaggaaagcatggcctgcttgaagccctctgctccctgcagaaactggggcgaggaggagctttttccttcagttagatctttcccttccctgctgcctcgctcccttagctttggagccctaaagttagtggacaagacactgggataaagctctatggctgctggaaggaggtctgagtctgtgtgtgtgcatatgcatgcatgtgtgtgtgtgtgtgtgtcctcatttgcagaagtcttgctaccagttagggtgttaagagcatctccactgggcggagacctggcatttgttttccactgttaagagaatgacacaccccctgtcatgtaagggaggagctattgagttagacattttccctatgggaatcctcggtttggtttgtgggaaaggagggaatggataagtgatttttatctctaatcgtcaacacagctgttcttccactgaatttgtgctattgcatacatgtagccatctttcttttcactgcagcagtgtttatcagtagttcaaaatgatttatttgctcctggggagtaaaaccttttttattaaaaaaagaaaaagaaaaaaaaaagaaagaaaagtgtgcccccctcctatgctgcgatagctataaaatgattgggtcacaaaggtcaagtctgcacgtccctgtggtagaccctgctttcacattggagccttcacactcagcacaaaatgattggaggccttgataaaatggagagcaaagtcttgggagcagtgaaatgggggttggatcatagagacaggcgctggggactcgggtactgcagttaggaaagtagcgttatgagttgtactgaaaatgttgattctctaatctgccagaaaaggacctgtcttttcatgcagatttcatattgtctttgtccttttcattgcttcttgaccttcctggcaggtgtcgctcagtttcttcctgtttcccttcctgtcctctccacacctgctatcccgtcccactcccatctacctcccgggaagccagccctgcatgctgagtttgtgacctgcttcattcccatttcatttctagagggtttagaggtgacctggaaccgttccctttccctctcctaccccctcctctgcaacaccaagaggcctggaggggcagacagaaagcagccagccacggcgggaagacatgcatgtttggttgcagctggactgcgatcgtagttcctcctggagatagagtgtgaggaacttaggacactcttcctcagactctgggatcatcacataccacactgccccgctcagagtttcgtcctgagctccctaaccagctcaggtggagcagaagcctgctctcactcctccatctctggtgctccct

SEQ ID NO: 10672 - DNA, 1909 bp, Homo sapiens
aggtgggcaaactccttctcacccctgtggctcaggagccagctccccattcccggggatggagggacagctgggctctgccagcctctgccccacccagacacacccctagccggctttcttctctcatctgccaccttgactggtctcggtggggttttccggctccacccgaggagctttgggcattggtggacataagggggcaggcaggcggtggaggccaggactgggggaggaccccaggaaacagatgctggaatgtttgtggctagggcagtccttgtcacagtcttagcgaaatcccacttttgctggagtttgcctgcgtctcaaaggcttcttgcttcttctttgttctctccctggacctgcccttccacccccacccacttatgcctctccctcgttccccccaccgcttggtcctctcccttcatttccctcctgggctccttgacctcctcgggctgccgttcccctaccctgtgggacttgtctggccctgcttacctgtctctgtgtctctggccaggcctactcccaggatgcctacctgaaagggaacgagccgtattctggagaggcccgcagcatcccagagccaccgccgatctgctacccccgcaagacctacgcccctcctgcccgggcctccaccagggccactatggtgcctgagcccacctcagcactgcccagtgacccccggagtcctgctgcctggagtgacccggggctccgtgtgccacctgctgcccgtgcccacctggacaactcttccttggggatgagccagccccgccccagccctggtgccttcccccacctctcctcggagccccggacgccccgtgccttcccagagcctggcagccgggtgccccccagcagactggagtgccagcaggccttgtcacactggctgtcaaaccaggtaccccgccgggcgggggagagacggtgcccagccatggccccccgggcccgcagcgcctcccaggaccggttggaggaggtggctgccccccgcccgtggccctgctccacctcccaggatgctttgagccagctgggccaggagggctggcaccgagctcgctcagatgactacttgagccgggccacccgttctgccgaggcactggggccaggggcactggtgtcaccccgctttgagcggtgtggctgggcttcccagcgttcgtctgcccgcacccccgcctgcccaactcgggacctgccagggccccaggccccacccccgtctggcctgcagggcctggatgacctcgggtacatcggctaccggagctacagcccatcattccagcgccggaccggcctcctccatgcgctctccttccgggactcaccctttggggggctgcctaccttcaacctggcccagtcccctgcgtcattcccaccagaggcctccgagccacccagggttgtacggccggaacccagcacccgggccctggagcctcctgcggaggatcgcggcgatgaggtggtcctgaggcagaagcccccgacgggccgcaaggttcagctgacccccgcaagacagatgaaccttggatttggtgacgagtccccagagccagaggccagtgggcgaggggaacgcctgggcaggaaggtggcccctttggccaccaccgaagactctctggcttccatcccctttattggtgagtgatggtacatgtggctgtcctggaggacttagctgtcggctgtctgtgtcctgctgtaccccatctgcctgtctgccatgggcagaattcggctgggtgctggtgggatcatcttgtttctctgtcaattcattcatctgttcatccatccatccatctgttcttccatctttctttctgttctctgtcatcctttcttccat

SEQ ID NO: 10673 - DNA, 1235 bp, Homo sapiens
cttctgagcctttctgtggctgcacttggggacccttgtggaccatggggtgtggctagggaacccctaagtttcagactaaaggaaagatcctgggtgatgctggctttttgcttctttcttctgccctcccacctcagcttgtaagcggggatgtgtgtatgtctggggagaggaggtgtagggtgcgtatgtccatggggggaggggcttgtgtgtgcagtcattgtcccaaggtgtttccagtagcgacttctgtccccctatccccaccctggtccccactttgcgcccccgggctccctgcctttggtgcacacaggatcctgcccgccccccttgccagagccagagaagggggttggggccattccaaggaggcaggactgaaaccctcaccagggttactccccaacatccttttgcctgagtcaccctctaagcgctttaaccacgggcagctgcctgttccccagacagtttttggtggggggggtccagggtcccccttgctggtacctccctcacccctctttttgtttttccatctgtgcctgttccttccacagcccaggcacacagaagcccaccttcttccccttaggaggagggatagtcaacacccctgctgtctctctgtcactcacacactgatttatggggtctgagctgggctgttcctgcaggatggacaggacccagcgccctcttctccccacaggctgtaaatagacttccaatcaccaggccagcccccacacaccctcactcattccagggaagcccaggtaggtggtgaacccgctgccacgtctatcagtcctcttgttttatgcaaagatttactgtaaagtagatttctttccctccctcccccattcttttattgtaaatattgtctctaaatgtgtaacatattataaagaatttataaggatttttaaagatgttttgctcatttacaaaagtgttgtaacagtgttggacaaagccttccaccccatgtccgcatggctcctttcactgtgtccttgacacacctctctggcaacaactaaaatttcctgcttctgaaaagtcctgtcttaaaagtacagtctatatcttggaaataaatagctttcctcaaggcatgagtcagctgtctcacttgttttggagggaaagggccagagtggggctgggagacaggagaggtacctggcccagggaaggagggcgatggggactggacc

SEQ ID NO: 10674 - DNA, 1167 bp, Homo sapiens
agcgtgagaggagctttgtgtgtgagaacatgtgtaatgtgtgtgcagacatgccgagagccagagacttgtgtgtgggccacgtacatgtggatagagacgcatacatggaggtgcatgtaatctgtgtctccgagtgtgtgtgtgcaggtatgtgtgctggtgcagacccaagtgtgtgggtgtgcctctgtgtgcgtgtgttccatcatccctgcaccactggctccagatcccttcctgagcccccgtccccgctggccctctcacagcctgcagcacatcagtgcccccagctgcatgcgcctcgctgctctgtccatcagtgtgtgcttgaccaagagaaaactaagacgtctcgggggacccctgtacctggtcctctcagcccccgcccactgtgctgtgttactcgcatgggggatttcctgccccttccacaatatgctgtttccccaggagcctcaggcctgaggctctgagtggggtccccagggggccccccggggtgagccccggctccacaccctgccccatccaccctgtagggcccatgttggtgtagcagtgatggcttctgtggatattctgtgacctctgtcggtgtaacttgacaatttctaaatggaaaagggttgctgtgttttctctgtctctcttttttaatgtccttttttcttctcccccgctccctgctctctttccttttcagtttttctagccaagtgtttggggctttaataaaacttgtttctttttcctctcctggatctccttcctataggctgatgtctcattatttctctgcttcaccctggaggatctggaaggtgctgggatgggtggggtggcaggtggggaatccctggcagccactggccttcagctggcagagcatgagggggaggacagaacagggcccctgggattagccaggtggggtggtgtacaccagtaatcccagctactcgggtggctgaggcatgagaatcgcttgaacccaggaggtggaggttgcagtgagccaagatcgcaccactgcgctccagcctggatgacagagcgagaacctgtctcaaaaaacaaaaacaaaacaaaaaaaaccagttctcagcttggcattccaggaggtgtcctgcctaaccctcacaaccatcggtgaggtag

SEQ ID NO: 10675 - DNA, 1195 bp, Homo sapiens
gcagttgtcatctggaaccagggccagctttggagaagacagcataggggctgaggggttagggaagagcccctgtcccacctgccactttcccctccattccgggcctgtccactcgggattttgctaacttgcctccagatattctaagccctctctcaggagccggagccaccccttccccttctacttcccacccctcacggtagctgagctgagggttacccctctggtgcctcttcatcggccaccttttcctccatgctaggaaccctgatgggaaagggaccctagacgcagcaggatggagggagggcagagagcagaagggacttcctaagcgtcagggaggagatgctggctcctcaagcaagggacaggggtgaccttggtgaccagccccgtggggttccgggctgtcttctgcgcagagagagatggtgtacgcatcgcgggagtcctcgcccacgcggcgcctcaacaacctgtcaccagcgccgcacctggcatccggctcgccgccgcccgggctgccgtcggggctgccgtccgggctgcagtccggttcgccgtcgcgttcgcgcctatcgtacgccggggggcgcccgccttcgtacgccggcagcccggtgcaccacgcggccgagaggctgggaggcgccccggccgcccagggcgtcagccccagccccagcgccatcctggagcggcgcgacgtgaagccggacgaggacctggcgagcaaggcgggcggcatggtgctggtgaaaggcgagggcctctatgctgacccctacgggctgctgcacgagggccgtctgagcctggccgcggccgccggcgacccgttcgcctacccgggcgccggcggcctctacaagcgcggctcggtgcgctcgctcagcacctactcggccgccgcgctgcagtccgatctggaggactccctgtacaaggcggcgggcggcggcggcccgctgtacggcgacggctacggcttccgcctgccgccttcgtcaccgcagaagctggccgacgtggcagcaccccccggaggtcccccgccaccgcacagcccctactcggggccgcccagccgcggctcgccagtgcgccagtccttccgcaaggactcgggctcctcgtccgtctttgccgagagtcctggagggaagacccgcagcgcggggagcgc

SEQ ID NO: 10676 - DNA, 3497 bp, Homo sapiens
ctagaatccctgctgtgcaaagcttgtaaacaaccattgcctcatttcatctttcccctaaacattatttctgagattcatctacgttgattcacatagctcttttagtcccaagagggcagatatgaaccgtcccattttacagatgcaaaaccgtgactgctcgggaaaaaacgagtggctttgcgacgacgaaatcccaggacgccaccgggccacgtgcggcggcgcatctggccgctcgcgatcccacccgcgcacgctccctcccgcgctccctcccagccgccgccgcgccgggtccacgtgtgtgtgtctgtgtgcggaatggggacgggggcggtgccgccggaggggtggggtccgggctaacgtcacgggcggtgcggcccaatcagcggcgggctcgcggccccggcgctggtattggggcagcgagggggcagttctctataacgcggtctccgggagccagcggggaagaaagaaaccgagcgggcggaaggcgccctccccgccgcctgggcccgggcaccgggtgccgggcccggggtccttcccgcctcccgcggccgccggccgctttgtttcccctgcctctgcgcttcgggcgactcgagagggtctcccgccggggttgcgaaggggacgcggcggcagaagggcggccgaccccgccgggactcacagggacccaggagtccggccgccgggagggccgcgtgaggagagcgaagagggagcccgagctctgcggccccgggtggcgggccgggggcgcccgtgagcagagacctccccgtcgacggggggcgatgttcccctcacccgtgggctcttcgggcagccagggcatcccgccgctgggacctggacccgctcagtgggcacccctcaggctgctccatggagaccctgtgccctgcgccccgcctggcagtgccggcgtccccgcgagggtcgccctgctcccccacgccccggaagccgtgtcgggggacccaggaattctctccgctgtgcctgcgtgccctcgccttctgcgcccttgccaagccccgggcgtcctctctgggcccggggcctggggagctggcggcgcggtccccagtgctgcggggccctcaggcccccctgcgccctggcggctgggccccggatggcctgaagcacctctgggcaccgaccgggcggcccggcgttcctaacaccgccgccggcgaggatgcggacgtcgcagcgtgcccccgccgcggagaggaggaagagggcggaggcggtttcccgcacttcggcgttcgctcctgtgcacctccgggccgctgccctgcgcccccgcaccctcgggaatctacgaccagcttcgcctcggccccgcctcgcccggccccgggtctcgagcctcagcgtggcccagccgccagcccgcctcaggaacccagttcccggcctccgtcgccacctgcgggcctctccaccgagcccgcgggtcccgggacggcgccgcggccgttcctgcccggccagcctgccgaagtcgatggaaaccccccgccggccgcccccgaggctccagcggccagcccctcgacggccagcccggctccggccgcacccggagatctccgccaggaacatttcgatcgtctgatccgccggtcgaaactttggtgttacgcgaagggcttcgccttggacactccgagtttgcgccgggggccagagcggccgcctgcgaaagggccggctcggggagccgccaagaaacgccggctgccggcgccccctccgcgcaccgcgcagccccgccgccctgcaccgacgctccccaccacgagcaccttcagcctcctcaactgcttcccctgccccccggccctggtggtgggggaagacggagacctaaagccggcatcctcgcttcgcctccagggagactctaagcccccgcccgcccacccgctgtggaggtggcagatggggggtcccgctgtccctgagccccctggcctcaaattctgggggatcaacatggatgaaagctgaccgtgggacttctgccaaaggggaaaagttgggaccatggccaaaccgcgggcttgaggagggagccccgtttctcacatttgtccccttcctttacattttaggagctgtgggcagagggacctaaataacagtgatcttcattcaagcacctaagttttcggggtgacagtccctccccctcatcctttgcagaggaacccagggctggagtcgggagaaggctgatgacatagattccaatccctgcctccttccatctcggaccgttggaggcagggcctgcaccccagtgggagcaaaggaggccaccgctcaaagacacccccccacccaaaaaaaaggggagaagagagagacctcggtgatggacaaaccggttgttactgtgtctgtgggcgagcctggggtgcggggctgtggtgggggtggggagatgattggcagctccctgggggcatcccccacccccactgtccaggcctttaaccctttgctcccctcaggccttccctaacgctccaagcaccgctggagcctttaatgggtgagggaacttgggtaagaggaagatcacccccttcctgtcccctttctaggccccctcaagtgcaggtgacccttaattggtgagatcttcagcctcagccgccgacctttcccttttgtccagttttggagttcccgttttttccttgtttgctttccgagtgtaaggtctggccggtgagaaagatttcccccaaccttgattaatcagccccctcccccaacttacttcccttaggacgggtagggctgagggacctcctctcctggaaagtgcttactttgcctggggaaggggctagacactgtcccagggaaagtaatagaaggtggaagaaatcaataaaatcagaccaaacaagtcgcctttcgagggcctccaccgatttatggatgagagggggtggaggtggaaggcaggcccaagtccattctttggacacccaaactcagcccccttaaagagtggaaacaaaacaagctgcactttgcagaggtggtaaatgaaaggactcttggcctaacttcaagagtcccctggggtttgaaggggcaaagtttgagtctggatggaacctgggctgaggtaccttaagcttccccccgcaacaccccagcctcagggattgcgggagttgtcagagatctgatggatccgaaaggggcagggccaggggattaggtttggggtcagaggttctgttttccaggggaggggtgagataggcctggatcatgccctctgccatgccctccagctaggaggatcttgagtcagagaggattggaagtgctttctcctccacccaggtgaggtcaggggagcttaggtcttagggagatggcaagttgaggtatgaagggaagctggggcttttggagctgccgaacaactgagggac

SEQ ID NO: 10677 - DNA, 1233 bp, Homo sapiens
tgtgtgccctctacatccccgaggtgcaatttgccaacgtgctcaccatggagcccatcgtgctgcagtacgtgcctcatgatcgcttcaacaaggtcagcggccccccgccgtgtcccctaccagttccctcccatctatgggttcctccaacgctctcttcatccggtgtaatttgattctgtccaacgagcactgaaagggaacttgggaggtgggtaggtacctaccagtgaaccacccttctgttgacagacacactcatgctctggcactcaggtgaaatagtaggctcccctgcagtagttctgccagagggtagaccttcgcagttacttcattcattcattcgctggacacattttattaagtgcctactatgtgccagacctggtgcaaggtagctggcacacgctgttcggtgctgatcaagacaggtgtgctgcccgctcaatggaacgcaagttcttgcatgcgaagactataaatatcagtaaaaaggcaaagtaaatgcaatttgtgataaatgctgtgaagaaaataagacactaaaataaagacctggtgggggcttactttagaccagatggtaaaggaaggagacatttaggctgagacctggggcgtgagaaggagccagcttccaggagggtaagggcccccaggttccaggcagaagaaagcctgggcagaggcacagaggtgggcataagctccctagtgagcaagacagacaaaggccttggcctttcagagctaaccatccaaggactgtgctacccagcatagtagccatcggccacacgtggctacataaattaatcaaaattaaaagcaggctgggtgtggtggctcacacctgtaatcccagactttgggaggctgaggggggtggatcacctaaggtcaggagtttgagaccggcctggtcaacatgatgagaccccatctctagaaaaatacaaaaattagctgggcatggtggtgggcacctgcagtcccagctactcgggaggttgaggcaggagaatccctggaacccaggaggcggaggaggttgcagtgagccgagatcgtgccactgcactccaacctgggcgacagagggagactccgtctcaaataaataaataaaaataaacaacaattaaatacagtttagaatctagttcctcagtcacgctagccatagttcaagtgcttatagcccatgtgactggtggcatttgtctt

SEQ ID NO: 10678 - DNA, 1143 bp, Homo sapiens
tttggggtagtagctggagggctccaggatggcaccagagaagcccattctcctgtgggtcctcttctctgcctcgccacttccagcataggtcccgccttcttagacgccctaagtattcagtgaatgaatggaccaatgagtaaatctcttcagactctgggactgttttcatctccctcttggcttccatcttccctgcctaaggtgaaagacagacaccttcttgggttcagtgaattcccctctgccttacacccaggagtgccacagctgcctccccatatccctggtctaggagctcctggccactccctgcccggaagtccttcatgaaactagctgtgggctctcccagttgagctaggtcctgtgccctcctgcttcactcccacatcaggatcagcacaggcccaggcacctggtgttgaaccttcctctctcctctccttcaggtctcctcctcggcttcctcttcctcccaccacgaggccagcacgcaggagacctctgagagcagcagggagtcaaaggggaaaaagtcttccagccatagcctgagtcataaagggaagaaactgagcagtgggaaaggtgtgagcagttttacctccgcctcctcttcttcctcctcctcttcctcctcctctggggggcccttccagcctgcaggtgagtgtgggcatccgggaggaagctgggagcagggaaagccttttgtcctgagcttttctggcaagggactttgcatattggttttgcatctcatttacttctccattggttcaggataaagatggggaatcccctcctctccaaacctgcccccaaacccttccttcttgaaccagaactctcctctccccttcaggggccaccccaccaacctcataacagtattccttatcccctacatttgtgctgcaaggtacaatttttcaagaacccccattaacattttctcctataatcgctacagtcatctggtgaggccagtagggtgcgagttactctcccccattttattacaggtgggaaagctggaggggtcgggggtactcatcccaggacacagacagtggcagagctgagacaggaaaccaggcatccccattcgtggaccagagctctctcccgccagta

SEQ ID NO: 10679 - DNA, 1159 bp, Homo sapiens
tggggacagagggcatttcagggcccagccagtctagtgaggaacagagcttacacatgcacttagaaggaaatgggatggataccactccaaaagatagagcacggaggagacagtcaccttcaggacatccccctctgcatgcgtggagtagaaaggattggggacagattgtcagaaggttttaccaagttttgggagggagattagaaaagctaggaattctgtagccctcggcagggcagtttaacaagcaggcgcagcaagcagatgtcacccaggcaggaagtgacatctttgcagcaagagggttagactggggcatgtagccagatcccggggagcactcgagctggggaggggctgtcagccacctggctgagcaggagtctggggtggagagtaaccacgtgcttccctctgtccttgtgcctgcaggcatctacaccagtaataaggaccccatctcccacagtggcgggatgctgcgggctgtctgcagcacccctctctcctccagcctcctggggcccccagggacctcggccctgccccgcctcagccgctccccgttcaccagcaccctcccctcctcttctgcttctatctccaccactcaggtgagacctgactcctgggctcctccttccctgggcaggttggggacagactgacagaggaccccagccttccatgggaattggagcaactgggctgagttgccatcagaccaccctccgggctctggacccctctgctccccagcacacccggccccctgcaccccggtacacacagttgtgctctagatccaagaataaccgccaggggattctacctccctcccttaggtgttttctctggctggctctacctttagcctcccttctacccacatctttggaacccccatgggtgccgttaatcccctcctctcccaagctgagagcagccacacaggtatgtgaatatctgatcccctctcccctttcttcccaaaggtcggacacccatcacctgcatgtgaccccagaaagaatgggagagctttctggctgccccctccctctggccattgccctccctgcaaaaacaaacaggccgggtgtggtggctcacgcctgtaatcccagcactttgggaggccgaggcgggtgga

SEQ ID NO: 10680 - DNA, 3366 bp, Homo sapiens
cccccccaagtggagggaacagatcctggcctgaggggtcctagcctggagcaggcgcctgcgcccagaccctggagagccttgacccagagcctgtgctgaggtccagggagtgtggagagctcctggtgtcgaggactgagactgagaggggagccccctccatctggcccccttccctttccgcactgtccgctttgtgaggctcagaggaaggacagtctgcaagcccgcctaggaggtccatccccagcaaatgttttggaggtccccccagagagcagagtgggccatggcagaagtagggggttggttggacctgtcacatgaaatggatcagcacttgaatggggagaagtggagggagaggccctgggcctgtccctgcggggaaatcttttatggaagaagggctggacccactttacctgcagtttcttcccagctcgggcagatggcagaagggaccccttggactttttctcgccatccctccccccagcgcaggggcacaagctgagcttgtaaaagcccacagatgttgggggctggagaaggggcaggagagcatcacactcagccccagcctcctcaacctcttggggccccgtgatggggaggagagggcaggtgcggggaggctctggccttccttggtgccccgccctttgtttgcactattggacttaggagtgccgagggtggggagatggagctgcccgtctcagtgtgtgagtgtgtgtgtgcgtgcatgtgtgtgtgtgtgtgtgtgtgtgtgtgtgtctgtctgcctgtctctctcctcctggacccagggcagccaagggcagggataggcgcagtggtcagatgaagcagcgccagagaggggacctcccagctcttatttgcaccctccccacctcaccaactttggtccctctctgggggcatgaatggttaacaaacaccagagcagtactccaatattggagagtcgctgggggcacagggctttgaatcagggtagtatcctgccttccctcccctgaccccacatggtctcagggcccccttagggccccctaccccactgatagcttcctccttctctggcacaaggggagccccagggcttgggggagggcgtaaggtggggggaaatgccactgcttttagcaaaagcctccctcccagaattagccagcttgcctcctgcaccccacccccaccaaccaggggagccactaagctgactaacaactgtcccctcacccaccagctatttccccagggtagagtgggcaattctcaccttcaaagagtccccgcctgcccaggcctttggcacagaggctgagtggacagtcaggagagaggcgagaggcaaggcgaagcctgtgtccctgtttcagttgcactggggttggagcccagggtaggggtttccagcttccccaggctccggccttgtcagtctctttgcatgtgtggatttttctgtgtgtgtttctgtttgggtttttgttgttgggttttttttttttttttaataaagaaaagaagatgtgtatatttttggcaacgacagaaacgtagtgcagatatatttttgcctgtgctgctcaactgttttttttttctgatactgaaaataatattaatattcctgttgataagactttgtaagatgttagggagctgataatggaggggggtgggaatccttcaaaggcaatttcttaggcacttgcaagggcttgggggagggggaggcagttgtgatgacctcagaaatactcactttttattaatgctaaatatgttagaaagaaatgatagcattcagcattttattcttcttaatctattaagctgtgtaactccctgccccaaaccactgaaaagaaaagtaaccttcaggccaggcgcggtggctcacgcctgtaatcccaacactttgggaggctgaggcgggcggatcacttaaggtcaggagttcaagaccagcctggccaacatggtgaaaccccgtctctatcaaaaattagccgggcatggtggcacgtgcctgtaatcccagctacttgggaggctgaggcacgagaattgcttgaacccaggaggctgaggctgcagtgagccaagattgtgccactgcactccagcctgtgtgagagagtgagactctgtctcaaaagagaaaaaaaaagaaaagtaaccttcagagattcttagaagagttgctcattcacacccacgcccttgcccaaggctggcccacttagagcgaaacttaacttttgtctggatgggaagagaagtaagtctaccccgaggttgccatgttgaagagtgagaggtccaagtgattctgtgcattgaaaccaagacaccccacccagaacacttcttccctccctcagcccaaaccaaaggctggggttctcatctccaagtggctgttctccaactttcccaagccgcttgcattccccagactggactactgtggcggttaggttagatttgaagacggggcccaggctgggtatgaacgggtgcagccctcttctcctcttcccccccacatctctcatgagagaggtagtggcatttccttctcagggagcttcaatgggaaaggtctcgaaagcttcaggaggagcagaataccaacgcagggggatggctgtaacgatctcaccgtctcctaacctcagtcccttttttgagagtgaatggtggagggtgggaagggacccagatttgtagatctctttgtctgggggaggggaaggatgtggtttgcagagcggaagcagagtttggaaacgcatgagagcagagcttcgtgtgttcccaccctcagtgaggaggtgtgagtgggtgagcatgtggagttgggtgttcccaccctcagtgaggaggtgtgagtgggggtgcatatagaggcagtgcctgctgtggggtcacaactggtgcatgccagcgccaaagggacctgtctttaggggtcatttcagccagctcctcccatcacagatgacagctccaagcctagaaggggctcagtgacagggccaggacaagccctcaggactgtggcctcctggcccttggttcccctgccccacaacatggtctccacatggctggctggctggctgtccctgtgtgtgtgtgacacacggtgtgagtgcagggctgtgcccggggtgggagggtgtctatgtggcactgactgtcttagctcagagctggtggatcctctccatggacaatgacactttaaggattgtcttggtttgtttttcctatttgtggggtattttccccctcaggctcctgggtctgctgctgcctcaaggtgtcctgaccttgagg

SEQ ID NO: 10681 - DNA, 1220 bp, Homo sapiens
ctgaggaaggtagcacgcaaacccttgccctaaagagccaacgcgcccacgtgtctgctgggaatccttaggtcacagagggcctacctcgcaggggcgactgggcgcggggcatcagcccagaagttcatttcaaggactcacatctgaaatctcagttctttcttgaaatggctgaaattttatgccctgaagacgcggacaccccttgtttgcactgtgggcttggcagcaggggggtgggactcagaggcatcttgaacacgctggcttttgtcccccactccatcggggagcttgggactcagggctgaccttctgcattgtacatgacactggcctgtctcacacaagatccagcttccctcaacagtgcacaaggacaggtaccacacgtgcagaacacacatcgccacattgggcctcggagcagggacagggtggaggaggagggatatctgagtctgagcagagggcggggaggctggtcctggagttggaagttggctctgactctcctctctctctccacacccccaagtctgcaaaacctgcatcgtgcgctacctggagaccaacaaatactgccccatgtgtgacgtgcaggtccataaaacccggccgctgctgagcatcaggtgggcttggcacggcacctcctgtccccgcgatcctctgggtcagcctcccccatccctcccacgctccgtgcttccttcagccaaggcggcaggtgtaggagaagcatggggtgtggacctgggctactccccgaccttggggttacatttggctcatcacagggtgaggcatactagaggggcaaagaccagacccacagggatcctaatgcctgggcaccggtctcaggaagggggtgggaagaggggtaccctggctgggagagcagggcgaggtcggagcgctctggagaaggcattgctgataagccctgtccatttttccccaggtctgacaaaacacttcaagacattgtctacaaattggtccctgggctttttaaaggtatctgcactccattcctcctccactgaccccatttcccaacccatggccctgtcctcatcctgctgccttcttccagatgagatgaaacggcggcgggatttctatgcagcgtaccccctgacggagggtgagtgtgctcgcgtctgtttgtgtgtgcacagtcttgcctgggaccatgtaggtgtgtagcg

SEQ ID NO: 10682 - DNA, 1172 bp, Homo sapiens
gaggtcctgagcaaagacagtggcagtggggaggcaggaaggcagctgtcaaggggacttagtcacttaaaacagaagcgaaggatgtagagacagaggatggctgggttctccagctaggctagccaagacagaatgtagaaggaacaggtttgggggaagtgggtttgtggttggacaggttgggttttgaggtacctgttaagatatccaggatcagagcccatcagacagctgctaaagcacactggagctaaatagggattcttctccctattttacagagaaactgaggctcagtgaagagagacatactatttgcccaatgtcacactgctgattagtaaaagaaattcagggcttgaagtctctttcactttcctttacataattctgcttccttccaaggaaggagctgagaggggcttcccacatcctgggaatcatcccttacttcaggcatgtcttggggccagagctgggaatcttgagcctagaaaaaagagagttaagggaccagaccaaatcagagccagaggctgtggtttgaaggggttccactctgttggcaggatccggatcacctgtttgaaaccatctcccaagccatgctgaatgctgtggaccgggatgcagtgtcaggcatgggagtcattgtccacatcatgtgagtatgggctgggagaagtctagaagctctgcagacaccctgcctctctcccttctccacgagcatacaccccattttcccagccccctggtcaggtgtgagataagaaaggtgcttttggcagtcctgggtgagcaaaagtccatgcctccctatggctggtaactggcagcctacccagcttcctctggcctcttgtcaggtgaggttctgtgaccccgtgctcacaagagacatttcttccttaacaatgtctccgaagtctcagggatccgtgttggggtgagccacaacaaagctactgcagatggattgaaattctaggtggctcgcatcctctctccagcccagatctgtgtgatgttctgagctctagagaccaatttccaagcctcagccaactccctaagtgccatcctccttgtccttttacttgtttggggccatcaccaggaacctgattggatagagtaggaggtatccttccaaccactttcctaca

SEQ ID NO: 10683 - DNA, 2114 bp, Homo sapiens
tttgagctgtggtttggtggattttcaatttttttttttaaaggtcattcgctgtgctatcttcaaaaccttgagtttggcccccaatttttggcattcaaatgtttaaaagctatttatcttggtttatacaagtttcctttctcttctttttgtcatggtattctatttggtctgcagtttgaatgtagagaaagtggactgatcccccaagcgttgtctgcccccactctttcctccttgggtcccgccattcttttactgggcagtcgagggcattggaggggaagtgactgccctcagcctcactccctggggccatgaagaaaagctaaacagtctcatggcatctcagaataatgttgggtctcccaagaagaaaggtgtaagaataacgacatggctgattaggcgaggccaggatagggctaaggccaggattcctggctggcatccagtcaccccttctcccatccttccccctcttcttccacaagtccgcagccgagacactgtagtctcccagccacagtgatgagtgccctggagactccactgacctctagatgaaggcccctggccctggttcctgttaattaacctctgggtctttgagtcccccagcacaaacttctttcctgtaccctgcggcttggggtcacagggcatgccgggaagccacagctgaggggcgcagactgaagcagtgctccacctctccttctttagctcaggggttgctggtctgtggcaggcgccacgagtggcccctgtggctgttctcagtggcagtctcttaagttcccaccacaggcagctctttatcccctctccctacttgactctttctcttgcctgtgcttttggcctcaaacaggcctgctggtagcgctcagggcgtgaggctacactcctgccctgcctttcctgtcttcatggtctgccagggcataccttggggaggtggaccaaagacccaggactttttgcagtagccagtcctaccccccagttgtctttttaccaattcagggtgggagagaaaactgcagcaccccagcatgtgagttactcaggtgttgggggctagaagggacagtgcgtttaaacaacactcagagctctggccttaaacctgtggccccccaagtctaggagcctcatctcttcctggcagtcatgcgggcaggaggtcctgaaagggaaaacccattcagacaactgttccccaatctaccagccatctgcaggggtcagtgaccgtggccctctccctcctctagaatgtgccacttatgaagagtgccccatggggaaaaggagactcagctgtcccttggcagcttgtgccagtatcccagggcagaagtttccacaggagcctcttgcccttgcgcagagccactgtgagaggcggtgggagccaacacccttgggggagggggcagtactgctcggcacatcccagcatcaggtcagatcattgaaattaaaaaatgtgaattaagttcatatccaccttttggggaagcaggacaaaccaccaccccaccaagtgtgtgacttctccatatcccactgcagtttccattttttaaatgggaattttcaatcccctgtgcttgtctaacgtctgctttaaaaagtttgagaccctgttactgtttgaaaatgcatgcatgttacgatgaatctccaacctgaggaaaaaaataaaactcaaaaagctttgtgtacatctgttatgtgtgagtccttgggaaatgaaccttttttttttcttcccagaattaaaaagttttggtcctagctttagaggcagcttcggctaaatcaatgtatggcttgagtttggagaaagaatatggtcaatgacatcccgctttcagatgcaattaataaacagtggttaaaagcacagcaccactggctgggtttggtggctcacgcccagtacttggggaggccaaggcaggaggatcacttgagcccagaagttcagtaccggtctgggtaacatagtgagaccccgtctctacaaaacaagaattagctggatgtgatggcacatgtctgtagtcccagctactcaggaggctgaggcaggaggatca

SEQ ID NO: 10684 - DNA, 1217 bp, Homo sapiens
attttttctccccatttgacacccaggttaaaaaggggttccctttttggtaccttgtaaccttttaagataccttggggctagagatgacttcgtgggtttatttgggttttgtttctgaaatttcattgctccaggtttgctatttataatcatatttcatcagcctacccaccctccccatctttgctgagctctcagttcccttcaattaaagagatacccggtagacccagcacaagggtccttccagaaccaagtgctatggatgccagattggagaggtcagacacctcgccctgctgcatttgctcttgtctggattaactttgtaatttatggagtattgtgcacaacttcctccacctttcccttggattcaagtgaaaactgttgcattattcctccatcctgtctggaatacaccaggtcaacaccagagatctcagatcagaatcagagatctcagaggggaataagttcatcctcatgggatggtgaggggcaggaaagcggctgggctcttggacacctggttctcagagaaccctgtgatgatcacccaagccccaggctgtcttagcccctggagttcagaagtcctctctgtaaagcctgcctcccactaggtcaagaggaactagagtacctttggatttatcaggaccctcatgtttaaatggttatttccctttgggaaaacttcagaaactgatgtatcaaatgaggccctgtgccctcgatctatttccttcttccttctgacctcctcccaggcactcttacttctagccgaactcttagctctgggcagatctccaagcgcctggagtgctttttagcagagacacctcgttaagctccgggatgaccttgtaggagatctgtctccctgtgcctggagagttacagccagcaaggtgcccccatcttagagtgtggtgtccaaacgtgaggtggcttcctagttacatgaggatgtgatccaggaaatccagtttggaggcttgatgtgggttttgacctggcctcagccttggggctgtttttccttgttgccccgctctagacttttagcagatctgcagcccacaggcttttttggaaggagtggcttcctgcaggtgttccacctgccttcggagcctgccacccaggccctcagaactgagccacaggctgctctggccaggagagaaacagctctgttgttctgc

SEQ ID NO: 10685 - DNA, 1192 bp, Homo sapiens
ggagtcagaaacaactcctgtcggccatcctgtccctcgcccaccccagcccctagcccagctcccagacatgccgtctgtcaacatgaaatgccgtgtgtcatgaatcacctgtctgtccttgtgctaggcctagaccttggtctctggtcttttacctctgccctcactacgttcttcatagtcctgctgggatggcagacatttctatctcatagtccagcctgagtcagtcagtggctgcctgagccctgagctggtccaggctcaacaggaaagaatcctttagtcattcctcatctttcatgtgtttgccctccctgcccacccaaagcctgggactagaggctcctgcactgctgatttagcaggttgagggtcggtacactgacaacccctccttcccctttctgtatagttgctcccggcagaacagttgggtgtccctggggtgaattaatcaggcttacccagcctaactgctgttgctctcctaggccaaggacttgccaacattcaaagacaatgacttcctcaatgaagggcagaagctgcatgtgggagaggagagtaaaaagaacttcctggagaaactgaagcgggacgttgaggtacttactaaccttcattttcacctgcaaggctccttctgtacctagagtaggcgcctcttaaaccttaagaagaatggaattcagtactttccaggagtatggacaaaagggtggtgatttgagcagcgtgggcacttatgggcacctaaagcaagtgcaaatgatcattccacctgacggagcatagttggcgccagtaggacctttgtaatttagtttagaatgcttttcccttttcactaattcattccaacacctttttcaaactcccttctgctgttgtccctacaatggagagggcatctggccatcagagctgtaggaacccagctattaaggtcctgtaaccccaacattttgggaggctgaggtgggaggatcgcttgagctcagcagttcaataccagcctaggcaacatagcaagacctcatctctactaaaaattaaaaaatttagccaggcgtaggggcacacacctgtagtcccagctacttgggaggctgaggcgaaaggattgtttgagcccgggagatgaggctgcagtgagctgtggtctcaccactacactccagcctgg

SEQ ID NO: 10686 - DNA, 1104 bp, Homo sapiens
ctctctggatggaacgggcatgggcctctctgggggaggcagggctggaatgggagacctgttggcctgtgggcctcacctgcccctctgttctctcccctcacatcctcctgcccagctcctcacatacccacacattccagggctggggtgagcctgactgccaggaccccaggtcaggggctccctacattccccagagtgggatccacttcttggttcctgggatggcgatggggactctgccgctgtgtagggaccagtgggatgggctctacctctctttctcaaagagggggctctgcccacctggggtctctctccctacctccctcctcaggggcaacaacaggagaatggggttcctgctgtggggcgaattcatcccctccccgcgcgttccttcgcacactgtgattttgccctcctgcccacgcagacctgcagcgggcaaagagctcccgaggaagcacagcttgggtcaggttcttgcctttcttaattttagggacagctaccggaaggaggggaacaaggagttctcttccgcagcccctttccccacgcccacccccagtctccagggacccttgcctgcctcctaggctggaagccatggtcccgaagtgtagggcaagggtgcctcaggaccttttggtcttcagcctccctcagcccccaggatctgggttaggtggccgctcctccctgctcctcatgggaagatgtctcagagccttccatgacctcccctccccagcccaatgccaagtggacttggagctgcacaaagtcagcagggaccactaaatctccaagacctggtgtgcggaggcaggagcatgtatgtctgcaggtgtctgacacgcaagtgtgtgagtgtgagtgtgagagatggggcgggggtgtgtctgtaggtgtctctgggcctgtgtgtgggtggggttatgtgagggtatgaagagctgtcttcccctgagagtttcctcagaacccacagtgagaggggagggctcctggggcagagaagttccttaggttttctttggaatgaaattcctccttccccccatctctgagtggaggaagcccaccaatctgccc

SEQ ID NO: 10687 - DNA, 1652 bp, Homo sapiens
ggaagcacagcctcggggatggggagggaaagacggtgctatatccagttcctgctctctgctcatgggtggctgtgacaaccctggcctcacttgattcatctctggttttcttgccaccctctgggagtccccatcccattttcatcctgagcccaaccaggccctgccattggcctcttgtcccttggcacacttgtacccacaggtgaggggcaggacctgaaggtattggcctgttcaacaatcagtcatcatgggtgtttttgtcaactgcttgttaattgatttggggatgtttgccccgaatgagaggttgaggaaaagactgtgggtggggaggccctgcctgacccatcccttttcctttctggccccagcctaggtggaggcaagtggaatatcttatattgggcgatttgggggctcggggaggcagagaatctcttgggagtcttgggtggcgctggtgcattctgtttcctcttgatctcaaagcacaatgtggatttggggaccaaaggtcagggacacatccccttagaggacctgagtttgggagagtggtgagtggaagggaggagcagcaagaagcagcctgttttcactcagcttaattctccttcccagataaggcaagccagtcatggaatcttgctgcaggccctccctctactcttcctgtcctaaaaataggggccgttttcttacacacccccagagagaggagggactgtcacactggtgctgagtgaccgggggctgctgggcgtctgttctttaccaaaaccatccatccctagaagagcacagagccctgaggggctgggctgggctgggctgagcccctggtcttctctacagttcacagaggtctttcagctcatttaatcccaggaaagaggcatcaaagctagaatgtgaatataacttttgtggaccaatactaagaataacaagaagcccagtggtgaggaaagtgcgttctcccagcactgcctcctgttttctccctctcatgtccctccagggaaaatgactttattgcttaatttctgcctttcccccctcacacatgcacttttgggcctttttttatagctggaaaaaacaaaataccaccctacaaacctgtatttaaaaagaaacagaaatgaccacgtgaaatttgcctctgtccaaacatttcatccgtgtgtatgtgtatgtgtgtgagtgtgtgaagccgccagttcatctttttatatggggttgttgtctcattttggtctgttttggtcccctccctcgtgggcttgtgctcgggatcaaacctttctggcctgttatgattctgaacatttgacttgaaccacaagtgaatctttctcctggtgactcaaataaaagtataatttttacctgcggacttggtttcctctctggctctgagctgctgttgtgtgtgtctgtgtgtgggtgtgtgtctctagctgtaaggtgctgctgtgtgtgtgtgtgtctagctgtaaggtgccactgtgtgtgtgtgtgtgtgtgtgtcctgtctgcttgggggcactggcctgtggccctcctgggacctctgctgcccctcggggagagaatgacttgtctggatgccaagggggagtttgctgctgtctgtcagg

SEQ ID NO: 10688 - DNA, 1096 bp, Homo sapiens
agttcctgtcccaggctttgcccggccgccccaggaacccaaccctctgggctgacctttctcctgcttctctccaggctctgcaggggacagggcaggtgctgcaggagcccctttgctggctttatctgctcccttgttctggacacagagccctgggaaaaagagggggtggaagacagacaaggaaggtggaatgttctgttttggccaccaggaaatggggtggggtgggcatacacagagaggacccctctcttaatacagctgcttttctcggtgccaacctccctcccccaagctcagatcctcctcttatgcccttgattgtgccagcccatgccacccccatcctgggcacagttacaccctcccatgcagtgggagaaacacagaccctcgtacccaaaggcccctgccccacttctcccccacaaagcggggtctcaagccacactgccctgtttgctgccatgaggcccccccccccagcaatatcccaggggcgggcccaatgcccactgtacatgaggctgcatgatgggtctggggccttgctgattccccagacccctaattaaatgtttcttgtcccagcccatctgctctgtgtctctcactgggacagaggaaggaaaggggcagggaagtggggagtggggtctggggatgctgagaggggcaaggctgagggtggaagaattcctccgtctctgaaaggaggggtgctgggcaggcggcaacatggcaggggtcccaggcctcatccctttcctccagcagcccgaggagggtggggtctggggagagccaaaaggggacctgaggaaagtgggaggaggtctggggacgctggagggaaacggcttggggctgcggtcactttccgcctccatgtgcacctgagtcgcgcaggggcggacatgctcctgcgcgccagggccgtcgaggccgatcttgcccacccagaggtgccctccgagaccgggcgtgccgggggtctgggagggctcagtacccatccgaggtcagcctcgtccccgcagtcccccaagccggagacagaaacgctggcggcggggacagtcgtggcccg

SEQ ID NO: 10689 - DNA, 1621 bp, Homo sapiens
tttagacgcatcaattcagtgtctctgaagcctttgatcgttaggaaggtcagtacataacctcttaggtgaagctgagttgatctttggagcccaagagagttaattttcaggagaaaaagaattagggcaagctcccctgtgggatgttaagagaaagtccatatgcgcttcttccatctctgcctcttgtttttaaataagtgcttgtgaagttcagtttatagaggttgagtctcagtgcttcctcagccagggtggtttattgctgttttacaaagaaccatgaacaagcaaaatcctatcaatagtcctttctgttttatgttttatagtcttattttgaagaatcggcatggtaaaatgatagacaagtttcaaataaagcagataattagctctagaattggggtactttgcctcaggtacagcatctgtcttgaatacatagtgatggctgtgtcacacatgggtacatttactttcctctctgatcaactgcacccctttttactggcaaagagggctcctactttctacacacttaaccagtcaaacagataggttttggcaccaccgaaagaaccacaagtgcaccccagctgcatctgggcatggttttggtactaggactagagaagtgagcagtaaatgacagtccttaccctaggaagagatgggagaagagaggtgtccagacatatttaccttttctcttctgtcatgccccaagaaccaaggatcatctttgaagtgacgtcttttttgttaaattggaagaagaaaactttgcagccaggcgtggtggctcacgcctgtaatcccagcactttgggaggccgaggcgggcggatcacaaagtgtcaggagtttgagaacagcctggccaacatggtgaaaccccatctctactgaaaatacaaaatcccagctacttgggaggctgaggcaagagaatcacttgaacctgggaggcggatgttgcagtgagccgagatcacgccactgcactccagcctgggcaacggagtgagactccatctcacaaaaaagagaaaagaaaagaaaactttgcttcactaagtttctcttgccattatctcattaattcagatctgtacctcattgctgctcacacatatatgtttcttaccttagcctgaaccttctcaggccttgaagtcattattctactctttttttttcttttccttttttatggcactagagaatgaaaacctaaggtcttagaaaatcttaacttgaaaaagtctctaactggcatgatttgattacttttttcccctgtggacaaataattttctttcctatataatagatttttagtaagtgaaacctttgctgctgctttcctgggtttacattagttttttcctgcccttaagaataatttatctgtgcttctctgatgactgttaatttctaatagtgcaggaagggatgagcttttgatttcttctcactcccctcctcaccctacttccaaattacacactaacttctaacccttacagcctgttggcacatacacaagatccacgagaccatgctcctcagaagctacccatgtcctttctcaccatggtgtggctcttggagc

SEQ ID NO: 10690 - DNA, 1229 bp, Homo sapiens
gggacttgctctggtgatctctgctattaaggcaaattccagcctgtttgtgccaagaacagagtcaagtgagagagaatgaagactcagagatgtgcagcactggcttgtatgttgtcaggcagaagccttgttcctttctcaagaaaacttcaggcctatcaagcttggaaggaaatacatttttttatgctgatttgcagcctacaccagctgatgaatatgctaggactttgagagaacacaaagcatggtaagttttggtcaggtggaaaggagcctgacatctgaacataatgcttcctctctcaacatctgggatacttttgaaaattcagtaaggcttaatgtaggaaaaattctttacaggaaaagctaattgatctgtttgtctaacctcatagccactccaaaatatgccttttataatggaaaaaaacagtgaacagagagaagagatttggggataagttagaaggtaccctcaaaactactgccgtaaacctacaggtgggcaaggaggaattactgtagtgtctctggagaaagttcttgaacatccaaatcatctcttttctaagcagtttttcccctaatctcataccttacatcttccagcatcatttgctacatcaatgtcttttcatcctcttcatcagccccattgagctgactccagcttatttttgcactgatttccaccatttccttcccacacccatcctttccctctatttaaagcctccatctcaccctcagtaatgctgctgatttactctcagatgtctcaagtctagcttcctttttgaatccttctcctactccaggggctgtcaaaggcagccttaaagttcagtgactgttaggtggctcaggccatttttcattgggtggtctttggtgtttgcatactgaatttgaattcagtttaaaagcaaactgttggatatgaggaagaaagggatatggccttagccctttttccaatatttggaatatgaaagcatattgtgctttgtgtaaaaaatgttttcttctcctattctgctcttgtctttactgaaggtaaaagtattccttaagtagcttttgcaaatttctagtctgatttccacattcattaagttgatttagcagacatgtaagtcagaagtttcacatatcccttgtatcaaacattttatagggaaacctagtaaatttatgatgcttcattttgggctttccag

SEQ ID NO: 10691 - DNA, 1171 bp, Homo sapiens
ctgggttaaaaaaaaaaagccaggtgattcctttgtgtgttatgtcgtaagtggagtgacttcatcatatatggaagaagatttctatattcagctttttctgcaggttggagtcagcatagagttggaaaatcagctttggctttctttcctgtctcatttcctctagtgttctcctttttattgtcatcagctctcaacaactctgccacttttgtgtcccaaggtaataagatgtaggaaacaaaacattgtaaagtggagcaagaaaagttatcaattaaccacatcagagtcaaatgtcttgggtgacactaaggaggatatgggcaggtgataccagagtgctttatcttgtgatgttgatacagtagcagcctctcagacattcagccaggttggatttctcatgagtttgtcacctagttttgaatcctatcccgttggtttctgcaggaaaaaaaaaaaaatttatgtggtttttaaaatttgttctgagtggggagaatcttagggggaatgtactgaatagtatcatgggctcagctcccccatgcagggccaacaaataccaaaatgagtaaactgggaagcttttctctctttctgtcttcatcccagatcaaagaatcccgagttaggatctggatgaaggataagcccctgaattgtcgatgggctcacccccacactgacccagcatctgaacttgcttaacagggagccggggctaaactgcttcaccctgcctgagaaccagggagcactgcatttctccacagggtggaggagaagaggcagaataaaccaagcctgggacacctccctcctgtctaggtgtactcattcttctgtttcaaaagaaggcaaggacatgaagtcaacttctacctatcttctgctgctggtgtcttatgtattctcagtttgacctgattcctcttctgtcttttgacttaacattaggggttcttggtcataacctgctctgatgtacataaagatttcaggttcaatatcaatgtgtcttaaaacagaagtattttagcgggtggggggtggggtggtggggacaaacaacgcaggatataattgccaaaaccaggcttgaggttggtgactcttgaaagattttctttcttcaggcctagatcagaaaattaagtgcagc

SEQ ID NO: 10692 - DNA, 1177 bp, Homo sapiens
tacctgaaaactgcttactgcaaaactctgatgttatatctaaatctcaggtctcattcagcagctattgcaatgttaactttgttttcttctttattttgcagatgtatgtccatccctgtgacgatgagggctattcggaggaaagctgaaaccattcaagccgacaccccagcactgtccctcattgcagagacagttgaagacatggtgaaaaagaacctgcccccggctagcagcccagggtatggcatgaccacaggcaacaacccaatgagtggtaccactacaccaaccaacacctttccggggggtcccattaccaccttgtttaatatgagcatgagcatcaaagatcggcatgagtcggtgggccatggggaggacttcagcaaggtgtctcagaacccaattcttaccagtttgttgcaaatcacagggaacggggggtctaccattggctcgagtccgacccctcctcatcacacgccgccacctgtctcttcgatggccggcaacaccaagaaccacccgatgctcatgaaccttcttaaagataatcctgcccaggatttctcaaccctttatggaagcagccctttagaaaggcagaactcctcttccggctcaccccgcatggaaatatgctcggggagcaacaagaccaagaaaaagaagtcatcaagattaccacctgagaaaccaaagcaccagactgaagatgactttcagagggagctattttcaatggatgttgactcacagaaccctatctttgatgtcaacatgacagctgacacgctggatacgccacacatcactccagctccaagccagtgtagcactcccccaacaacttacccacaaccagtacctcacccccaacccagtattcaaaggatggtccgactatccagttcagacagcattggcccagatgtaactgacatcctttcagacattgcagaagaagcttctaaacttcccagcactagtgatgattgcccagccattggcacccctcttcgagattcttcaagctctgggcattctcagagtaccctgtttgactctgatgtctttcaaactaacaataatgaaaatccatacactgatccagctgatcttattgcagatgctgctggaagccccagtagtgactctcctaccaatcatt

SEQ ID NO: 10693 - DNA, 1231 bp, Homo sapiens
gggcattaagagggaaaatctgtctcaaaaaaaaaaaaggtgtttgggtttttcatttttatatcaagtcagaatccaacccttccaccctcttttttttgaaggaccccttccttctcctcaatcaccagtgccaacagtgttgatcttcctgcctgtttcttcttgaaatttccccagccaatcccagtatctagagcatttgttcagaaactgcagaactgcacaggtgagttttgagcatcaggatctagtacttgttataaatgtgaaaaagaaacttcaaagtcaggttatcatgacgtctttcagtcttacatgcctcattgaagtattactggtaaagatgttatagtgctttgtactagtaaatgcttagtaagtactcttttgggtgaatgaatgtagatatcaaggggaaactgagctgtcagtgttttcatcttaacatgatcattatattgattcttgtttttccaggaattccattgtttgaaactcaaccaacttatgcacccctgtatgaactgatcactcagtttgagctatcaaaggaccctgaccccatacctttgaatcacaacatgagattttatgctgtaagtaaagccctagggagctagaatgttgtaggttatgtttggacccaagatcataatcttcctttatagcattattgaggtcagataagtttcttcaagactgctggatcatgtcctatttctttagtaaggcaggaaattacagaaatctcagaaatgggctgggcgcggtggctcacacctgtaatccccgcactttaggaggccaaggcaggcggatcgtgaggtcaggagttcgagaccagcctggccaacatagggaaaccctgtctctactaaaaatacaaaaaattagccgtgtgtggtggcgggtgcctgtaatcccagctactcgggaggctgagggaggagaatggcttgaatctgggaggcagaggttgcagtgagacaagattgtgccattgtgctccagcctgggtgacagagcgagactctgtctcaaaaaaaaaaaaaaaaaaaagaaatctcggaaatgtattgaagtaaaagggcatgagcttccattaggaaacaacaatgtacagttctttgttgaaattttgggtgattggccaggtgcagtggctcacacctgtaatcccaggaatttgggaggccaaggcgggtggtcactagagatcaggagtttg

SEQ ID NO: 10694 - DNA, 1240 bp, Homo sapiens
ccggcgcccgggcctgaggactggctcggcggagggagaagaggaaacagacttgagcagctccccgttgtctcgcaactccactgccgaggaactctcatttcttccctcgctccttcaccccccacctcatgtagaagggtgctgaggcgtcgggagggaggaggagcctgggctaccgtccctgccctccccacccccttcccggggcgctttggtgggcgtggagttggggttgggggggtgggtgggggttgctttttggagtgctggggaacttttttcccttcttcaggtcaggggaaagggaatgcccaattcagagagacatgggggcaagaaggacgggagtggaggagcttctggaactttgcagccgtcatcgggaggcggcagctctaacagcagagagcgtcaccgcttggtatcgaagcacaagcggcataagtccaaacactccaaagacatggggttggtgacccccgaagcagcatccctgggcacagttatcaaacctttggtggagtatgatgatatcagctctgattccgacaccttctccgatgacatggccttcaaactagaccgaagggagaacgacgaacgtcgtggatcagatcggagcgaccgcctgcacaaacatcgtcaccaccagcacaggcgttcccgggacttactaaaagctaaacagaccgaaaaagaaaaaagccaagaagtctccagcaagtcgggatcgatgaaggaccggatatcgggaagttcaaagcgttcgaatgaggagactgatgactatgggaaggcgcaggtagccaaaagcagcagcaaggaatccaggtcatccaagctccacaaggagaagaccaggaaagaacgggagctgaagtctgggcacaaagaccggagtaaaagtcatcgaaaaagggaaacacccaaaagttacaaaacagtggacagcccaaaacggagatccaggagcccccacaggaagtggtctgacagctccaaacaagatgatagcccctcgggagcttcttatggccaagattatgaccttagtccctcacgatctcatacctcgagcaattatgactcctacaagaaaagtcctggaagtacctcgagaaggcagtcggtcagtcccccttacaaggagccttcggcctaccagtccagcacccggtcaccgagcccctacagtaggcgacagagatctgtcagtccctatagcaggagacggtcg

SEQ ID NO: 10695 - DNA, 2022 bp, Homo sapiens
gtttactccactttgacaaaagatacgcccttctccctgcacataaagcaggttgtagaacgtggcattcttgggcaagtaggtagactttacccagtctctttccttttttgctgatgtgtgctctctctctctctttctctctctctctctctctctctctctctctctctctctctgtctcgcttgctcgctctcgctgtttctctctctttgaggcatttgtttggaaaaaatcgttgagatgcccaagaacctgggataattctttactttttttgaaataaaggaaaggaaattcagactcttacattgttctctgtaactcttcaattctaaaatgttttgttttttaaaccatgttctgatggggaagttgatttgtaagtgtggacagcttggacattgctgctgagctgtggttagagatgatgcctccattcctagagggctaataacagcatttagcatattgtttacacatatatttttatgtcaaaaaaaaaacaaaaacctttcaaacagagcattgtgatattgtcaaagagaaaaacaaatcctgaagatacatggaaatgtaacctagtttagggtgggtatttttctgaagatacatcaatacctgaccttttttaaaaaaataattttaaaacagcatactgtgaggaagaacagtattgacatacccacatcccagcatgtgtaccctgccagttcttttagggatttttcctccaaagagatttggatttggttttggtaaaaggggttaaattgtgcttccaggcaagaactttgccttatcataaacaggaaatgaaaaagggaagggctgtcaggatgggataatttgggaggcttctcattctggcttctatttctatgtgagtaccagcatatagagtgttttaaaaacagatacatgtcatataatttatctgcacagacttagaccttcaggaaacataggttaagcccccttttacaaagaaaaagtaaacatacttcagcatcttggagggtagttttcaaaactcaagtttcatgtttcaatgccaagttcttattttaaaaaataaaatctacttataagagaaaggtgcattacttaaaaaaaaaaaactttaaagaaatgaaagaagaaccctcttcagatacttacttgaagactgttttcccctgttaatgagatatagctagatatcggtgtgtgtatttctttattattctctggtttttgatctggccttgcctccagggccaaacactgatttagaaagagagccttctagctattttggcattgatggctttttataccagtgtgtccagttagatttactaggcttactgacatgctattggtaaatcgcattaaagttcatctgaaccttctgtctgttgacttcttagtcctcagacatgggcctttgtgttttagaatatttgaatttgagttattgggccccactccctgttttttattaaagaacgtgagcctgggatactttcagaagtatctgttcaatgaaaaaaagttggtttcccatcaaatatgaataaaattctctatatatttcattgtattttggttatcagcagtcatcaataatgtttttccctcccctctcccacctcttatttttaattatgccaaatatcctaaataatatacttaagcctccattccctcatccctactagggaagggggtgagtgtatgtgtgagtgtatgtgtatgtatgatcccatctcacccccacccccattttgggagtcttttaaaatgaaaacaaagtttggtagttttgactatttctaaaagcagaggagaaaaaaaaacttatttaaatatcctggaatctgtatggaggaagaaaaggtatttgttaatttttcagttacgttatctataaacatgatggaagtaaaggtttggcagaatttcaccttgactatttgaaaattacagacccaattaattccattcaaaagtggttttcgttttgttttaattattgt

SEQ ID NO: 10696 - DNA, 1207 bp, Homo sapiens
tggggaattgcttaaggagctacaaatgggtctccagtgggattgatgggggacttgaaggcgggggacccctttggaggaactcctgacttctgcctatgttctcagtgtaccatttatctgttgatttcttaccaggtgcctttgagatagagataaatggacagctggtgttctccaagctggagaatgggggctttccctatgagaaagatgtgagtatttacagcgttgggaggacctcttggtcaccctaccccaacagtgcatcatcctgtcattccactcctctagctcattgaggccatccgaagagccagtaatggagaaaccctagaaaagatcaccaacagccgtcctccctgcgtcatcctgtgactgcacaggactctgggttcctgctctgttctggggtccaaaccttggtctccctttggtcctgctgggagctccccctgcctctttcccctacttagctccttagcaaagagaccctggcctccactttgccctttgggtacaaagaaggaatagaagattccgtggccttgggggcaggagagagacactctccatgaacacttctccagccacctcatacccccttcccagggtaagtgcccacgaaagcccagtccactcttcgcctcggtaatacctgtctgatgccacagattttatttattctcccctaacccagggcaatgtcagctattggcagtaaagtggcgctacaaacactaatgctaactagtgtgtgtttttatacgtccagtctgggaatgtggggggcacagaagtccggtcagcccagcctttgcaccgccagggtggctgtgctggctgggtgggctttctggacagctactccttaggtcagtgagctcctctggcatagccaaggcaaggaaaatgagtcccacagtagaccctgcctcgtctttcccccaccctacccaccactctcctcactcacaaggaggaaataaccccattctggtgagtggccttaggaattagttcgttctaaataagaatgatctggtcgtcaaagggctctcagatctgaatccagcttcccgatctcccccaaccctgaagctggagaactggatgtctggctcctcatccaagctttctgaagattcccagccactccctccaggaaaagaggaattgagtgtaaggtgagcaggaagggatggca

SEQ ID NO: 10697 - DNA, 1681 bp, Homo sapiens
acttctgtgccccccacattcccagactggacgtataaaaacacacactagttagcattagtgtttgtagcgccactttactgccaatagctgacattgccctgggttaggggagaataaataaaatctgtggcatcagacaggtattaccgaggcgaagagtggactgggctttcgtgggcacttaccctgggaagggggtatgaggtggctggagaagtgttcatggagagtgtctctctcctgcccccaaggccacggaatcttctattccttctttgtacccaaagggcaaagtggaggccagggtctctttgctaaggagctaagtaggggaaagaggcagggggagctcccagcaggaccaaagggagaccaaggtttggaccccagaacagagcaggaacccagagtcctgtgcagtcacaggatgacgcagggaggacggctgttggtgatcttttctagggtttctccattactggctcttcggatggcctcaatgagctagaggagtggaatgacaggatgatgcactgttggggtagggtgaccaagaggtcctcccaacgctgtaaatactcacatctttctcatagggaaagcccccattctccagcttggagaacaccagctgtccatttatctctatctcaaaggcacctggtaagaaatcaacagataaatggtacactgagaacataggcagaagtcaggagttcctccaaaggggtcccccgccttcaagtcccccatcaatcccactggagacccatttgtagctccttaagcaattccccaaccctgggtcaactccagggaacctgagggaggcctcgcctgtgtgcccctcgcaacactcaataaaggactccctcccctccaaccctacacgattgcagtctaataggtttttccccacaggcctctgtgacaccccctgacctatggaagggaactcatgttggccggacattttaccatgtgccaggcactgcgggcactttacataaagcagccaatgtcagaactagaaagcgggagagctgggattcagagcacagactgacccagcaggtgttctgcgagcctcacctgtgcccccgaggcgcgactcgatctcgatgcccggatactgctccttcacagcactggccagctccaggtaggtcgcctcgaagccgcagggttcactggggagtcaagagatggggctgggctggggattcgggggtggggcctcccgtggacccacctccgtccggcccgcgggaccagggtgcgggtcctccagccggggccgctcaccagtactccaccacgatgcggaccccactgcccggctcgacctcctcgggagggggcgctacggacgtctgccccggctccccgctcatcgcggccggctccgctcgggcccctgcttccgggtgtgacgcgaaccgcgggcacgtgacggggcggggcctctggagcggggaggggccgagggtggcgttcgggcgccccctgcgggtctccgccactgctacgttttgacctcgtagggcagctccggagctcgctccccgggcaggggctgggtccggtccagaccctccttccctggcccggtctcccggagtgccgggcttccccactccccactcccggtgtccgctggacttcatggcttcattta

SEQ ID NO: 10698 - DNA, 1657 bp, Homo sapiens
tgagtgcctgggctacaggaagacaccagcaggcagggcaaggcctggaggaccccagggcccagccatgcttattaaccctgccgtggctcctggtgtagggatgaacagaggaagttggaatattcctgggtcttacactggactcaggctttgggcctccctggccccatctttcctccattggagcttccttcctgctagtgagataggcctacaggcttggggtgaagctgggaggtgggggcggtactgggccaggaggggcccctttagcctgagagctcttgcttcttacgctggtctgggaacctcttctgtaactccttagctgttgggattctgcctttcccctcccaggaagtgagggaggaaggggtcctcccaacagtcttttatatctctccccacccttcccctcccaggtacttcctcaccagcttctacactaagtacgaccagatccattttgtgctcaacaccgtgtccctgatgagcgtgcttatccccaagctgccccagctccacggagtccggatttttggaatcaataagtactgagagtgcagccccttcccctgcccagggtggcaggggaggggtagggtaaaaggcatgtgctgcaacactgaagacagaaagaagaagcctctggacactgccagagatgggggttgagcctctggcctaatttcccccctcgcttcccccagtagccaacttggagtagcttgtagtggggttggggtaggccccctgggctctgaccttttctgaattttttgatcttttccttttgctttttgaatagagactccatggagttggtcatggaatgggctgggctcctgggctgaacatggaccacgcagttgcgacaggaggccaggggaaaaacccctgctcacttgtttgccctcaggcagccaaagcactttaacccctgcatagggagcagagggcggtacggcttctggattgtttcactgtgattcctaggttttttcgatgccacgcagtgtgtgcttttgtgtatggaagcaagtgtgggatgggtctttgcctttctgggtagggagctgtctaatccaagtcccaggcttttggcagcttctctgcaacccaccgtgggtcctggttgggagtggggagggtcaggttggggaaagatggggtagagtgtagatggcttggttccagaggtgagggggccagggctgctgccatcctggcctggtggaggttggggagctgtaggagagctagtgagtcgagacttagaagaatggggccacatagcagcagaggactggtgtaagggagggaggggtagggacagaagctagacccaatctcctttgggatgtgggcagggagggaagcaggcttggagggttaatttacccacagaatgtgatagtaataggggagggaggctgctgtgggtttaactcctgggttggctgttgggtagacaggtggggaaaaggcccgtgagtcattgtaagcacaggtccaacttggccctgactcctgcgggggtatggggaagctgtgacagaaacgatgggtgctgtggtcctctgcaggccctcaccccttaacttcctcatacagactggcactgggcagggcctctcatgtggcagccacatgt

SEQ ID NO: 10699 - DNA, 1416 bp, Homo sapiens
cgttgccacatccactgtgttcctccttttcctcctccctgcccagtcaagagagttggtcgtttattcctcttttttcagcatttcccacagggcactgtaataattcctttgatgcctagccccccactagactaactggagaggggcccgccgcttcctgcctggtgtctagctcacagaggggacgcagggagtgcaggttgcgtgagtgcctcacctgcttccttccctcgctcatctcctctctttgctgtgccccaggccatgaggtttcctcccaaatcgtacaacaaggacttggagtctgcagaggtaagctctctgctttctgggtgagaccgaaaggtcaaacttccacacagaaggggagtcgggcgagtgtctggaagggctgagctgctctgaagctttggcctcacttgcctctctccccaggaacggcgtgagcgagaacagcaggacttggagtttgccaaggagatggcagaagatgatgatgacagcttcccttgagctggggggctggggaggggtagggggaatggggacaggctctttcccccttgggggtcccctgcccagggcactgtccccattttcccacacacagctcatatgctgcattcgtgcagggggtgggggtgctgggagccagccaccctgacctcccccagggctcctccccagccggtgacttactgtacagcaggcaggagggtgggcaggcaacctccccgggcagggtcctggccagcagtgtgggagcaggaggggaaggatagttctgtgtactcctttagggagtgggggactagaactgggatgtcttggcttgtatgttttttgaagcttcgattatgatttttaaacaataaaaagttctccacagtgctttgtgcatcagttactatacttcactgcagtattggcaggctcagattttgggttttttggccttagagtactagccccaggtgtgtaatctgagggcgatgggtctgcagatggggaggtgcccaggggaggatgaagggaccctgacctggggtcgggggcctaggtttactctcttttcgtacttgtgtggctttggtaaggtcttgttaggaaaggtgtaccatgtgtccatcaccagctgcagaccttcatctcccaatacacctcatggtgcttcacggttattgcagtttttacaaattgaaggtttggccaggcatggtggctcatgcctgtaatcccaacactttgggaggctaaggtgggcggatcactaaaggtcaggagtttgagaccagcctggccaacatggcaaaaccccgtctctactaaaaataaaaaaatcagctgggcatggaggcaggcgcctgtaatcccagctacttgggaggctgaagcaggagaattgcttgaacc

SEQ ID NO: 10700 - DNA, 1190 bp, Homo sapiens
caagcacccctcgcctggtgccaccctgggagactgggctttggggagcccagtcagacacagaaagctcctggggcacctctcactgtccccctttttctggaaccctttgccaggctggccgtgtggtgtgccctcagttcctactcctcccacaagggacaggcgtccacccgccagaagaagagacaccgcgaagacattgaggtaggccccccagctgccctcgccggcttcacttgttcaccggtttgttacagcatttcctaaggattccccaggcaaagggaagcagttgtggcccctgcccttggggcagctgtgcctgggcatgattggtcaggaatctgcatgggtgatttgtgtggccccagcttgcccatgggcacaaggggcctgtcagattgtgggaggggttgagcagagaggggctgaggccctgctagccatgctgacctcgctcaaatcggagctcaagctcttttccctgacagctggaaactggggggtttaggggtgtataacagtgactttcactccctctaggattatatcagcctcttccccctggacgatgtgcagccttcgaagttgatgcgactgctgagctctaatgaggacgatgccaacatcctttcgagccccagtgagtgtgtgggctggccgcgcgccgctccttttcctgggaattcactccccgatgctgccactctgccgctgccccagctgcaggcatctttgcagctggtcagagagggtgtggcagggacctgctgttctagcccccaagggggtgctctgtgtcctgcccctggagaagaggttgctgttctcactccctgagggttgaagctcctctgcccaggtccagcccagcccacagttgttcccccacagccctcctgcccctcccttaccccagggttgaggggatgacaagctacccaagtgagtgagttcactgcctcaggcacagcctgtgccattgactcaccagctctgaccttccttccttccttcccccaaaacatgcccggagaggcccgggctggggcatggggctactccccaccttcctgcctaaagagcacaccccccaccaaccacttccctggaggtcatccttttcactgtcccctcctccctgccaggcttactgccaagggttccttctgtggcatttttcctgt

SEQ ID NO: 10701 - DNA, 2453 bp, Homo sapiens
tgtaactaatatatggtgataaatagcttatcagctgcttttctttacacagaacctggatgacagtgtgttttcgaagcggcatgcaaaactggagctggatgagaagagaaggaaaaggtgaggccagagatgtccatcctggaaacaactgagccctaggacctaggacagagtatcagggaacctgacctccctttttcatgctgtggagaatcttggagtgcttaacactcttacattactggcttcccagttggttgaatatcttagttggaaatggtagttgttgcggtaaacatgtttggcctctttttgtgtatgaccttcctcaattctactttctgtggaacaccaacacatgatctaaacggtagacctaaacagctctcccttaacaaggcagtcatttctctttaccctgtctagaggagtcagcaagggtcttcctagcatctggattgtgtgagttgcttttatagagcaggttttgggtaaacagtaatgttgggtttctttgttttgtttggtttgtttttcccagatgggatattcagaggatcagggaacaaagaattttacagcgactgcagctcagaatgtataaaaagaaaggaattcaggaatctgagcctgaggttacctcatttttccctgagccagatgatggtaagttgtgtccatctaaaagagtaggtttttgaaagaaggaggagggtgcaaggctccagggtacaacttgctctgaatgaatgaagtgtattttggagcagatatagcttctagacatttcccatctgtattactaatacgctcccgtttgactttctcccatagttgaaagtttgatgattacccccttcttgcctgttgtagcatttggacgaccattaccaaaattaactccacagtaagtatacattttttttctccccttccaggtaacctgcacatccttttcagacttcatggaagcctagatatgaggtggaaccaggtggcttagggatagccatgggtctttgacagaaatgaggctacctgggcaactagcttttgtaataagattcccaagccaataattaggagtattgctttttgagttagaaatagatgattccatcactttaatggtacacagttgctctggctttgaggcaggaaagacactccaaactagtcagggataggagtggtaagggacatagtgacttttttgtagttgctatcatgtccacactgaatcccttctagtcttgcaagttgatttcctcatccttttttgccaggaattttgagctaccctggttggatgagcgtagccgatgcagattggagatccagaagaagcaaacacctcaccggacgtgtaggaaatagctgtgctggcaagaaccctgtcttcagatagttgtagcatgccattcccgagagtggcagagacctgtatatgtgacctttgtcctcacatatgttatcactcgctgataataccctttcatacttccttgactttgttttcattactctgatttcacaaaaactctttcattcggctaattgtgagttatggagggtgattgggatttcttttcccttttttgggaaatgggctctcaagctaaagctataggatggcagattcagaagtttcaggggtctgtttctatacatttgcctatgttaaaggggtaaaagggctctcttcattagacatgtggaagatgaagcagccccttcctttagagctgtgcctgcatggcactcttctcaccctggtacaccctccttatagtgggtatagtgatttttaaccctaaaataaaacaaacaacctcaccatgagctttaggaccagaagaggaatgacaagtgaagcgatgaagcaagccatcttcacagagtagaaaagacatcggagagttggtagataactgtctgaaaagatagttgttcatttgaaactattctgtgatacagtcatgtgggaagggatgtttggctgtgattattttttcagttaatggataacaatttctttactgctcaaaaaccaaaatctttggaaaagaaagtggggatggttagtttcagaacaagttacagctgtaaacaaaagcacttagtatttgggatggcatgccaaaacctgtataaatgtccttgtatcacatcacttctcaagtattccttcattgggcttcatccttttagcagaactcttggtggtgggatagagacttagggagggtagggggagagtgtggaaataggtgcttcctttggctggcaaatgtctacatcttgaaacaaacagatgtacctaatgagcttctccattcactttgtaaaaataatttgtatgtgtaccatcttggtcctctcccctcccgttttgttaaaatatcaggatagcactcccaggccactttggtctcagtgtaagatcccta

SEQ ID NO: 10702 - DNA, 2614 bp, Homo sapiens
ggatatctcaggaggcttaaaggagtcctgaaatttgccagtttgtttgtttggcaagtgtattgggcagggttgaagtagaaacgattgttaacatgacagttttcaattgggaagctacaaggaaaaaatacaggaaggcagtcaaggaaaagggaaatctaaatttgagatgttatagcagaaaaaaccagttctaaagatcatagaggagaaggactgggggttttgttgcttttgtttaaggacattacttaaaacacattatttagaagtgtggctttttgaaaacagcttgtgaatgcccagaaggcccactaacactttggtggttcttccctttttccaacccctgtcagagcagcagaggtgagaactcagaagagaaatacagctggctatctactaccagaagggcttcaaagatatagggtgtggctcctaccagcaaacagctgaaagaggaggacccctgccttcctctgaggacaggctctagagagagggagaaacaagtggacctcgtcccatcttcactcttcacttgagttggctgtgttcgggggagcagagagagccagacagccccaagcttctgagtctagatacagaagcccatgtcttctgctgttcttcacttctgggaaattgaagtgtcttctgttcccaaggaagctccttcctgtttgttttgttttctaagatgttcatttttaaagcctggcttcttatccttaatattattttaattttttctctttgtttctgtttcttgctctctctccctgcctttaaatgaaacaagtctagtcttctggttttctagcccctctggattcccttttgactcttccgtgcatcccagataatggagaatgtatcagccagccttccccaccaagtctaaaaagacctggcctttcacttttagttggcatttgttatcctcttgtatacttgtattcccttaactctaaccctgtggaagcatggctgtctgcacagagggtcccattgtgcagaaaagctcagagtaggtgggtaggagcccttctctttgacttaggtttttaggagtctgagcatccatcaatacctgtactatgatgggcttctgttctctgctgagggccaataccctactgtggggagagatggcacaccagatgcttttgtgagaaagggatggtggagtgagagcctttgcctttaggggtgtgtattcacatagtcctcagggctcagtcttttgaggtaagtggaattagagggccttgcttctcttctttccattcttcttgctacaccccttttccagttgctgtggaccaatgcatctctttaaaggcaaatattatccagcaagcagtctaccctgtcctttgcaattgctcttctccacgtctttcctgctacaagtgttttagatgttactaccttattttccccgaattctatttttgtccttgcagacagaatataaaaactcctgggcttaaggcctaaggaagccagtcaccttctgggcaagggctcctatctttcctccctatccatggcactaaaccacttctctgctgcctctgtggaagagattcctattactgcagtacatacgtctgccaggggtaacctggccactgtccctgtccttctacagaacctgagggcaaagatggtggctgtgtctctccccggtaatgtcactgtttttattccttccatctagcagctggcctaatcactctgagtcacaggtgtgggatggagagtggggagaggcacttaatctgtaacccccaaggaggaaataactaagagattcttctaggggtagctggtggttgtgccttttgtaggctgttccctttgccttaaacctgaagatgtctcctcaagcctgtgggcagcatgcccagattcccagaccttaagacactgtgagagttgtctctgttggtccactgtgtttagttgcaaggatttttccatgtgtggtggtgttttttgttactgttttaaagggtgcccatttgtgatcagcattgtgacttggagataataaaatttagactataaacttggctcccttgccagtgttttgcatgagtcttgatttgggagggagggaagaggactccctaattcccccacagggtcacggtcacaactcaggtcagcccaagttgtgaaacagaagcccagagagatgaggagcccctatgaggccataaatgtgtctgcactccccatcagttatcttttttaaccacatagatcaccaggatgtcatgccatcccttagattggaagtgtcagggacagaaaagtagtgagatgctggttattcacatgagcatctagtatcctttatggcttcctttgtgtttggcaagtaagtttcccaaggtaatatgccatcagatgtcaatataactataccaagtcctgggttggggggaagtacaggtagctagctttcttgaaaagtgaagatgctgctggccaccgtggctcacgcctgtaatcccagcacttagggaggccgaggtgggcagatctcgatcagggagatcgagaccatcctggctaaacagggtgaaacactgcctct

SEQ ID NO: 10703 - DNA, 1193 bp, Homo sapiens
cagcagagtacagaagggtgaagaagtgagcagaggcttatgaagatattcagatactcttctatgccaggaagcacaaagactttgttgagatttgcctcagttcagtagatcttccttggcagccagccataggttgtttctttgtcttccgggtcctaaagagcacagagaaaatggaggtccccagtctaggtaggaagctgattggatgaggacttctttttttccgacagcaggatggggctcttgggctccacacaccagatgctttggttttctacaactgttgctatgtgtagagggtgctcagagcgtggcatgagagcaaggagaccatggctactctttgaaatggatggggaaaattagcttaaaaatttaatcacgagattgcgccactgcactccagcctgggcgacagagccagactccgtctcaaaaaaaaaaaaaaaaaaaaaatttaatcacacacatcacaggcttaaactgtcttagagacctttccagttgattggatcacaggctagggatctgtgcatggtgccaggtgaaacccaagtctccccagtgctaggtgagggagggctcaacgggggtaatgtgtatggggtctgctgtcctttgccatcccctggaccatattaactctgggacagaccatgattaggtctgtcaccaaacttttcctaatcattttttatgtatcattcttctttctaatctgttagcagttatctcccagaagtatccctagcatcctgaagcaaacagaactgccgggcgctgtggcttatgcctgtaatctcagcaatttgggaggccgaggcgggcggatcacctgaggtcagaagttcgagaccagcctgtccaacatggtgaaaccccgtctccactaaaaacacaaaaattatctgggcgtggtggcatgtgcctgtagtcccagctactggggaggctgaggcaggagaatcgcttgaatccaggaggtggaggttgcagtgagtggagatggcgccactgcgctccagcccgggtgacagagtgaaactccatctcagaaaacaaacaaaccaaacaactgagagagggcatgctagtggagggaaaaggagagagtacaagagttgatactgcatcagagttccagggcagatactgacaagtgactgaactttgactgtgaagtcttc

SEQ ID NO: 10704 - DNA, 1825 bp, Homo sapiens
ccccagcttttcactggggctgatatcttcctccccatggcccactgccccctcatattccccagcacttggactgtgtcacatgggtattgattgtatacttgttgtcttggcctcatgcaaaaaggcctgggtctagatctagtcagatgagttttttttagagcatgttgatgatacaacacctgtttaaatgtctgccttatatgttatttggtcccactgttaataatagatttattactatgtatatttactattgaagatgggaatgtgatctgcatagttatcagtctattttgtatgttgtaaaaagcttctaatttaggtttaaggtgggctggctacaagagcactaaaactcctcaccttttaaactgctctttttatctgcttgtgggaatgtcgtctctttcgtggaagattgggtggtctcatgttgaggctgttgcccagtcccattaactcccttgtccccccacagaaggaagagacattgcccagctaagcatcaggaagctgtgttaaaagcccttctatgggtttggttttgtgatgtttttccctaatgggaaaaacgttatagttgtttcttactgccctgtctgggaagcagggcaaacctccaggtttttaaatgagctagatgcccctcttcctcttctctggtcactgaacctggaccaaagcactttgatattccaggtgtgattttctctgtcatggggatttgctccactgcagagccccatcattttcacagcgtaggccaacagagtgagaacctagggctaccctagctgatggatgtgaggctgctgtctacaggagctcatcccagccctgttaactggcagtggcaaggatactcgtcatcggccattgcactggggaactccctcaccccatggcttcccaacttgaaacccagatttacctccagggagaggtgagaaaaaaattgtaaatagacttgctaaagagcaactcagggttggggtgtgttttaattctcctgatcacttgaaataatctgtaggctgagtgcttatgggggtgggggagaagggtgactccagggtccttccattttgtgaagctctgggggtggagtgtgggcatctgaggccctatgatggcactacattgagctgtctgcccttccggaaacccaacctgcaatcaactgcaaatcaaattcttcacattccagctacagtctttctttccccattgaatctcagtccctggccatgtggtcaaggtggctttctgttaagctaccctaatttcgggaatgggaggggagagaggagggccattacaactctgccttcaagactcatctcttaaaaacaaaacgaaacaaaactacaaccaccatcaaaaccacacgcaaaaaaaaaaaaaaaaaaaaaaaggataactttaaccgaaggaagggtttggttccattcaactccacattcattgtgcctttacttgcattagatttctgtgctttcttcctttccctctttgaagcaattaaaatcttccttgataactgctgtttctttctactcttgtttctggcaatttagtgggttccttctctagtggtcttaaatctcattccactggtggcaagatggggcctagccttcttttcacatgtctaatcttttcctttctcatggtgccctccatggaagtcacagtcaacactgaataaatgactagaatgacacgtgtgcgtgcgcacgcgtgtgcgtgtgtgtgttcatctgtctgcatgtggatcaatttcttttagaaaataatttattgtatgatttattttgga

SEQ ID NO: 10705 - DNA, 1681 bp, Homo sapiens
gcaagttacctgggcttttctcttttagaaatccaagggggagagtgatgacttccatatggactttgactcagctgtggctcctcgggcaaaatctgtacgggcaaagaaacctataaagtacctggaagagtcagatgaagatgatctgttttaaaatgtgaggcgattattttaagtaattatcttaccaagcccaagactggttttaaagttacctgaagctcttaacttcctcccctctgaatttagtttggggaaggtgtttttagtacaagacatcaaagtgaagtaaagcccaagtgttctttagctttttataatactgtctaaatagtgaccatctcatgggcattgttttcttctctgctttgtctgtgttttgagtctgctttcttttgtctttaaaacctgatttttaagttcttctgaactgtagaaatagctatctgatcacttcagcgtaaagcagtgtgtttattaaccatccactaagctaaaactagagcagtttgatttaaaagtgtcactcttcctccttttctactttcagtagatatgagatagagcataattatctgttttatcttagttttatacataatttaccatcagatagaactttatggttctagtacagatactctactacactcagcctcttatgtgccaagtttttctttaagcaatgagaaattgctcatgttcttcatcttctcaaatcatcagaggccgaagaaaaacactttggctgtgtctataacttgacacagtcaatagaatgaagaaaattagagtagttatgtgattatttcagctcttgacctgtcccctctggctgcctctgagtctgaatctcccaaagagagaaaccaatttctaagaggactggattgcagaagactcggggacaacatttgatccaagatcttaaatgttatattgataaccatgctcagcaatgagctattagattcattttgggaaatctccataatttcaatttgtaaactttgttaagacctgtctacattgttatatgtgtgtgacttgagtaatgttatcaacgtttttgtaaatatttactatgtttttctattagctaaattccaacaattttgtactttaataaaatgttctaaacattgcaacccatagaatgcctcttttaaaacacacactacacccttttccttattctaaaatatagtcttcacttccctttcagaagcattccaatcatattgtgacagaccttacagcctctggctaaggtgataagtccaagagataggcattaagacctaattaaggccaaagactctttattgagattttatacatgaggactaagttcttcatctccaccacacttgatcagtaaatatgcatgtatcttttttttttaatgataccttcctttaacaactattttgataacctagtcaactacttgatggtatcagtaagatatattgaggcaactggctaatccatttagaaaaaaaatcagataaatctctttcacaccttacaccaaaattaagttcaaatagatgaaatatttaaatgtcaaaaactatttaaaaagtaactataaaaaaagtaatcttgagttacagagggataaactgaacaaaacccaaaagtagtgttgacaaagatatggaggaattagccc

SEQ ID NO: 10706 - DNA, 1170 bp, Homo sapiens
aaacagagaccatatctgtctcttttcacgattgtattctcagaactatcacaggagttaataaatttgaaggatggatggatgatagatggagaaaagtgggtctaatatataaaggtgattaatttctatctcccctctaggtacaaagacaaagaaacaaactacattggcatttaagccaatcaaaaaaggaaagaagagaaatccctggtctgattcagaatcagataggagcagtgacgaaagtaattttgatgtccctccacgagaaacagagccacggagagcagcaagtaaggaaaactaaagaacattatagataaactgtaagagtggaatggccaatatacttcagggtactttgccccagaaattactgtgtcttaatagagcagtaaattatgttaaagctttgaaacactgaagcatctttcaggagatttaaaaactaaaatattcatgaaatgttatgtcaacctatgaattgtttctcctactaccctctttgatttttttgtatatggtttttttactagcaaaaacaaaattcacaatggatttggattcagatgaagatttctcagattttgatgaaaaaactgatgatgaagattttgtcccatcagatgctagtccacctaagaccaaaacttccccaaagcaagtatcttatctaatatgggttttgtcatgattgtttctaatatattgttttttgcttgacacatttagaattggttgtcaggatttttttttttaattctagacttagtaacaaagaactgaaaccacagaaaagtgtcgtgtcaggtatgtatttaagtaaaagtagtgagacatctgccttactgggacactcagatccaactgggttctaatcctggctacattatccaagtacttcctttggaaataaatttgagttcttattaacattatgttgatactgttcactgggtttagtttcacatgtaaataggtactgcattcagtatactaaaagtaatcatagtgcttgccaggtactttgctaggtgctagagatacaaaaaataaaaactgttcttgctgataaaaaattcagaaattagaacaaagttttaagagtatgttttaaatattccagaaaagtcacatatttggtgtttaaataggaattcataccag

SEQ ID NO: 10707 - DNA, 1154 bp, Homo sapiens
cagcctcccgtgttgctgggattacaggtacacgccaccatgctcagctaattttatatttttagtagagatgaggtttcaccatgttggccaggttggtcttgaactcctgacctcaggtgatctgcctccctcagcctcccaaagtgctgggattacaggcgcgagttactgcacctggcgccctcagtgtcttttctctgctcaaatgttttcctatcagaaacggcttaactttccttagcacctcttcagtcactttcccactttttcttctcttgtttatcccaccacctaacaaaatatgtgttaattgcaaacttctactggactgtgagctccttgaggattgagactttatgtccatgtgcgtgacacatagcaagtgctcaataaatattgttaaatgtatattagtcagcaagtaaaaccaagataattttcatgtataatacatgtcctttccataaaagttaagtgtgaaattcagtatttttgtaaaataacattctttgtttcttttctttagctctttggctcgattgttatttccaccaaaagatgatcacacgttgaagtttttatatgatgacaaccagcgtgttgagcctgaatggtacattcctattattcccatggtgctgataaatggtgctgaaggaatcggtactgggtggtcctgcaaaatccccaactttgatgtgcgtgaaattgtaaataacatcaggcgtttgatggatggagaagaacctttgccaatggtaagtattctgtgtgtgttaagagccttaacttttccttgggtttcagttgaatagattgtatgattaaagatgatgcaaacataaaatttaatttcatactttagatttattgttaaacgctgttgtgatttccgtctagtatcacatttagaaaacatactgtttttttaaatgccaatttagcttccaagttacaagaacttcaagggtactattgaagaactggctccaaatcaatatgtgattagtggtgaagtagctattcttaattctacaaccattgaaatctcagagcttcccgtcagaacatggacccaggtaaataattatggatttcttttttaggtttgtgatcaaaagaaataccttttgtactattgctgttgacta

SEQ ID NO: 10708 - DNA, 1315 bp, Homo sapiens
cagcctggacctcccaggctcaagcgatcatcccacctcagcttctggagtagctggaaatgcaggcagcaccaccatgcccagctaatttttttttttctttttaatagaggtggggatctcactatgttgcccagggtggtcttgaactcctgggctcaagtgatccacccacctcggcctgtgtcctttaatgaccattcccttatgcctatcagtgaacatcattgcattggttttggaaagtcctcatagtctatcattgaacctattttttaataactttcttaatactgttacctttaattcctgtacaggtaaaaggatttcgtagttatgtggacatgtatttgaaggacaagttggatgaaactggtaactccttgaaagtaatacatgaacaagtaaaccacaggtgggaagtgtgtttaactatgagtgaaaaaggctttcagcaaattagctttgtcaacagcattgctacatccaaggtaattttattcttaaattattaatcatgatttatctttacatatatgtgttcttattgtttttaatatataaagtggacttgaatattgggctagcttagtataaaggaggttaaattagtttttaatgtttgattattataattttgaggatactgagttttacagtttggtatttttccttattagggtggcagacatgttgattatgtagctgatcagattgtgactaaacttgttgatgttgtgaagaagaagaacaagggtggtgttgcagtaaaagcacatcaggtatgtgcttttggcagttttctttttctaaagtcaaggaagaagagaaaggctataaataaagcatgagtacatttttagtggcttaatatcaacttctattgcaggtgaaaaatcacatgtggatttttgtaaatgccttaattgaaaacccaacctttgactctcagacaaaagaaaacatgactttacaacccaagagctttggatcaacatgccaattgagtgaaaaatttatcaaagctgtgagtacttagaggaaaataaaaatagaaacacctgactttattttccattgcacttcttagctctgcagaaacaatgattcttctcatagtgagcttctccaagtcttcccaatctgaaaaggaagtaaaaaagggctttactttaactgatttaccaaagacttaatgaccgtctatatttcagtatttcccaattacattttaccattaagcttagatcacttttgaattaatctagctgtttaacaaacaccctcacttaaatgcctaagacttgctttcagt

SEQ ID NO: 10709 - DNA, 1208 bp, Homo sapiens
tttctttccattgggcataaatcatttccctctgtttatcctaacattttaaaattttgtattttttcaacattatcagtgtctattcaggtgttggaaaaggtttttttttcctcttgactcctatttcaggaatgtcaggaactaagcatggtgggaaatgttcctgctgaatttcagaaggtatatatgaaaagtgccaaaaaaattgagggctgggtatggtggctcacatctataaccccaacactttgagcagttctcctgcttcagcctcccaagtagctggaatcacaggcatgcgctaccatgcctggctaattttttttatttttagtagagacggtttcaacatgttggccagaactcctggcctcaagtgatctgccctcctcagcctcccaaagtgctgggattacaggcacaggccaccgcgcccagcctgaatatacatattttagaaataatagtatttaaatatttttaaatgttaagcattcgtttaatgtgttgtaaaatacaattttcaatctttttttcttagggaaaacaatttaattagtatatggaataatggaaaaggtattcctgttgttgaacacaaagttgaaaagatgtatgtcccagctctcatatttggacagctcctaacttctagtaactatgatgatgatgaaaagaaagtgacaggtagagtattgaggggaaataacatatttgttgctaaaaatatatatatttaaatgactgtctgtggcatgagggttaaagatatggaaataaatctctataattgaatagctctgccagtgattaagaaataaagctgtcaatgagatagtaacaataaaatagtgtttcatatttatttgcccaggtggtcgaaatggctatggagccaaattgtgtaacatattcagtaccaaatttactgtggaaacagccagtagagaatacaagaaaatgttcaaacaggcaagtaaataagtgtcttgtaccttaatgataaatggtagtagtatagccatttataatggcattaatgattggtttaatttaacataatttataagctattgaagtatggaaaattataagcatatatattaggttattaggactcataaatttatgttatttacttccagtttgtgagatgacttgaatttttcatgtttcctattctttacttccatagacatggatgg

SEQ ID NO: 10710 - DNA, 2463 bp, Homo sapiens
cggcctggcccaagccctgacgatttcagtgttgttttctgcacgcgcaaaacacctggggaccgaggggatggcagtggcatcctatctttgacagctctgaacgagcttaaccttttttttcagacccctttgctgatgcaagtaagggtgatgacctgcttcctgctggcactgaggattatatccatataagaattcaacagagaaacggcaggaagacccttactactgtccaagggatcgctgatgattacgataaaaagaaactagtgaaggcgtttaagaaagtaggtcttcagtgagattttgggaaagtcataatggatttgtccacaagggggtgccagctgtgttgtatgtattgttagcggaaggggtgataaatgcgttcatgctcttgctaggcctaattcgttttcctttgtgcttgcagaagtttgcctgcaatggtactgtaattgagcatccggaatatggagaagtaattcagctacagggtgaccaacgcaagaacatatgccagttcctcgtagaggtgagttcagtcactacttgatttgtgcctctctgctggcaaatctcagatcctgtctgttagcttctgctggggacataaaagttggctttgtaaggctgagcaaaacctcagttgggttttaaagtacatagacttatttctgttttataggaaaaagcagaagggacttgtctacctttggtttactgtttctgtggatctacttcacagatgcaaatttgaatagcatatagatgcattgtaaaataagccaaatgctgggttgttcctgtatttgtaaggacatgagtttttaaaaatgaatttcctgagtattaatactaaaatactgttacatgatcagctcttgatataattgaagagatttcagatacctgatgagtctcattctcacactaattcagaaccttggaaggcactgagtgttcaaaaaaggtagctcttaactgaggaccctctgttgaaccattgtgcgcacccctggctcttgggcagtgtagtagcaggaagacagggttgttgccattagaaatggaggctttaactctccctgtcccccatttaaaactttgcccttttgtcttttcagattggactggctaaggacgatcagctgaaggttcatgggttttaagtgcttgtggctcactgaagcttaagtgaggatttccttgcaatgagtagaatttcccttctctcccttgtcacaggtttaaaaacctcacagcttgtataatgtaaccatttggggtccgcttttaacttggactagtgtaactccttcatgcaataaactgaaaagagccatgctgtctagtcttgaagtccctcatttaaacagaggtcaagcaataggcgcctggcagtgtcaagcctgaaaccaagcaataccgtcatgtttcagccaagcccagagccctaagattacaaacaactatggccggaacctcctcagctctccctctgcagagttccctaccctaagagaatgttaccacctgaacagtcctcggtgaatctgagaggagaggatggggtaaggcagaagcaccagctgtactactagaagggagcttttggtggtagatcccctggtgtctccaacctgactaggtggacagagctcaaagaggccctcttaccgctagcgaggtgataggacatctggcttgccacaaaggtctgttcgaccagacatatcctagctaagggatgtccaaacatcagaatgtgaggccaaccttctatcagagttaaacttttgacaagggaacaaatctcaaactgatccatcagtcatgtagctagctgtagagcttgcaacttaatagcagcagctgcccaatgccatgtgaagtaacaaactggtttttggtttttttttccccttcagttttaatgttatgtgtaatgtatttaaacccttatttaaataaaacttgttttcagaaatacctgacttgcagattatttatatatagtcgatcttgtgcatataaaggaaccatagaaatgggcagtggaggattcgtccacacccacagcttctcaacgggcctgaatttggccaagaaaaacctttatgagcttgtccctctctggtcaactggttttttgttcgtttgttttttgagacaggtttgcccttgttgcccaggctggagtgcagtggcacaatctcggctcactgcaacctccacctcaggttcaagcaattgtcgtgcctcagcctccctagtagctgggattacaggcaccatgcccagctaacttttgtatttttagtagagacagggtttctccatgttggccaggctggtcttgaacacctggcctcaagtgatctgcctgtcttggcctcccaaagtgctgggattacaggcatgagccaccatgcccagcaggtcaactgtttttgcaag

SEQ ID NO: 10711 - DNA, 1746 bp, Homo sapiens
acacagccggggtagatctgagcccgtcctctctactcctgtgctgtagcaccttcactggcccatccctcccctctagtgctgtcctggtacccgtcccagcctgtccccattctcatggccctttggtcactgccgggtggaatagcactggcttcagcaggcgtgtcatgtaagcttgtgcaggttataaactgaaccatgacctttatggcgcatgcagggggcaacctgcataattatcaatggcgactttccgtgtccttctgatacagttgatcagacccctgcccaccgcccaggccaggcctgtggtcatcaatgccccagttcacatccacctgcttctcttccaggctttgctgttccccagcagcctgcagaggccccacagacagcttgaggcccctccttctgctgcctggccaagccccacacccgcagaccctccttcccatcctctgaaatgggaccctgtgtctgtcaccagcccaccctctgtgttcatgaacctgggctggagcttggggacccctccctgcccctggcttcctcttccatgttctgccctttcccacatgttggaggcttttccaacgtcttcagggacaggcggtaggaaccccggccctcgctctgcagctggtgcaaaagctgtggctgccaggtctgggccacatggcagcccagggggcaggagaagcccgggagaggcccactggctaccagactcagccctgagcagggaacagggcccagcttccaccggcagggagttgtgagcgccttcccaacaatgtgcccctcaccccttgatgcccatgctaatggtagccaccctggttcttgttgacttgagggacctggctgtcttccctgttcttcatcctttcttctcagtccctacctactgtttgtaaccacaagtgtctctgtgtgtgggtgggtgagggcccctctgcccagtggtgtgtctcctctccctccctccctcttctgccagtggcctgggggtgtccaggctcccatccgtggcccagcccctctcccctctgtcttgatccccccctccctgcccctggcttcctcttccatgttctgccctttcccacacctttgttcctcaatagctgggggctgggactgaggcctcctgcaggtacctgccccccttcacacagcacctctcaatctcctattgcttgtcagcctgtgtgcgtgtggtgcaggaaataaaggatctataccctcctggcccagcctccagctgtctctctagggagtgtgtgtgtgcacttggcagggcgaagttgtagagaaagggtggatgctaatattgaagtatgtgccgaggactcctattaaatacgccgtttaatcatagcagcagctcctagagggcggtgggtgatgtcataagtgtctgttggatggagaaactcaggccagagtaggttaagtgatgccctcaccagcagatcatggctagtgtggagctgggatttgagctcatgcttccctgatcctttcaccccagagactgactcagtggcctggctgtgaaagataggatgggagagagtcacccactgtcttagggtgaagtccccagagcagacctggaacagggtttaggaacaagtatagtcgccctccgtatcctcaggctctgcatccgtggagtcaactaaccacagatagaaaatatttgggggaggctgggtgcagtggctcatgcctgtaatc

SEQ ID NO: 10712 - DNA, 1116 bp, Homo sapiens
gaaggctgtgcagactgctccctgcagggtagcttgcagaccctaggaccgagccccactttttgtccccagacatggatgccacctaccgccccatgtactccagcgatgtgccccttgacccgctggagatgcacatggacatggatggagactaccccatcgacacctacagcgacggcctcaggcccccgtaccccactgcagaccacatgctggcctaggcggcctggccccagtacggccccctctttgcaggcttttcctcctctctagaacctccttctgttggaggccctcccatctccccgctgaaacctgcgctccttttttggggggatcctttgctgctgagcttccccaagcacggtgtgccctggcctgccttcttcttgtgtctttggtggggatggggaggcctattcctgctggccccttctgggggtggtgggcaggtgacacggagtggcttgagcttctggggatgcaggtccaccgagcccctgacccctgtctgtccccgctcccctaacaggtgcggttcctcatctgagaggctctccgtgcaggcgatggggcaagacagaaaagtgcctgagctggggaagccggggtgtaacttcctgctgcaccctgcgcctccagaggtcctccgtagggtctttcttgggatagtgttctgctcctgcttttctgtcctgggcatgggtccagggcctgacaccccctccccgcccctgtggccctggccactaaagcttcagactcaagtacccattctgttttcccccagcaacgcccctccaaacctccagcctccctgtctccagctgcctgggcccggaagggctttggttccttctctgggtctgattttctcactgaactccaccgaccaactgccctaagcccccagggcctccagggcccaggttcgagacccaaacccccaaaatccaaaacttctcttgaaaagttcagggaccgtccaggggagatggggaggagatatggagtgagtcacctgctccagaagatgccagcttctctctccagggtgcttagttggctttgcccacccctcactccccagggagctctggggacagcttcctc

SEQ ID NO: 10713 - DNA, 1207 bp, Homo sapiens
gcctgcctgtatagtgggaggattgctaccgttggggatgatgagggtgtaattagactcctgagatttcagggttgaaaacagacctgatgggtaagggaggagaatagagtaggggtttgggcccctgagtcaggctgccttataacccctctgtgcccagttttcccatctgtaaagtggagccagtgatagtacttaccttgcagggtcgttgtcaggttatgtgagaaaatataagcagggcattgaattcactgccaggcacataataagtgtgcaaaaaaaaaaaaaaattcccttgatggacagaacatgtggggcctattttacagagattactgaggtgatggtgacttccccaaggttcctggtgagaggtagaatggccagtcatgtgctgggggtttgggcagggcaagaggtagcccagaggacccaggtggggctgtctgtggcctgccctgctccccagtgtctgcccagcccactgcctgcactcagtccctgtccccatggcccccaggtgatctggagtaccagatgtccacaacagccagggccaaacgggtgcgggaggccatgtgccctggtgtgtcaggcgaggacagctcgcttctgctggccacccaggtggaggggcaggccaccaacctgcagcgactggccgagccgtcccagctgctcaagtcggccattgtgcatctcatcaactaccaggacgatgccgagctggccactcgcgccctgcccgagctcaccaaactgctcaacgacgaggacccggtctgtgagggtccctgctagggtgggggctgggcagggaggggagagagcagatgtcctcaggggagggacattgtaggggtggagggaggttatgacccagactctcccgtgtgtgatgagtctgactggggccctcctcagctctgtggaagggtatcccggcctctccttagtgctcacgtccccgcccctgcctttgccctccaggtggtggtgaccaaggcggccatgattgtgaaccagctgtcgaagaaggaggcgtcgcggcgggccctgatgggctcgccccagctggtggccgctgtcgtgcgtaccatgcagaataccagcgacctggacacagcccgctgcaccaccagcatcctgcacaacctctcccaccaccgggaggggctgctcgccatcttcaagtcgggtg

SEQ ID NO: 10714 - DNA, 1918 bp, Homo sapiens
ccactacctttttctcaatttctatttctttgtagttattttagtaaaagccatttggattctgagaagcactaattcttagctgtgataggtctatgcaagtaagacagaatcattaaatgaagctcactaaatgaagttctcatttctctccaacagactgtgctagcaaacttcgttttcttgattgtatttaaataatttagtatctcactacgataatagtttttaactggaagggtgtgatgtgttttttgttttttgttctcagagttgtcttctgagataattattaccaagtcatttgtggggttgtgtttttttcacatcatgtgacagaaattataactcataagatttaggcataatctggttttaaaaccttgattgaaactgttgttttttaacttagcaggcagcctaggccatggctgaaaagaaggggtaagtccttcattgcatgatgatgtgtgcaggttttcctgattttctaatttttatttttgaattcacatgtgtaatttcacatcaataacttgtgtttctgaaatatcctaactaacttgttaataaggaaagaaaccagatttgcttaaatctgttcaaggctgacattctgaaattctaaactggaaataacttcccagagtatttggaaaggttctaagtacaaggatcaggcctaaaatagctccttgggaaagaaatttcctttttgatgagaaaacttaaaatattgtttttggtaatgtaagcagttaaaaacatgactttagaaagacagcttaatgcgtattcaagcaaacctttgttttgttgcttttgcttttgtttgtagaagagagaggaagttattataccaaaaagtaatagtatatgtaactttgagtgaggctacttatatcttagaatgggtatccttgaactatatctaccccaccatggcttaaaaaaatcagtggtatatattgagaatgtcagtcatgagcttagtgtttaagtaacacatcccacttacagttgtttgcatgattagtcttgtgtatcatgatgttcaactttgcttttgctgtgccagttcaaaaatatcttttttgctaaaaactcttaaaattcatgacataagttttgttttgatcacccggttttatatagtatttctgggaccaaaaaatttaaatatacctttttaatataaaacagaagtttgaagctggaaagatagtgtttatggaagatttgtgtgcttttgtgttttttaaacccgtcaggctgctggtaaggcagtttctagggctcacttttcctccttacctcttgactagtgtagcatgtggtatgtttaaaatatttcattttctgctttgtaattctaaagtcaacactatactgtatgtagacaggagagctgatttgtatattttagttatttggtctaatcaagcataactaaagggacttcttttttgatacttttctcaaattaagtttaaatatagtatacgggccacatttcatgtctttgaaagtgttgtacattactgtaaaccaagtactctgtctacaccagagggtgctttaactgcaaaatatttgagaaacaattcagtctctcaaacattttggcacagttcatcactccagtttgttactttcttgagaatagtccattttttgtttttgttattgtaccgtatgttctggtcattggaaacagaacagctcatagttgggtgatgtaatataataacagtaatataacctagtagtcattttgcttcaagtaatttaattagatagcaaaatcactgcggtttgtttattacacttgtagggctttttatcttactcagtgaccatcactacgaatgtcttacattgaagcacagactgcagagcacttgttaacttagtcctc

SEQ ID NO: 10715 - DNA, 2309 bp, Homo sapiens
cgacagtggcaagatgtggaatctttgccgcttattgacaattactgctttttccaaatgtctgtggtcaattcaaacttttatcagacagcatcatgttgtcccaagagttattgtttagaaaacgaagaggcagtaagaaaaattgccagccaagtgtctgatgagatccttgaaagcttgcctccagaagtcctaagcatcgaaggagcagccatttgctattacaaagatgatgtcttcattataggaggctggaaaaacagtgatgatattgataaacagtatcggaaagaagcctaccgatattgtgcggagaggaagaggtggatgcttcttcctcctatgccacaacctcgttgtagagccactgcttgtcacgtgaggatcccataccggtacttgcatggcacacagagataccctatgcctcaaaacctgatgtggcagaaggaccgcatcagacagatgcaagagatacatcgtcacgccctgaacatgaggcgagtgccaagctctcagattgaatgctaggttctctcaagcgtgccgattaaaactgttacacccgtttcgtgaagctgaagatacccaggctgttatttaaaaaagtatgtcgataacttattttctacatgaactgattattaccccatataaaggaaatagagttaaaaactaaagaatgggagactcagttcaatacatggtcattttgttagcttgcaatttttgtctttggtttgtttgtttgtgctagctaaataagatcttattaaggacaagtggaaaaatcaggtgtagttgcttagctgttttcctgccaacgagttatgactcctttgtcttgaggacttacgttttgaacatgctttaagcaccaattttatttgcacatttactttgatattctttttcattttttattaaatgattggttttggcaagatctgacttctgcattgagccctcatctgcaggaggcatgtgcaatagtgagactgaaatttgaatgaaaacactcaatatttcagcaagataatttgagaatgtttgcattgatattttcttatgtttatctagaaatgccagtttccttcctagaagatgtgactgatgagaaattttttactggctcatgcattttttgaatatttttcattagcagctgtttatagactttaagccttcaatctgaggtgacggtagttggcaaaagtatagatctttagctaattgactaaatacagagcaagttacatgtgtgaactttgtttctctaagaagaaaagtattagtgtagactgggaaatcaaaggcatttaaaattttttcaacatttttttcaggagttgcaggattatttgaggatatgttaatgagtgtaaataatgcctatgacaatcgacactcaatgccttccattttaatttttgctctaatgcatattatatagaatcttcattattccttttctctttttttttttttttttgctcatgttgcccaggctggagtgcagtggtgcaatctcggctcactgcaacctctgcctgccaggttcgagtgattctcttgcctcagcatcccgagtagctgggattacaggtacccaccatcacgcctggctaatttttgtgcttttagtagagacagggtttcaccatgttgaccaggctggtcttgaactcctgacctcaggtgatacgcccgcctcagcctcccaaagtgctgggattacaggcatgagccaccgtgcccagtccattattcttttctacaagaaactgtttttttccaaaatgggaaggaagtcacaatttagagaaatgttgctaaagagaagccttattatttctgattgttatattttatccagttgccccacactttcaaactttgcctgagcctaggataccaaatttgggtacataattttggcttttaaaggtttatgggctgggcacggtggctcatgactgtaatcccaacactttggaggaggctgaggtgggcagattttgagcccaagagttcaagaccagcctgggaaacatagcaagatcctgtctctacaaaaagtagaaaaattagctgagtgtggtagctggcacgtgcctgtagtccttcctacttgaagccaaggtgggaggatcaccagagcctgggaaggttgaggctgaaatgagctgtgatcatgccactctaccttgggtgacagagagacggtgtctcaaataaaaattaaaaagatcactgaagctatcttttatttagttttatacgttattcgaattatcttatgtctc

SEQ ID NO: 10716 - DNA, 1646 bp, Homo sapiens
aagtccgcctcatctacctatacagtggatttggactaaacttcccactgctttgtgtctactttttttgtgtgttagaaagatttcccttccttagcctcttcctctcaccaggcttatgaagctctaataaaaaagatgtgtttgcttcattttaggacactatcttgatcagaagaggctgaagcaggggctgtatcgtcatccgtgggatgatatttcatatgttcttccggaacacatgagcatgtaacagagccaggaaccctactgcagtaaactgaagacaagatctcttcccccaagaaaaagtgtacagacagctggcagtggagcctgctttatttagcaggggcctggaatgtaaacagccactggggtacaggcaccgaagaccaacatccacaggctaacaccccttcagtccacacaaagaagcttcatattttttttataagcatagaaataaaaaccaagccaatatttgtgactttgctctgctacctgctgtatttattatatggaagcatctaagtactgtcaggatggggtcttcctcattgtagggcgttaggatgttgctttctttttccattagttaaacatttttttctcctttggaggaagggaatgaaacatttatggcctcaagatactatacatttaaagcaccccaatgtctctctttttttttttttacttccctttcttcttccttatataacatgaagaacattgtattaatctgatttttaaagatctttttgtatgttacgtgttaagggcttgtttggtatcccactgaaatgttctgtgttgcagaccagagtctgtttatgtcagggggatggggccattgcatccttagccattgtcacaaaatatgtggagtagtaacttaatatgtaaagttgtaacatacatacatttaaaatggaaatgcagaaagctgtgaaatgtcttgtgtcttatgttctctgtatttatgcagctgatttgtctgtctgtaactgaagtgtgggtccaaggactcctaactactttgcatctgtaatccacaaagattctgggcagctgccacctcagtctcttctctgtattatcatagtctggtttaaataaactatatagtaacaatgaaggcatactgctggctcctggcatccatatcctttgatctgtattcctttgtaactgtacttttttccagacagggtatcactctgtcgccccagggctggagtacagtggcaccatcacagctcactgcagcctccatctcctgggctcaagcagtcctcccactccagcctcccaagtagctgggactacaggagcatgccaccactccaggctaacttttgtattttttgtggagataaggttctgctgtatttcccaggctcttctggaactcatggactcaagcaatccatcctccttggcctcccaaagtgctgttacaggcgtgagccactgtgcctggcctggcctgaactgtactaatagtttcagtatatatggttttaaaaatgctcatctacggtcaggcgtggtggctcatgcctgtaatcccagcactttgggaggctgaggcgggtggatcacgaggtcagcagatcgagaccatcctggctaacacggtg

SEQ ID NO: 10717 - DNA, 1417 bp, Homo sapiens
gcgcggtggctcatgcctgtatgtaatcccagcactttgggaggccgaggtgggcagatcacttgaggccaggagttcgagatagcctggccaacatagcaaaatctcgtctctactaaaaatacaaaaattagcctggcgtggtggtgcgtacctgtagtcccagctacttgggaggttgaggcaggcaaattgcttgaacctaggaggtggaggttgcagtgagccaagatcacactactgcattccagcctaggcgacagaatgagactctgtctaaagaaaagaatcaggaggttttgccttagagttgtgtggtagtattagacttggattggtagttacccttcttggatttgaatgacttgtttagggagatgggggaaagtacgagcatggccttgtcgaccatctcctggcctttgttccccccactccaggttgcctaagtactcttgccagttcattgagatgtgtctgatggtgacagctgatcacgggccagccgtctctggagcccacaacaccatcatttgtgcgcgagctgggaaagacctggtctccagcctcacctcggggctgctcaccatcgtaagtactgtcatcatgggaggtgaacagtggggacactgggccttggcctcatgctgctttgccacagcagggccctagaaggagcccctgagtgtaaaacccagtgctcagggccgttcgggacacactgggttggtttgcccagctgaaggaaactcttaaagctcaaggcaacacgcacttgtttctcctccagggggatcggtttgggggtgccttggatgcagcagccaagatgttcagtaaagcctttgacagtggcattatccccatggagtttgtgaacaagatgaagaaggaagggaagctgatcatgggcattggtcaccgagtgaagtcggtgagttgttactctcctaaaaaagtgggatggaggccaggcgcggtggcccatgcctgtaatcacagcactttgggaggccaaggcaggtggatcacttgaggtcgggagttggagaccagcctgaccaacatggagaaaccccgtctctactaaaaatacaaaaaaattagccaggcgtggtggtgcatgcctgtaatcccagctactcaggaggctgaggtaggagaattgcttgaacccgggaagtggaggttgtggtgagccgagattgtgccatggcactccagtctgggcaacaagagtgaaactccatctcaaaaaaaaaaaaaaaaaagtgggatggatctactgggtgggtggtgatagtgggggcattaatttatttgggagaatacctaagctttcaactccaacatacaaagctttggatgtgttgacagatgccaaatacaaagcagctattttttccatgttataata

SEQ ID NO: 10718 - DNA, 1168 bp, Homo sapiens
ttgggtttgtccaccgtaacctgaggaaagaagtcaagctgatgaggacagtcagagggaccagggtccctgaagctgcactgaggatctgagggtgctgcggactcgggagtccagaggggaaggaaagggcttggtctacagcagagaggagttaggactggtaacaaaggggacttccaagtgcagggatgagaacgacctgcaggcaggccccacccctcagctggggttggtcatactgattcagtctggaccaccagccagtggggtagaggcttcttcctcttgtcctcggggaaaagatggtggacaagtctctggatgaatggttttcactgggttttagaaaatgagaccgtggggattggtttcctctcccagtacatggtagaccatcttccccagttcagcgcccctcaccagcttcgcccccacaaccccaatcccactgtcctgtctcttcacctgcaaggctgaggagttctatgtctgcatctatgccacccgagaaggggactacgtcctgttccaccacgaggggggtgtggacgtgggtgatgtggacgccaaggcccagaagctgcttgttggcgtggatgagaaactgaatcctgaggacatcaaaaaacacctgttggtccacgcccctgaagacaagaaagagttgagtgagagggacggtagggaggtggcagttcggatgagaagaccgacaggctctgggcacagactggggagagcagagcggtctcctctctgggagccaggtggtagacacggccctgtcctgaggaagacagctgggtgcagggcggggactggcttggaaccagactgaaatatgccgccagcatccctcacctccttgcccctgtctgtctgacacctctgcctccagcttctcgcctgacagctcctttccgcctcagtggctgaagagctatgtccagggagcaggggttgcagaggagatggaagggccagtggggtgcgtttagggaaatggagctgtcggtggcagtgagagattgctgcggggcgcctggggtgctgccgagctgctccctgatggatgaactgtccctctctccctcccacctctagaattctggccagttttatctccggcctcttcaatttctacgaggacttgtacttcacctac

SEQ ID NO: 10719 - DNA, 1806 bp, Homo sapiens
aaggggggcgccttgcagtcctgcaccatcatatgagtgttctcaccaccacttatgcccctagaagggaaggggagagggaaacgtgccctctgtttgatccttgttttgtgacattttttttttttttttttttactcaaagttaacctacctgtaactttttaaaaacttgtaaaataactgaccctcccttcctgtccgccctcttcccctctaatgctcacgctcccaacacaaggtgggcagggaggcaccattcaggaacctggaccaaagctgacgaggctgggccaagccagggatggggccacagccagaaccccgagccctacttccaggttctggttagctcagccccagcccagcccagctgctctgcccagagctgggtgagtggggagacacctcagagccccgcaaaacccactgaccggaggcaaaaggcagtggggctgggggtagttttccatggtcacagagaactagtggtggctctgagaaggggaggacctctgggctttgattccatctccttgtcttttttctttgtttttagagacagggtcctgctatttcccaagctggagtgcagtggtgcgatcatggctcactgcagcctcgaactcctgggctcaagcaatcctcctgagtgatcccatttcttaatcagtgtagccccaagaaggctggggctatttaccagggtagaaaaaggagcttacctcccacctttggtcctaagtccctgccccctccccttcacaccataactaggtaacagtttgataactagggaagaaagcagaacagttaagcagccgccacatccccgctggctgggggcctcactccaggaaggggctggactggctgtcctttccagtggcctggctccgctgtgtggatggggagatcggggccagaggcagaaccctggtgaggaagctccagtcctgctctctacccagcccatcttgcctccatggtgcctctggaggcctctgggcctcctctaacaggggctggtgggcaccaagagccaatggagtagacccctggctggtaagggccaagtcccaccggttgcttctgggaaggggtttctaacactagtctgtgtgctgtggttcctggggtgccctccactgccctctgttcagtaacagggccttgctaatcgggttgtcactcaacaaaagtgctttggatttaagttactatcctggctttgcccaacctcagcaacctgtaagactgataatgaaataaatcatgttaatcctagctgtgtgcagtctctcttacccttctgtgcccagctcagtcttccctagggctgggtgtattaggactggctttgtcccacagcttggggccatcggtcctgtctcccctctgctggccgggcacagctgtggtgaggttgggcagctgaacagtgttggctttcatgaggaggcagaaagcagaggctggcctcagactcatacagaaggtgggggttggctgggtacgagggatgtggagcacaaaagcctctcatcccccattaaccagggcaccaagcccacaggtgtccccagcccactggatcagaaagagttcagtaagaccggaagctcctggtatgggtttctcccagttctctagggaaggccacctgcaggtcactgaaacttcaagcaccagggaagatctaacatttgagtcccttccaggccatcagaggcctagtcagccacatgggaaacttccaagacctgactcaggcatcattccaccatggctaaggcaccagccgggg

SEQ ID NO: 10720 - DNA, 1622 bp, Homo sapiens
ttttcttttttttttttttaagatggagtcctgctctgtcacccaggctggagtgcaatggcatgatcatagctcactacaacctttgcctcccaggttcaaacaattatcctgcctcagcctcccgaataactgggattacaggcacatggtaccacgcctggctaattttttgtatttttagtagggatggggtttcaccatgttggacaggctagtcccgaactcctgacctcgggtgatccattctgtcaagcttgattcctcccatcttgggccaagggcccctcctttctttcgtgctaccgaaatagaagcaaacctgtgtttagagttcccttttctgtctcatttacctgcatctctcattgatgcaggcctcccaaagtgctgcgattacaggcatgagtcaccgtgcctggccgagtagattttttttctaatctccagaagaaagcaccgtaaaagtccctggcatggttaacaaggcctctaactcccaggcagctgggctgagacctggtgaggaaaaaaccagagtcagatttgtccactgatgccagatgtcttcctgtagaacacaaacagctcctaaaaaatgcgcagctggaactgaagaagagtaagaggaaagattactacaagattctaggagtggacaagaatgcctctgaggacgagatcaagaaagcttatcggaaacgggccttgatgcaccatccaggtagagtaggtgcggggagtgggctcagtgggaagaacccgcagggcaggccaactgccacactcagtccagaggggaccccttggagaggtccttcagctgagaataaggtgttgcagacttgtggaccctccaaattttgggaagtgccaaattccaaaattagacagaaagtagtttttctcttaaactttgttttcttgaaactttgatttccactgagttgttcttttactccccactttagatcggcatagtggagccagtgctgaggttcagaaggaggaggagaagaagttcaaggaagttggagaggcctttactatcctctctgatcccaagaaaaagactcgctatgacagtggacaggacctagatgaggagggcatgaatatgggtggtgagttggctggggcagcctgggatgaatttgacagctgtagaatgttagaattttttccaaagatgctccagagggagagtctatttgggccaaatctgatccctggtccaaacagtaatagacatggagtcaaacaaatgcagtcaaatgtggcaggttcacagtgtgcagtgagctctgaggaggcgagcactagcaagggaaggcttggaagtgcagaaaagcatggccccatgggtcatgcctgtaatcccagcactttgggaggccaaggcaagcagatcacttgaggtcaggagtttgagaccagcctggccaacatggtgaaaccctgtctctactaaaaatacaaaaattaggctgggcgcggtggctcatgcctgtaatctcaccactttgtgaggtcaaagcaggttgatcaccaggtcaggagtttgagaccagcctggccaacatggtgaaacctcgtctctactaaaatacagaaattagcca

SEQ ID NO: 10721 - DNA, 1712 bp, Homo sapiens
cccatgtccattcctggttctatggtacattcacaggcctatgctctgtccctcttccccaggtcaccatcgtggtccttggcaacaagtgtgacttacaggagcagcggcgtgtagacccagatgtggctcagcactgggccaagtcagagaaggtgaagctgtgggaggtgtcagtggcggaccggcgctccctcctggagccctttgtctacttggccagcaagatgacgcaaccccagagcaagtctgccttccccctcagccggaagaacaagggcagcggctccttggatggctgaagagctgccgttcctctttcacgatcccagccccatttcagtgtctggggctctggtagatgtgttgagggcaaagtagaggacaagctgtctttcccagtcagccagggagctccccgccaggccacgccccagccactttgctccctctcacctctgggaagtgcaaatactcttggttgacatccccttcctcagccctcccagcctactccccatcccagcttttagaggatctgctccactgtctcctggggcagttgtgggtcactgtcccttccagctgccccagacaggaagcagagtcaccacgcagcagtgtcccttcttgggtctgagttcctattataggtaggggccccaccctctgggcttcccatcagcgacacacacacacttatggcaccagcctggactccagaaaaagggtgtccaggtattgtgtgtatgcatttagttgtgcacacacaaatatgctcctatactggcattaggcgtctcctcatccctcaccctgacctttctcctgtccttttcttggctggaagaagttggcctcctgggagtgtagttttctgttttaaatcccccacccctggctgggctcagtggctcacccctgtaatcccagcactttgggaggccaaggcgggtcgattacttgaggtcaggagttcacgaccagcctggccaacattgtgaaaccccatctctgccaaaaatacaaaagttagccgggcgtagtggcacatgcctgtaatcccagctacccggggaggctgaggcaggagaattgcttgaactcagaaggcggaggctgcagtgagccgagatcgtgccactgcactccagcctggtcaacagagcaagactccatctcgaagaaaaaaaaaaaaaattccccacccctaccaattgttttacttcctcttcctgctcagggagcagatgggcctcactggttgagatggaatagaataactgggctatgagtcaccagcccactttgtgacccagcaagacctttcccctctctgggcatcagtttctcatctgtaagatgaccagagttgcttagatgatctcctagatcctttccagttctcttgatttcgtaaagccaatggcttctccctctttaaggtgctatgccaaccagccctggaggctgggatctgccgctccctccagccaccagggggcaggagtgcactacctgctgtcagtcaccagagtggccgctcagtgcccagcccgccagcctcgctcttggaggctgctctttatcctgcctgtggttttcagctcagagctggacttctatttataagttacctgtatttatatttatatgcccgctctcatggtgaaggctggacaaggtgctcctctggcccctccttcttacct

SEQ ID NO: 10722 - DNA, 1865 bp, Homo sapiens
gttggagttggaggcctctcccgctggtttcttccctgggggcaccattcttgctctctcagcaaggaacccccaacccccacctgaatgctcttgcccccctgcctcccccacacacaggcacctcccttgacaaggagagttgatggggaggcaggctgggggcagcccgccaggctaacagggcccatccatctaagcctggagagtttattcctgctctgccggtgggagactggagatgaaagagacaggcagaggtgttaggggtctgtcatggtaggggtggtttagggtggagtggtaggcttcatgctgcccacagagtcctcccagctgaggggtggagggactcactggggcaggggctctgggcagtgggtggagtcatgcaaagggccctagagcattatccaaagcaggggaggtatggggaccccagccccctcccagggtctctttccacccaggacaaggcactaattcgctttgactgatgaagcatctcagaactggaaaggctggcatcacctaggcaactgtattttataaaggggaaactgagtctggagacaggtagtggttctcagggcccatgaggagttcatagtgaaccaggactaaaactcagaactctcaactcctagcccaaaagatgactgtgcccttcagcccacagtcatctatttcatcagaaggaaatcaggccaggcatggtggctcactcctataatcccagcactttgggaggtggctcacttaagcccaggagttcaagaccagcctgggcaacatggcaaaaccccatctctaaaaaaaaaaaaaaaaaaaaaaattagccaggcatggtggtgcatgtctagtcccagctactggggaggttgaggcaggattgcttgagcctgggaggcaaaggttgcagtgagccatgatggcgccactgcattccagactgggtaatagagctagaccctgtctcaaaaaaaaaaaaaaaaaaaaaaaagacggccgggtggggtggctcatgcctgtaatcccagcactttgggaggccgaggcaggcaggtcacctgaggtcaggagtccgagaccagcctgaccaacatggagaaaccccatctctactaaaggtaacaaaattagttggcatggtggcacatgcctgtaatcccagctactcgggaggctgaggcaggagaatcgcttgaacccgggaggcggaggttgcagtgagccgagatcacgctattgcactccaacctgggcaacaagagcaaaactctgtctcaaaaaaaaaaaaaagaaagaaaagaaatcagcagaaagctgattctttccaagacacaggaagatttgctttctctaaagctccattccttatacacacaggtgaacacacactcacactcatacccattggtactgtggttctgggatgggtagcccagacctggggcctcagactgaaggcagctagccagttgcctctacctccctcactctgccacctccccaggcacgaggccaggatgagcagttcaggactgaaaagccatgtccagccattggccaaaacctgccaactctacctttttttttttttttttgagacagaggctcactctgtggcccaggctggagtgcagtggcgcaatcttggctcactgcaagctctgcctcccgggttcacaccattctcctgcctcagcctcccaagtagctgggactacaggcacccgccatcacgcccggctaattttttgtatttttagtggagacggggtttcaccgtgttagccacgatggtctcgatctcctgaccttgtgatccgtccgcctcggcctcccaaagtgctgggattaca

SEQ ID NO: 10723 - DNA, 1206 bp, Homo sapiens
gctcttgccccagaggtataggtcattgactgatccttccacctccaggccaatgaaacctgtaagtgtaatggctggaaaaaccccaagccccccactgcaccccgcatggatctgcagcagccagctgccaacctgagtgagctgtgccgcagttgtgagcaccccttgggtaaggcaggcagcgcccttggagctgggggcaggtgctgggtcctgcttggacagggtgacaagtgccacaaagcttcatctctgaaaaaatcaaagatgcctcgaaggagggattgggttgggggggggtgtgcaccaaggggggagaaaggaaatctctcagcccagaacaggcccaggcaacccaacggttgatatcggagcagtcagtctcactgttggtcacactggttggaggaacagagtgtgtatcttgcttggctgtgaagagggtcaagaagccttgttgatttcttctatcaatttttcctaactctgccatctgtcttgcagctgaccacgtatcccacttggagaatgtgtcagaggatgagataaaccgactgctggggatggtggtggatgtggagaatctcttcatgtctgttcacaaggaagaggacacagacaccaagcaggtctatttctacctcttcaaggtgagcttccactaaaggagggtgtgagtgaaggaggtggggccttgaggggttgtctgcagctctgcccccctcccctctatgcccccttcctcttctctctagctactgcggaaatgcatcctgcagatgacccggcctgtggtggaggggtccctgggcagccctccatttgagaaacctaatattgagcaggtgagataggggaattggagatagcggataggagaattggggacagcttggaggagtggggagcctgtgttctccattctcctcaagctgagaacactggggaggttcagagaaggaagggtgttttgtgctaacctcagggtgggcatggtggtagggagggggcagagcttttctatagagagcacccgagagagagaggagaaggagaaccttgtccctggccagggagcatcttcctttgtctaagaaggccctgcgggctgctcacacctcattcctggttttatcccccacccaccccttctcagggtgtgctgaactttgtgcagtacaagtttagtcacctggctccccg

SEQ ID NO: 10724 - DNA, 1758 bp, Homo sapiens
acatttcactctctgagcctgtagcctgccacccatttcagagcctgccatcactacccctacccactgcctaggagtttttagctcatttggctctggaatcttccttcctgggttgcagatcctggctctaccactcattagctctgtagtcttgggcaagttatttaaccttactttgccgcagtttcctgaaaacaatcagaatgcacctgacacacagaagccctcaatatgtgagttaccactgattgggtataaaggccagaatctgctccagtggaactgggagagttattggggtacccccaacaaatgcacttttccccctcccaaacagctaagaagcttcccaagaacgagccccagaatgcaactggtgctccaggccgaaaccgaggtgtggacctccaggagaacaacccagccagccggagccagtgctgcagcaactgagccccccttgcctgcccgctgcccccgcctcctccgcctgaatgacccgactggaatccactctaaccaatcgcacttaacgactcgggccaccactgggggggcagggggaggggtccaccatgatttctccatataattttgatcataggccggagtgagtcattccacctgcacctttctgtacaaatactaattcaattttaagtcttaagtcacttttttaatatatatgatcttctgctcttcccacttcctcccctttctactgctctcccattttcccttgctgggagtagccacatgctcttgccccccaacccttgtatatggggacagtggggtcagtgcagctaccctttctttccctcctgcggaacagcggacccagcaagagcatccacatcctcactttgttcggagtggtctttggtttgggcggtggggcagaccttgggaaggggcttaggaagggagaggcagctcttccttcagctggctctcatcaggctgcagccccctccccgctcccacctccctgctgggaaaccacagcattatcacagcattattgtgacagccacgaacccattgcccacaacccctccaccctcggtcaccccaacctctggctctgagccctgttctgaccaaatcatgatgatgagtatttgggggtgggtgggtaagggggggagtgggaggggacggaaccaactttttctgtattttgtattgtatgttttcttcaacatgtaaccaatcagtatcttgtcaatatagtcagccgatcgatcgacctcacaattgtcttccttgtctttctctggcagtttatcagacagtgccctctgtagttgaagttgatttaaaatgaaccactgaatcttgttaaacaaaatcttcccctctaatgtgaggggatgctggtggtcatggtaaccaagagaaagaggctcttactgttagcagctccgatgaggtagctgacctgggctgaccaagtttgaagtttcagggcccgtgttcacttctccacctcccttcccctcccccacctaccagatcatactggggtgacatgcagtgtgtatttgatgatcattagtctctgaaacaccagaaacaacctctttgggttttttttggttggtctttaccagtgagagggtctggatcctctctcttcctgaagaggaaggaatcccaacagcccctggaacgctggactggtcttaaggccaagactgtagccactggctttcctcaccacctctgtccacgtcacccccccacaccaca

SEQ ID NO: 10725 - DNA, 1311 bp, Homo sapiens
aaggacacagcgggtgacggcctctgaactaactcagtacttctcatttctcccttacagttggaggtccccctccccactaagtgcctctttgcatagcaccagtccccacccgcacgctctctggaccactacagctggacgggcaatggcgggtcggggaggcgcagcacgacccaatggaccagctgctgggaacaagatctgtcaatttaagctggttctgctgggggagtctgcggtaggcaaatccagcctcgtcctccgctttgtcaagggacagtttcacgagtaccaggagagcacaattggaggtgagtgggcatgagggagtcggggaggggcctgaaggttgccaaagaaatgctttgaccttgaggagatgggaagctgcctgcctgcattagggactaaatgcgtctgtggtggcagccccacttcctcacctgggccctggaattgagcccagcaactggtctccatgccagagtcccctcaagcatcgctagtaagcatttgctgggagtggaaagctagcttcccatcctgtttctgccccttcttgatctgtgtggccttggctgaggccctttcactgccctggcctcatggagggagagctgactctggatctttgaggccccttcttactataatgggtggtccatgtgccctggcctttcccacttccagaagaaggaacagcctggtgagtcggagctgggtgataggtgggtgtttctgaagctgactttaccctttctggagctcacagcctgttgttgattttccagtggtcagcatttaggatgtgagtgagggtctggcctcggcctcttgcctccgtggctaacacacacatcaagaggcaggggccaacgctggccttggccttgagtcatcctttctctactctcttggtaggaggtttctaggcagctggaaacaaaatgggccatgtcagcagtctccctgctgcctcctcagcatttgggtcaggagctggagaggggaagtgaggcagtgccccatgtccctcagtgagctgggggagggcagaccaggaaagcagccttctacacatggctgtcctgggttctctgctgggtccaggggcaaaggggccttttgctgtctgtcccagctctggactcctcctttgaagcatgtgtacaggcaccctgcattcccctaaggagtcacctcttagtgactgaaggtcaggtcacagggtggccatacaggaacaggtctgggtcagagctaggggcggtggctagctggagtgcctggaggtggtaggggtggttg

SEQ ID NO: 10726 - DNA, 1291 bp, Homo sapiens
ggtcaccctgctgtgaagtcctggcaggtgttggtaatgtgtggaaatgcagtcagcaagtttgctggggagtttgataaaagtataaaacaaaacaaaaaaagcctcggtataattttgttccacgacttcttctgtagctttacaccagaaggaaggaatgggctacagcaggtagtggaggaagaggggggtgagcaggtgtattaaaatagcttacgggtaaggcctaaaaggtcacccctcggccccctctccaaaagaagggcatgggcacccccaggagaggatggccccaaaaaccttatttttatacatgagagtaaataaacatattttttttacaaaaataacttctgaatttatcagtgttttgccgttaaaaatattcctctatagtaaattatttattggaagatgacttttttaaagctgccgtttgccttggcttggtttcatacactgatttatttttctatgccaggcagtagagtctctctgcctctgaggagcaggctacccgcatcccactcagcccctccctacccctcaagatttgatgaaaattccaaccatgaggatgggtgcatcggggaagggtgagaaggagagcctgcctgctcagggatccaggctcgtagagtcactccctgcccgtctcccagagatgcttcaccagcacctgcctctgagacctcgctctctgttccagcaaccctggttggggggtcagacttgatacactttcaggttgggagtggacccaccccagggcctgctgaggacagagcagccaggccgtcctggctcactttgcagttggcactgggttggggaggaagagagctgatgagtgtggcttccctgagctggggtttccctgcttgtccagttgtgagctgtcctcggtgttaccgaggctgtgcctagagagtggagatttttgatgaaaggtgtgctcgctctctgcgttctatcttctctctcctccttgttcctgcaaaccacaagataaaggtagtggtgtgtctcgaccccatcagcctctcacccactcccagacacacacaagtcctcaaaagtttcagctccgtgtgtgagatgtgcaggttttttctagggggtagggggagactaaaatcgaatataacttaaaatgaaagtatactttttataatttttctttttaaaacttggtgaaattatttcagatacatattttagtgtcaaggcagattagttatttagccaccaaaaaaaagtattgtgtacaatttggggcctcaaattt

SEQ ID NO: 10727 - DNA, 1132 bp, Homo sapiens
aaattaagaaataataacaattaaagggcaaaaaacactgtatcagcatagcctttctgtatttaagaaacttaagcagccgggcatggtggctcacgcctgtaatcccagcactttgggaggccgaggcggatcataaggtcaggagatcaagaccatcctggctaacacggtgaaaccccgtctctactaaaagtacaaaaaattagctgggtgtggtggtgggcgcctgtagtcccagctactcgggaggctgaggcaggagaatcgcttgaacctgagaggcggaggttgcagtgagccaaaattgcaccactgcacactgcactccatcctgggcgacagtctgagactctgtctcaaaaaaaaaaaaaaaaaaaagaaacttcagttaacagcctccttggtgctttaagcattcagcttccttcaggctggtaatttatataatccctgaaacgggcttcaggtcaaacccttaagacatctgaagctgcaacctggcctttggtgttgaaataggaaggtttaaggagaatctaagcattttagacttttttttataaatagacttattttcctttgtaatgtattggccttttagtgagtaaggctgggcagagggtgcttacaaccttgactccctttctccctggacttgatctgctgtttcagaggctaggttgtttctgtgggtgccttatcagggctgggatacttctgattctggcttccttcctgccccaccctcccgaccccagtccccctgatcctgctagaggcatgtctccttgcgtgtctaaaggtccctcatcctgtttgttttaggaatcctggtctcaggacctcatggaagaagagggggagagagttacaggttggacatgatgcacactatggggccccagcgacgtgtctggttgagctcagggaatatggttcttagccagtttcttggtgatatccagtggcacttgtaatggcgtcttcattcagttcatgcagggcaaaggcttactgataaacttgagtctgccctcgtatgagggtgtatacctggcctccctctgaggctggtgactcctccctgctggggccccacaggtgaggcagaacagctagagggcctccc

SEQ ID NO: 10728 - DNA, 1147 bp, Homo sapiens
cctgtccacagagaccccgcaaacaagcgcatcagaggatctgggtggtgcgagagcctcctacagcagccaggtacacacaaggcctcagtttttccatctgtgaaatgggtacgtggacagacctgtccagtagcctcccatgtgagaatcctcggactgagagggtactaggagggctaatacagcgcagccctgtgattccccacctctgtccctggaatgaaggaaatctgggtgttagttctggctttgccgatgcctcttgggtggcctggctgaaactaatctctcctcatcaggccagaagggaatctgtgaaatgggctttgaaacctgccttgcctttctccgcccggtcccagcgggggtccgatcggcatcaaggcttcacccactcccagagccttcgggatcagccccaccccatcagcaggacacagcccatgccactggaaatctcgcgagaatcccgcgctgaagcgaagtcgagacgtttgaccttcctccgtttccgtagttccgagttgcggtttctccgttagtgcttccgggttgcagccagggaagcctccgcggtggtgcaagtggaacccaagccttgaggtttcagtgagtagggggccgacgtgagctttagcgtccccctttagcctccctcttcgattccttgaagaccctggtgcagcttagcaagagggcccaggatttttggatccccagccctgtgacaagggttcctgtccagtttccccctcccaggatttcgactcagttcagcgaagtcaccgccccgtctgagaaatgaggacaccaaggcttagagcacagccccgaggcgccgtctaccaggccccgtcccctcccccggctcctgtcggtcagcactgaaaccccgtccctgctccaggcctccttctctggggtccaaggtcccatacaggcctctgcctcggccgcaggcccttcagtcaccgtcgcctcgtctccctgactgtccgcaggcctgggcagcatggccgtattccggtcgggtctcctggtgctgacgacgccgctggcctccctagcccctcgcctggcctccatcctgacctcggcggcccggctggtgaatcacacactctatgttcacctgcagccgggc

SEQ ID NO: 10729 - DNA, 1167 bp, Homo sapiens
ttggcctcccagagtgctgggattagtcgtcatcttttgttaaaccaggatttgatttttttcttttcttttcttttcttttttttttttttgagacagagtctctctctgttgcccaggctggagtgcagtggcacaatctcggctcactgcagcctccgcctgccgggtcaagcgattctcctacctcagcctcctcagtagctgagattacaggcatgcaccaccatgcccggctaatttttttgtgtttttagtagagatggggtttcaccgtgctggccaggctggtctagaactcctgactgcaaatgatcagcccgcctcagccacccaaagtgttgggattacaggtgtgagccactgtgcccagcgtgatttttttttttttttaaagcaaacttgtcctttggttttgcagaacaggcctgctccctctcatctagcccatcatttcttggggcctgaaccccagtggtccaaagtattgcttgtgaaatttaaaaaatgtgaatatgatgtggggatgggcctcttctacattaccttggcccagggggatcagctggctgggaggattagtgagcacctctgtattttgaggtctgagtcttctggagctgtgtagttaatcttcggtttctgataacccctgggtccatctggccatcagcctcagcagtgagcaaagcaataccatactcatttctatgttcctgttccttcctctgctcctcctttggagaagcaataattcatgggggatgatacagtagcactttacaaatggctccatgtcattcatcccaggggccataatctcttgcaccacctattcttacttcctgttcagctcctttacagcttttattttcaactgcttcccaacttggtggggcctcctttaaggatgagccaatagtaagaatgtggctgtaatcagcagagacccctctgaggggtatctgttctgcagcccctagtgaaatcatgtgatgtgagacagaaacctaaacatggtacttgattctaaacctgtgccagtctatagcctctgcctccccaagcagagctcaagccaaacgcttctgtcctctttccttctgcattaaccctttgctgatcctcaggggccactcccccaacacccctgtacttgggtgaggg

SEQ ID NO: 10730 - DNA, 1611 bp, Homo sapiens
caagtggtctgggttagaggcgagcctggcaggcagcacagactgaactcagaggtagacaggtcaccttactacctcctccctcgtggcagggctcaaactgaaagagtgtgggttctaagtacaggcattcaaggctgggggaaggaaagctacgccatccttccttagccagagagggagaaccagccagatgatagtagttaaactgctaagcttgggcccaggaggctttgagaaagccttctctgtgtactctggagatagatggagaagtgttttcagattcctgggaacagacaccagtgctccagctcctccaaagttctggcttagcagctgcaggcaagcattatgctgctattgaagaagcattaggggtatgcctggcaggtgtgagcatcctggctcgctggatttgtgggtgttttcaggccttccattccccatagaggcaaggcccaatggccagtgttgcttatcgcttcagggtaggtgggcacaggcttggactagagaggagaaagattggtgtaatctgctttcctgtctgtagtgcctgctgtttggaaagggtgagttagaatatgttccaaggttggtgaggggctaaattgcacgcgtttaggctggcaccccgtgtgcagggcacactggcagagggtatctgaagtgggagaagaagcaggtagaccacctgtcccaggctgtggtgccaccctctctggcattcatgcagagcaaagcactttaaccatttcttttaaaaggtctatagattggggtagagtttggcctaaggtctctagggtccctgcctaaatcccactcctgagggagggggaagaagagagggtgggagattctcctccagtcctgtctcatctcctgggagaggcagacgagtgagtttcacacagaagaatttcatgtgaatggggccagcaagagctgccctgtgtccatggtgggtgtgccgggctggctgggaacaaggagcagtatgttgagtagaaagggtgtgggcgggtatagattggcctgggagtgttacagtagggagcaggcttctcccttctttctgggactcagagccccgcttcttcccactccacttgttgtcccatgaaggaagaagtggggttcctcctgacccagctgcctcttacggtttggtatgggacatgcacacacactcacatgctctcactcaccacactggagggcacacacgtaccccgcacccagcaactcctgacagaaagctcctcccacccaaatgggccaggccccagcatgatcctgaaatctgcatccgccgtggtttgtattcattgtgcatatcagggataccctcaagctggactgtgggttccaaattactcatagaggagaaaaccagagaaagatgaagaggaggagttaggtctatttgaaatgccaggggctcgctgtgaggaataggtgaaaaaaaacttttcaccagcctttgagagactagactgaccccacccttccttcagtgagcagaatcactgtggtcagtctcctgtcccagcttcagttcatgaatactcctgttcctccagtttcccatcctttgtccctgct

SEQ ID NO: 10731 - DNA, 1275 bp, Homo sapiens
ctgaggagcagtggacaaaagctctcaagttcatgctgacgaatcttaagtggggtcttgcttgggtgtcctcacaattttataacaaatgacttttttccttagggggaggtttgccttaaaggcttttaattttgttttgtttgcaaacatgttttaaattaaattcgggtaatattaaacagtacatgtttacaataccaaaaaagaaaaaatccacaaaagccactttattttaaaatatcatgtgacagatactttccagagctacaacatgccatctatagttgccagccctggtcagttttgattcttaaccccatggactcctttccctttcttctctgaaaaaaactaatttaaatttgcttttcttttttttaactgagttgaattgagattgatgtgttttcactggatttttatctctctcaacttcctgcacttaacaatatgaaatagaaacttttgtctttactgagatgaggatatgtttgagatgcacagttggataatgtgggaaaatgacatctaagctttacctggtcaccatgtgatgtgatcagatgcttgaaatttaacacttttcacttggttcttatactgaatgccgactctgctctgtgttagagatatgaaatggtgtttgatactgtttgagacattatggagagatttaattatttgtaataaaagatttgctgcagtctgaaaactgcccaggggtgcactgttgggtttttctttaaaatagagtactttgtattctgggagaatcaagttctaatgaatgcaggtatgtggaaattctgttgaaacttctttagagttagttttagttttaaaaaaagactctagtaaaaatagatagctgttgaggaagccttgtttgtgtagatctgaataatggaacagagatgttaaactaattttaaggggaaataaaggctacctccttgatgcttagtcaaggtcacccagatagtctgtatttgagcccctgattaatactgattgcaatgcctgatgttcctcttaatgaaattaagctaaaagtataaataccttgttaaacaaaaatgaaacaactaatctgtctccacctagctttttaacattttcaggctgatatgacaaaaagggcatgctcgtccaccttaactctctctgataaaggaaaaataagcatgaaattggcatacaaaatacagttcaaaagagacttggaatttttgtacccttagtatgaaagtaaacagagggaggcatgagtgc

SEQ ID NO: 10732 - DNA, 2469 bp, Homo sapiens
gacatcgaacaaaatgatgttatttgaaaccaggttatttgaggaccttctgtacttgatttgcttacctgctgtactttaatttccttcaagtcgcagttgctaagaacctattgatgacattaaggacttaccgtatgcagatgattgcttggggatttgtgaaggggtctctcattttcttgatgaggtaagggttgtacagatatgtgattcccctgatccctcttctctcaggtcactctacatgacatgatcctgaaaaatatcgagaagatcaaacggccccggagcagcaatgcagagactctgtactgaggccagggccagggccaggggactctgtgagtctggctcaagaccgacattgccttggtttgttacatgactatcgtgatggggaaactggctggaaatagtaatcacacctctctgtttttagttagagtctaatgaaactctcatctagttctgtgatgtgtttacctcttttttcaggcctcaggaactcttctatttccttccctaataccccacacccaacctgtcgtaatttctggagaactccaggtttgtgtgtgcaggatgttggcacaaaaatacctgtgttttcattctccccctctctccctcctgtgtcttgcgctttatgttttcttccgtttgataattagttggttaaaagctgagggaaccggaaggaaagtgctaggtgttttttaggaactagggtggcggggggacgaacttctcttcctcacatgaggttactgtttctttcctctgtggggcattggatcctcccacagttgccctggtgatgacttagggcttcccatctgtgtacatcccactttgaatcttgatcgtgacaagaaataccttaggccttcagtcaattccgaagctccttcagttgtttttataatgggcgttttcacatgcacatatgtgtatgcatgtatacgcccatacagacatgcacacacagactcctactccattagctaacataccctccctctccacaacccctgtcacatacctttcaggaggtgacagttgtcttagttgtcatctacccagacaaacgtcctgggcccgtcctccctcctgatactgtagcctcttggtacccagggtgagttggtggagaacagagagatgagaagcagagggcttggggaaagcctgttcctctctgactcagccctttttggcattattgcaagagcttgactcctggttgccttttcccagccagttttcagttggggtgaaggtttctgcaagtgtgaggtccagatgctgctgctcatgttgggctttccttttgggaactatttctctttatttatagtgtcgggcttccggggaaagcaatcattggtgtgtatgtgtatgtgcatgcacacacgtgcatatacacatttgtgtatgtggaaatgtgctgggcaagtcaaaactatagaagagttgcctcctgtctctcgaatcttccagagatatcacttaattgttaacagcttttgtgttaatccccttcagcccctagctcttttattctaccacggctggagagttgatacctgcagtcagcctgccagtgactcttagtgtctgtttctgacttatttttcctgtctctgtcttccaacccccaataatatttccaccggggatgcatcatttttactcccaatattctgtagagagggagtcaggatgctgtcttcccacgaatagtactcagtaacaaaccaattgcattttagttgggcagtgctcccacccaccctccagatcccttccagctaaaacccttcccccttccctccatgtgtttctcagtttcccgtttcgtttgttggactgttccactgcccctcctcctcaccctatcacccatggatcgtaatgtaaaattcttttaccatgtcaagaaattattaaaaatacaggtactttgacctctttctaaagccgcagaccctggtgcaatgctctggtggctagggatgtactcatgctcatatgtgtgcacgcttggacacccacctccatggacacctagccaccctgttgtgtgtccttatgccagttgagctgaatcttttccccagtatagtggaaagactgaggcttctgcctactgagcaaggttgggtgcttcatttgtgttcagtctgaattatgggaaagttagctcttcccagacctaagctgccttctctccctactttcagaagatcctagttccttccttcccgagtgatacccatgaactgccagtagaggctgctatcgttccatgtgtaaggaatgaactggttcaaggcgcgtcctacccagtcattttctttaccttatactaattcttcctgaataatgtcttcagtttcttgaggagactcctagttttggttttcaaattacttggagggctgcctaggaatctatctccctctg

SEQ ID NO: 10733 - DNA, 1842 bp, Homo sapiens
aaggtcctcctggttccagggccagagaaggagaactagggcaagtggctgtgagaccctagagaccagcgaagggagaagttgggaagctacgttctgttggccaccagacttgcatttcagcctctgtcataatgctctgccctccctcccccgaaggtctctgtggtgatgaccgctctcccctgcccctccccgcttcctgacctctgaagaggttgggaagtgaccatttggatgtctgggccctgccaaggcgacagggagggtcagagggaggccggctgcttcctgcccccaccctttccccgggcctgctgtgctgcttttgtgccaaggttagccagtcccccctgttgtgttccatgtgctttcacctctgcctcatctttcctcccgtccctgccccgccacctccccaaagaattgaaacgtcagctcaggatatggggccaatctctgtgagtccagcatgtacctgtctctccctagtgtcccttcagcctgggctgaccagtgcccgcctctgggcttgaccagttcccaatctcgtcctctgtccccaacttcttaagcacaattgggcttcttccatctccaggttttctgccattcttaaccaaggctgcctcttccaacagggcgggaatcagacctactcccctaggtcacaactctgggaaggatacagagcccccacccttcactgagttctctggatttgttctcagtgccttagcaacgaaaacctgtgcttgtgtgtgtgtggcggcggggagggaggatcctgtttcccacctccttctcctcccctgtactccccagtgccttccttgttctggtggagctggggtttctctcctccccagtcccacaacactgccaaaaatctgtgtatgtgccattgggtggggcagccccaagcctcctggggaggcagggcaaaaacaggtgccctcatcgtggtctgtgccatgtcccgtctctatggtggttgaggagaaaggcggggaagcttcctcagccttgcagatatgtgtggcatttactagccagagctctgaaaggcagtgctgtctgtttcttgtactgggaccaaagtaaaaatccaagcacattccccttgcagttaggggaggccctactgccttctcaaagcagagaggcagcttatcaaactcagcccaaaactctgtttacatgggtggggagatggagcagggaagtacagagtgggatggtcaggacctgggccattgcaaccaaaatggggacttcctgggtagggaggtcactccctctactcactgagctaggattagggagggttattgccccaaccattgcaatgggaggtggagggacaggctcagcctcctcattgtctaaatgaggcctaaatgtgtgaagtgcgatttctgcttttgtgtaccccaccaccccattaccacagctgcctttgtgtgtttgtgtcaataaaaagccaaaccctgggtcctgcttgttgcctctgagagtggagggaaggtgagctcctggaaggctagtgctgccagcagaagatctgggctgcttcctgccccctgcctctttccatgcccaaatcacgtttcctttcatgagtgaaatgaggaagaacatcatggcatgcaggctctttttactgttctgggcagtgttttgcaatgtgtgacccctccgcactgttggtgaacatacagacctcctatatgggcacccaagcccaggccagtgtgagaaccttggcgggggggtggggaggatgagaaggggaggcccctagcctgactcagaggtgaagactgctaggccctgctgtcc

SEQ ID NO: 10734 - DNA, 1205 bp, Homo sapiens
ctccccgctgcttctctctcaccccatcctgctctcaaaccaagcctagcattctcacctccttcctcatgtgggagagtcctgagggatacatggtttctgcgtgcttgaggaagagagggcacactgctggcatggcacaaaggctcacgctgtgcctccctccacccctccacaattctcttttcttctcctacatagtggcaaggagagactcaagagttctgccccaatgccaaggttgtgctggttggctgtaaactggacatgcggactgacctggccacactgagggagctgtccaagcagaggcttatccctgttacacatgagcaggtgggacccttgacgtctgacctcatcccagcctagacctgtcacctctgccccttcagtctctgatttgaaaacaccttacctggctcatcctttgttctggtctgtgacctctgacctgatcccttgactgcccccagccttgacattcaaccccagcccacagcctccatgcccctttctaagctgcaggctaagacctataactttctcccatgcactccttccttttccagggcactgtgctggccaagcaggtgggggctgtgtcctatgttgagtgctcctcccggtcctctgagcgcagcgtcagggatgtcttccatgtggctacagtggcctcccttggccgtggccataggcagctgcgccgaactgactcacgccggggaatgcagcgatccgctcagctgtcaggacggccagaccgggggaatgagggcgagatacacaaggatcgagccaaaagctgcaacctcatgtgaggggctaggagagggcagagtgtgaagaggggtggtgagggacacaattgttcccctgcctgcgcccaggcttcctgacctcctgatcctggctgggaagttagggcaggcagagcgagcaattctgggcaggggagctggagggcagaagggtatcatcgtttctcatctcctcctccctcctcttctccagtggatgttgagggagctaacagggctggcatctggggcatgaactgggatggggcaggtgggcgttagggaagctggtatcaaatggtgaccttggtggagtctcctatgtgaagagtaccctccctctccacccccagtccccatatcctggttctggcccaaggaaaatgtccattctatgaccttctc

SEQ ID NO: 10735 - DNA, 1759 bp, Homo sapiens
agagccacaggaccccaagaatgagcttacaaagtggcctttccaggccctgggagctcctctcactcttcagtccttctactgtcctggctactaaatattttatgtacatcagcctgaaaaggacttctggctatgcaagggtcccttaaagattttctgcttgaagtctcccttggaaatctgccatgagcacaaaattatggtaatttttcacctgagaagattttaaaaccatttaaacgccaccaattgagcaagatgctgattcattatttatcagccctattctttctattcaggctgttgttggcttagggctggaagcacagagtggcttggcctcaagagaatagctggtttccctaagtttacttctctaaaaccctgtgttcacaaaggcagagagtcagacccttcaatggaaggagagtgcttgggatcgattatgtgacttaaagtcagaatagtccttgggcagttctcaaatgttggagtggaacattggggaggaaattctgaggcaggtattagaaatgaaaaggaaacttgaaacctgggcatggtggctcacgcctgtaatcccagcactttgggaggccaaggtgggcagatcactggaggtcaggagttcgaaaccagcctggccaacatggtgaaaccccatctctactaaaaatacagaaattagccggtcatggtggtggacacctgtaatcccagctactcaggtggctaaggcaggagaatcacttcagcccgggaggtggaggttgcagtgagccaagatcataccacggcactccagcctgggtgacagtgagactgtggctcaaaaaaaaaaaaaaaaaaaggaaaatgaaactagaagagatttctaaaagtctgagatatatttgctagatttctaaagaatgtgttctaaaacagcagaagattttcaagaaccggtttccaaagacagtcttctaattcctcattagtaataagtaaaatgtttattgttgtagctctggtatataatccattcctcttaaaatataagacctctggcatgaatatttcatatctataaaatgacagatcccaccaggaaggaagctgttgctttctttgaggtgatttttttcctttgctccctgttgctgaaaccatacagcttcataaataattttgcttgctgaaggaagaaaaagtgtttttcataaacccattatccaggactgtttatagctgttggaaggactaggtcttccctagcccccccagtgtgcaagggcagtgaagacttgattgtacaaaatacgttttgtaaatgttgtgctgttaacactgcaaataaacttggtagcaaacacttccaccatgaatgactgttcttgagacttaggccagccgactttctcagagccttttcactgtgcttcagtctcccactctgtaaaatgggggtaatgatagtatctacctcctaggatttattgaggcagcttaaataccttttgtatttcctgttgctgccaaaacaaattgttgcaaggtcagaagtctgaggtggctcaactgtttctttgtttcaggtttcatgaggccaaaataaaggtgttcgcagggcgtgttcccttctagaggctctgggtccttgcagttctaggactaagatccctgtttcccactggctgttggctgggcatcattctcagcttcttgaggctccccacattcctaggctcctggcctgtctgcctccatcttcaaa

SEQ ID NO: 10736 - DNA, 1173 bp, Homo sapiens
agcgtcccctcacaaataaattaaagcgtaaaaggagacctacatcaggccttcatcctgaggattttatcaagaaagcagatttggcagttcaaaagactcctgaaatgataaatcagggaactaaccaaacggagcagaatggtcaagtgatgaatattactaatagtggtcatgagaataaaacaaaaggtgattctattcagaatgagaaaaatcctaacccaatagaatcactcgaaaaagaatctgctttcaaaacgaaagctgaacctataagcagcagtataagcaatatggaactcgaattaaatatccacaattcaaaagcacctaaaaagaataggctgaggaggaagtcttctaccaggcatattcatgcgcttgaactagtagtcagtagaaatctaagcccacctaattgtactgaattgcaaattgatagttgttctagcagtgaagagataaagaaaaaaaagtacaaccaaatgccagtcaggcacagcagaaacctacaactcatggaaggtaaagaacctgcaactggagccaagaagagtaacaagccaaatgaacagacaagtaaaagacatgacagcgatactttcccagagctgaagttaacaaatgcacctggttcttttactaagtgttcaaataccagtgaacttaaagaatttgtcaatcctagccttccaagagaagaaaaagaagagaaactagaaacagttaaagtgtctaataatgctgaagaccccaaagatctcatgttaagtggagaaagggttttgcaaactgaaagatctgtagagagtagcagtatttcattggtacctggtactgattatggcactcaggaaagtatctcgttactggaagttagcactctagggaaggcaaaaacagaaccaaataaatgtgtgagtcagtgtgcagcatttgaaaaccccaagggactaattcatggttgttccaaagataatagaaatgacacagaaggctttaagtatccattgggacatgaagttaaccacagtcgggaaacaagcatagaaatggaagaaagtgaacttgatgctcagtatttgcagaatacattcaaggtttcaaagcgccagtcatttgctccgttttcaaatccaggaaatgcagaagaggaatgtgcaacattct

SEQ ID NO: 10737 - DNA, 1231 bp, Homo sapiens
taattactcttaccatgacttttttagctcaggagtgagacctatcctctgttttgttttattgttttaagtttgtcagaaaatttattgtttctaatatgtggtcctatactagtaatatcagtattatttttaaggcaaatgggttagcacattttcaagagtcacagtcagactctcaagctagtgtgaggtattcagaagccttcacacccaacagcaagtgactaagcatctgaatttctgttcaggctccctttgcagccctgtacctccgttatgccaatgctcagtgcagcatttgtggatgagaatttgcctgatgggactcaccttcagccaggaaccaagtttatcaaacactggaggatgaaaaatacaggaaatgtaaagtggagtgcagacacaaaggtaatttttcccacaaaatgcaaagatgaggtgatttgaagtggcagagtgctcagctgacaagcttgctttctcttcttactgttcttttcagctcaagttcatgtggggaaacctgactttggcttccacagaaaagaaggatgttttggttccctgcctcaaggccggccatgtgggagttgtatctgtggagttcattgccccagccttggagggaacgtatacttcccattggcgtctttctcacaaaggccagcaatttgggcctcgggtctggtgcagtatcatagtagatcctttcccctccgaagagagccctgataacattgaaaagggcatgatcagctcaagcaaaactgatgatctcacctgccagcaagaggtgagcattgactgacaggctttggcctagtatccaaatcttagttagagaggagatggctaaaactaaaagaacccactcatagctggttgttttccagaaaccttgaaaggttagcatctccccccgccccaacacatctctatgctgatatttggcctcttccttagggtgtttgttttagcgtctttagggtcttgctgcatactgaatacttttgtacctctttgtgatgttgcatggtcagcctgttggctgcacaagggaaaaagggactcctggcctgggctggcctgtggaactgctgaactgatagctttactccttaacatccatctctcctgaaataccctgtgtatgttccctaaatactaatgaagtcttgccctggttgctacttagtgaacagttttttaatgcaatttctctgtatta

SEQ ID NO: 10738 - DNA, 2256 bp, Homo sapiens
cggtttcccttttctcctccttcaagtacacagataactaatctaaaatagggccttcccagtccgaaccgttggtatcaagtacacaggagtgccatagccttgaatctaattacctagtactttgaataaatctggaaagactagtatgcttgcaagatgatacaaatgtataaaataaacatttaaattatacagaatttttttttttttttttgctttgcttgtctctacacagccaataatttctgaagatcagacagcagccctgatggcccatctctttgaaatgggattctgtgacaggcagctgaacctacggctgctgaagaaacacaattacaatatcctgcaggttgtgacagaacttcttcagttaaacaacaacgactggtacagccaacgctattgaggagtgaccttgtattaaataactgcctgctgctcagagatgatctttattctgtcattggggtatgggatagaagcccttgcttatttttaatctgatgaatctgtatagagcccatcgttgagttaccaagacaatacctgctacagtattttggggagcaaactaaagaccagaacttaaattttcactttagacattggatgaatagtatgaagacagtttttcagttgatttggataaaactattttagtgcattgacaagtgtaacttcaacttcatatagaaccatttttctttctgcttttattgaaactgagtatttttctttggctaatgtggattttttatggggatatctgttaattttcaggttttgaaagacattaacctcggaagttgtttttaagaattattctcataattcttattctcataatttctgtaatccacctcaagcttcatagttatttggcattgaaataacacccagagcatgatagaaatgttgttactcttcctctctcaaggagaaagtaattttcctgcaatacttaataattggcaccgttgctttctaaagactccatggtgcattcaagagtatccaacttcaagggaatctccgcatttcaatgaaaggaggaagagtgtgctgataaacctaccagcacctattgagcaatgtctattatagtaattttgcatacatttttatttaagggaaaaaatataggtattgtgaaatattttgctaatcttatagaaaaggaaaaaatcccgttatttaaagggaaaagtaaatttaacagttgccttttttcttaatgtcagggcagatcttattttacagtacagtgggggaaatagaaacatgtgaaaggcaaaaggcaggctcctaaattaatgtcagtgaagttcagggtgggcaaatgagtgtgtgtgaggtataggaaatgctgatgacttctttaatgcttgaagtccgttcacaggtatctagccctagaatgcctagaacaggaagaggcagctggtgttctgcaaaacttggacaggggcaaagttgctgaaaaagttttggtttaacccgaagataagtggaaaagagcttgtccatgaacccaggttctcactctgtttacagaagtgtgttgagtacagttggtgaaggaagaggtaacaaaaaatgctaaatattttatccatgaaaatgacttccagaaaaggaagaatatgaaccccagaccgaaggggaaaagatagttaatagtattatctaacctggttggtatttgtaatgaatggtgattttaattagtcattagccataatgatgtttatttacagtataactcctgaatgctacttaaataaaccaggattcaaactgcaagccagccaggccgttcattatttaaaacgttttaatcggggcttccgggtagaaggtggagcggcagggtgtaattgggttgatgggtgggacctgtcttgaccatcggagttttataatcgagggccaggagggcccgggttgctctcctggttatgtatgtacttgtacataaccacctaaagaatggtgaaataaatgttcttggaaattcctacccggactggctagtccttgcggaagcagcgtccgggccctcgggtaacgtttgaagagctggcagcgtctcaggctgctgcgtggcgaaggggcggaccgggggacgggggggtgggcccttaggggctggggcgggacttccctgggcactgagtcaaagcttgaggggagtgttcgctcccgcattttcgattccactctcttccgtttctgtcgctgcagtcgtcc

SEQ ID NO: 10739 - DNA, 2256 bp, Homo sapiens; identical to SEQ ID NO: 10738

SEQ ID NO: 10740 - DNA, 1177 bp, Homo sapiens
tctcctcccccaaaaaagtgcaacactgtaactgagaagcccaagcatggagaagttgagatgaaaaaggagtaagaactgtgaagggagagtcagcttctcaggaaccagcatgggagagaaatgccccgagcatctgcctgtactggtagaagggccacattccccactcccccaccttaccccatacaaaggctgggcggctagccaggctgaccagaccttctctctccccataggtggctggtgagcgttacgtgtacaagtttgtgtgtgagcccgaggccctcttctctttggccttcccggacaatcagcgtccagctctcaaggctgagtttgaccggcctgtcagtgaggaggacacagtccctttgtcccacttggatgagagccccgcctacctcccagagctggctggccccgcccagccatttggccccaagggtggctactcttactagcccccagcggctgttccccctgccgcaggtgggtgctgccctgtgtacatataaatgaatctggtgttggggaaaccttcatctgaaacccacagatgtctctggggcagatccccactgtcctaccagttgccctagcccagactctgagctgctcaccggagtcattgggaaggaaaagtggagaaatggcaagtctagagtctcagaaactcccctgggggtttcacctgggccctggaggaattcagctcagcttcttcctaggtccaagccccccacaccttttccccaaccacagagaacaagagtttgttctgttctgggggacagagaaggcgcttcccaacttcatactggcaggagggtgaggaggttcactgagctccccagatctcccactgcggggagacagaagcctggactctgccccacgctgtggccctggagggtcccggtttgtcagttcttggtgctctgtgttcccagaggcaggcggaggttgaagaaaggaacctgggatgaggggtgctgggtataagcagagagggatgggttcctgctccaagggaccctttgcctttcttctgccctttcctaggcccaggcctgggtttgtacttccacctccaccacatctgccagaccttaataaaggcccccacttctcccattagttctcctgtgtcctctttgctgccatgtgggaacag

SEQ ID NO: 10741 - DNA, 1190 bp, Homo sapiens
caaggctgcatttgaatgatttccttaggatgaatggtccctacacaaagaggccttgtgggcaaacctggagaaccctcctaaatccatagagttttcaaaatgtgaatctttggaagccttgagttcagaatctgctgctctggaatatttcccttcgatcttatctcagtcacttcgtttttgagaagagtgatgccttgggcatgcttttttttttttcttttttagaaaacagggagttgaagtccaacctatttaaaaaccccaccatttggagaattacaagggttttgtcctgaattgtagtgttggcaagcccaagccactcgtgctaactgctttttgtctcggttgctattccaagaacagaaggaggaagttggccaattacagcgtgtgtgcatggatgtgtgtggggggcgtgcctctcagaaacgcggccagaagacaagcagggaagtgaaaggtcccaggcacacaccctgcccattgcaggtggctcttacagctctctggtgccagcacgggatccctgaagtgactcagccaggcagacatgagacatggcggagtgtccaaatggatcctttattggtggtagagcaaaaaaacccaaacacgataaacctttcaaaagactttctaaggatgatattggaatgcaccagccctcacatgtgtatgcacatttgccagaatataagagttttgttttaaatacagtcttgttaggattttacgttattgttattatggaaagtgattgtgatgctatttatcttcagggtcactctgggcaaagagaaggtcctcagccatgcccccagcaccttgcacataggtgtctgataaaagtttaagaaagtaaacactttttgagcaccaaatatatatagggcattgttctggtgggtgtgtcacgctcccagaagactgaattcatggtaggatcactcgcaaggccttgtgaaggagtcttacctaaaacgaaagaaatatcagggacttttgttgactatttacaactcagttttacatttaaattcaggcagtgttaatatgccaaggtagggaatgtgcctttttcagagttggccaggagctcctggctgggacacggagaggcaggtgtggcgtaaggcctcactcccggctgggaaggtctctgatcacacagaagcagccct

SEQ ID NO: 10742 - DNA, 2158 bp, Homo sapiens
ggatggggctgtggaaacctgggttggattgtttgggagacctttcttccgcatctcctttgttgacctgggttgcctggtctttttcaggttgaaaaacattttagagacgtggaaagccaaaagatactgcaacgttcacaagcccagcaaccacagaaggaggctgccctgtcatcctgagtccgtacacatggaggactcttccagcatccagccaaggaggcgctggtggtggcttcagcggaggcaggccgggggagggaagggatcctatatgtcctgttggctcttaacaaagggtcagcatttccaaatcttagacttgaacaaacaaaacacccaacaaaaaagaacaagagaataatttaaaagttgaatcattacttgactaacagacttcggtccaccatgtccttttcacagccctcttctggaacagtcaccttgttaattttatttttgaaaattattttcccactctgccctttacttctgactttcctttcctagtttgttcctgccattctgtttttataagtggctacacttgccttctgaatgattgaaagaaacttttacatcttttcttccaaaataaaagtaacaagctgactgtgattcttaaattgagaccagagcagcaaacgtctcactttaaatttttgttttcttttcctttttttttcttttttctttttttttttttttttgcacagggcatggcttgaattagttttatttttcttaactttaaatatatatatgaaaatatatattaaaatgttctctaaatattttctgcttcttgcaggtctctttttactagatcatggctgttcttcccacctcatccctctgaaaataaaaatgtattgccctccccaccatccatcatagccaggccactaacttgacttggtgcaagagattcttgctgcgaactttgtagagccagtgtgcagatagaatttggctttgagggttcctgatggctttttagtctttaactgtgtgtgtaccagtctcacatttggcccaaacctcaggattctccctctgcctgtcttacttcatggtactagaagaccttcctcgccactctctccacatgagagagtcagctgccctttctcctgtgcctctgcaggaagaactctcttgcatggcacatctcagctcctcattgagggatagttttctttgataagaaacctggagtccatttactctgacctctctttaaatctatatccagagccactagcccaggaaaaacttgggtgacccgtaatttctcttctcctgctgtccttttgctcttacgccccaccccaactccccttaaattttacaggcttatgacagtttgtatgtgctcagccaatgagcagaaaacctggaaagaatttctggactttagcccaccagtttgtctggttgactaacctgctgagagctaaaattggcacccattgccccgtgccttcaggcagtctcctggggcagagtatgccaccatccgaatatcaggcactgagtgggatgtgggtgatgctcacatgactggctagagctttgggggtggggtgggggttaactactatttttttggccatgatctctttccccttccttttttttttaattaaataaatggatcaaattaaataattcaagccctgccttcaaaatgaaattttttttttagtattatttagcaaaaacaataaaacccaaatttttttaaccatcactcatgtctcaggtttgtgcgtccttcagaggccccaggggagaggatccaaggtatgtctgtctgatttgacctttctctttagagtctcttcttcctactatttaccctctcttttcacccccgaggactcatccagaaatataatgcagggtataatttaagatgggggtccagggtttggagtggtgtgtaggtggagtgtggggaaaaggctgtagtcacatacatagaaccatttgttacaggactgtttggaggcacaaatggtcggcgagctgagaagtaaactttcagatccacctgccactggtctgaacttgatttaaagaactgagcctttgatttagcctacatgggaatgtagacttagagaaggtgagagagggagaagggaagaga

SEQ ID NO: 10743 - DNA, 1231 bp, Homo sapiens
aacagaatatggatgccctgtggccaagggtggagtcctgggctcaagcgatcctcccagccctcagcctcccaaaatgctaggattacaggcatgagctacagtgctcagctgacaggtggaatttgaccattgggtcagagcgcgggccattttcccgatgcttctacctcccctcataggacattcaccatggcaatggcacccagcaggcgttctacaatgacccctctgtgctctacatctctctgcatcgctatgacaacgggaacttctttccaggctctggggctcctgaagaggtacagctcctgggcgtaaatgcagaccctcctggcccctctgggaggtggcacaatgggacctggcggggagccacggaggcccatggtggtgttggtacctggggagtctgggctcctagtgggaggaccacactgatctgactgcccctccaggcagagcagaggtcagtggagtgagatctggaggcaggggtgagggcaggggcaatgtttgggactcccaggtggtgagaatagccctctccccaactctggtgccaggttggtggaggaccaggcgtggggtacaatgtgaacgtggcatggacaggaggtgtggacccccccattggagacgtggagtaccttacagccttcaggtagggactgaaaagggccatggtagtcagtgggagcccctctgggccctgcagtgggaggggcagaaggcactcagttcagtgtgggtagagggggttgtctctgggaggataacagtggggcgaggcctggcctggtcatctgccgggctcagcttgagccatccctttgcaggacagtggtgatgcccattgcccacgagttctcacctgatgtggtcctagtctccgccgggtttgatgctgttgaaggacatctgtctcctctgggtggctactctgtcaccgccagatgtaagcctgctgggggattgagggaggaagtgaaacagtgaggatatcgagtccagtgaggcatggggcagggaacagactgatattgcagcagacggggaaagcagggggcagggcctagacttggaatcatcttggtaactcccccaacttgtcctctgccaaccccggccttgaggggataggaggtggcagtggggtagcagaggatagaggatgtatcctgccggagctgtagagatgggcttgttggtccctggtgtttcagtgatg

SEQ ID NO: 10744 - DNA, 1251 bp, Homo sapiens
gtctgagccctcatttttggtggctaagcctgtagccctgtggcagttgaggtgccttttttttttttgagacagtcttgctctgttggccaggctggagtacagtggtgcgatctcagctcactgcgacctctgtctccccaggctcaagcaactctcttgcctgagcctattgagtagctgggtttacaggtgtgtgccaccacgcccagctaagttttgtatttttagtagagatggggtttcatcatgttgtccaggctggtctcgaactcctgacctcaggtgatccgcccgaggccacttctagagtagctctattcctcttccatgcaggccccatcagccagaagatgtatgctgtgctgccttgtgggggcatcggggtgagtagggcgtacagcagtgggggtgggcgggcggctctcctaggtctgtctcttccctgcctaccacagccgctggcccactgtccaggtgccctcccctgttcttgccctgcagggggcacactgaaacctgctctcctgccctgcaggtggacagtgacaccgtgtggaatgagatgcactcctccagtgctgtgcgcatggcagtgggctgcctgctggagctggccttcaaggtggctgcaggagagctcaaggtgagcgtgtgcttgtgacctcggtgccccttggcatggccctgctcctcagaggcagaggacaggggcagccttgggatcctttcagtgaggcactgtcctttgcaagctcaactctcaggcaccagggtgggaaggagttgccagctgggaattcaggttatgagggaccaacaaaaagacactaatgcccagtgctctcgtgggtgtctcgaggcagaaatagtgtctgcctgctcaagcctcatggttggcattcaaaatggtccgttgaggctgggcacagtggctcatacctgtaatctcaacactttgggaggccgaggtgggcagatagcttgagcccaggagttcgagaccagcctgggcaacatagtaaaacgctgtctctacaaaaaattaaccaggtgtggtggcgtgtgcttgtagtcctagctattcaggagactgaggtggaaggattgtctgagcctgggaggccaaggttgtagtgagccatgatcgcgccactgcactccagcctgggtgacaaagcaagactctgtctccaaaaaaacccataaaaaaacaaagaaaccccaacaaaattgtgcattaaacatatg

SEQ ID NO: 10745 - DNA, 1285 bp, Homo sapiens
gttctgagggtctgggaatcaggggtcgggggtagttcacagcaggcccaggtgacagccacttctcctatagcgtcgtccgtgtgtaacagcgcacccggctccggccccagctctcccaacagctcccacagcaccatcgctgagaatggctttactggctcagtccccaacatccccactgaggtacaggcctggctgggggctggtggggcggggacagagttgctccttcccatggaagaaagagtgcagctccttccagtctgtctgcctgagtgcccagcagagacctctctgcccacatgaataggctggaggatccttgcttggacttaattgcattgaaggggaatttgtcccacaggactatgaagagccctgatggctcagtctccctcagtgggagctcagggtagagggaactgggcaccattcagagaccttggccttggccccaggttgccctcccttgttgcctcccctttgtgcactctcatgcctgtctcttctgactgctccccagatgctccctcagcaccgagccctccctctggacagctcccccaaccagttcagcctctacacgtctccttctctgcccaacatctccctagggctgcaggccacggtcactgtcaccaactcacacctcactgtaagtacagggcatataccccatcttccctctggtgttgaggtcacaggtcctgcatgcccccagctggggttttccccttccaaggccctaagggagatctgttggccctacccagagcttggggggtagatagtgggtagatggggatgctagtccaaagttggcaggactgaggctgtataagcccctcccttcaccccccaggcctccccgaagctgtcgacacagcaggaggccgagaggcaggccctccagtccctgcggcagggtggcacgctgaccggcaagttcatgagcacatcctctattcctggctgcctgctgggcgtggcactggagggcgacgggagcccccacgggcatgcctccctgctgcagcatgtgctgttgctggagcaggcccggcagcagagcaccctcattgctggtgagtggacaggtagctgtgcaagggagggggctaaggtcaggaccaactgtcagggatactctccaaccctgtcacagttccccttagcagaatcaacagcatcagtgatttcttccacattctggaaacatgggatacctacaggatgccaggcactgttcttgacaaaatctgctgccatcttggcgttcaca

SEQ ID NO: 10746 - DNA, 1284 bp, Homo sapiens
gtcatgtacgggtacaaggggagcagagggaagatggaagtcaggccagcctcaggcccattggcatgggtaccactgcctggaggagccgcctgcccagctatacagccaggtccaggccctcctgaagggcagaaactttggacctgagtcacatggaatgctgatgttgtcactaaggctacccatcattcccctctctgtagatgacctggatggactcctgagtgagcttcctgaagacttcttctgtgggaccagtagttgagactgccccaacgcaggacaacccaccatgagcaggcagctctgggcatgtgtctggtcacatccaagggggagaagaaggccagcatgattggagagtggacacagccggggggcttctgtggttgctcccaccctgggtgttttccctgagagccccctcatctctgcgctgccctcactttgggccttcctttgccgttggcaccagaatccggccggagactggctctccagccaacaagaaaggcctgtcaccctcgccttgggtgtccctctcctgcctcagcttaattttagaggatattgggcctggttttcttgtcccttcataccctagtccctggacagctgaggagatgaaaggagccacaccacaacaatggcggcctgcccctccacacaggggagaagcacgctcaggcttcctctgctttgtctcttcagacctgtggttgctctgctcatccatgcccaaggttcccaggtgcaggacagaggtgtggcctattgtaccttgttctgaaataaagcatctcctgcttcttctgcctccctttcttttccaccccctgctgctcctgcctaactgccctgccagtgctgtgtggccacaaaagggctcaggcaactctttttctctttttttttcttttttatatacttttagacttctaaaattttttttttgagacggagtctcgctctgtcacccaggctggagtacagtggcgctatctcggctcactgcaagctccgtctcccgggttcatgcctttcttctgcctcagcctcccaagtagctgggactacaggctcctgccaccacgcccggctgattttttttttttttttttttttttagtagagacggggtttcaccgtgttagccaggatattctcaatctcctgacctcatgatccaccccgcttggcctcccaaagtgctgggattacaggcgtgagccaccatgcccggccttagacttctaaatttatagatttatttattgcaaa

SEQ ID NO: 10747 - DNA, 1165 bp, Homo sapiens
cgcgctgaggtccccaatggggcgggccacacgcccatggactgtgcgctgcaggccgtccaggactcccccaactgggagcctgaagtccttttcgccgcactgctggactacggggcgcagccagtgcgccctgaggtgcgctgggaggccctgacataggaggctcctgtgtgggggagcccgcggctggaactgctccgcttctggggaagacagagggtccaagagactgaaagcctgccctcagtggccagggggctgtccccagcttgggagggggagagaggattctgggagagagagtccaagggagggaagagccccagaggaaaactggggccaaaaggttggagcatacttgagggtggggtagacagaggcacaaaaaagggaagagagactcagaccttagccccccagattaggctaggattggccatgtgggtgaggcaagacttgggtctgccctcgggtgggggaggcatgtgcccaagaccctcttttgacccctagatgctgaaacactgcgccaacttccctcgggccctggaagtcctgcttaatgcctatccttgtgtcccatcctgtgagacctgggtggaggcggtgctcccagagctgtggaaggtatgtttgcctcagggccgagatggggaggagggacgagccacaggcctattccttcaggaccagcctcatggagggagcagcaggagggcccctgggtagagaggatgggtagagtggcacccctgggtttcagggtaccccctcccccggtaccccaggctgacccctaactccacacacctctcctgcctccctcacttgcatcagcacagacatttatctggcatctcttaacttggtgggcactgtgctaggctctctggggtgggagtggtatagacatagtggagacccttccctgaagtggagccccagcccgcattatcactgcagggcctctatggttctgaatctgagtcctttgagacacatgaaacacccaggtgggtgcatgctgcaaaatcccaggacccccaccgctgggttgcccccagatggtagggcaagggtcatctgaccttctttcactcctggcctaggagcacgaagccttctacagctcggccctgtgcatggtgaaccagccaaggca

SEQ ID NO: 10748 - DNA, 2251 bp, Homo sapiens
ggtgggcgtccagaactgccgccaccttccctgcccctcacaggggcagccctttcccctcagtccccatgggcctccttggcagcaggagctgtccttttgttgggtgccaggaaagggcctccagcctctacagcttcaaggaatgggaaagggagggtaggaagagggagaagtgtcagaattcctccccctgcctctcctccctgacccagggctggtgaggagtggggccccaaggtgagagggaacggtgctgctttatttgaaatgttttcttacctcattccctgccccaggaagggacccagcctcaccctcctggggtggccccgtgttcctcctgcccaccctgccccactgccctaccggggcagcccaggttcccaactgctgcttccacccccttcaccttgactggcttcagttcctctcagcgctcctgcctccaaagcgtgccctgtttcccttccttagcgcttttaagttatttattctgtacttgtggtttggggctctgaggaaaatcctaatcttgtgcctctccccctttgctaggagttgggtgggaagagagggtggcctctgtgccccaggttgtcagtggaggggaaggggtgtcactgcccctctgtgggactgtcatgccagtgtgcccacctgcctggtctacatcctaaagagatgtaccgtcccccctccatgcgggcaccaccactcccaggagccaagctggaggaccgcgacctgggctgggagcagagctgactgacatgggtggaggtgaccctgagccaagttctctggcacttgctggacatgtcccctaccctcttcccaagaggagccatcccacatttgggtagttagtacccaggactggttggactgatcgggttagggaccctagagggttaagggaacaacagagatggggctgcaatgccctgtctggaactccgctctcccgctggggtggttctgattgtggctcatgcctggttgcaaattggtttttaacccacaaattgtgattattttttaaaaagccaaacagattttggcaggagttagaataaatcccggggcctgggcttctctattcttggccctccgtagtctccctccgagaggaggccagagggagaggaggatctcagcaggcctctagccgcttccagatgcagtctggggagtgggctgaaggtgaagggaggaaggctgtgggccactctcccttctgagaggcagctgcagctcaggccctaatacactctttgccctgtggcctctcccttttccccccttctggttggaggagggagaagtgggaagtagcttgggaactggtttgtccacataaacttccccattgttccttggcccgccctcagggcagagccccctgcccaggctgggtaagagatgggcttggtccagcagggaccctgagggaacaaacccttttccttctggggagagagtgccccccctaccatgtagttgaacaggggctaggagctccccactcccctccctctaacagcaggctgtgtgggtttcaattcccatccttcccaccccggctaggtgtcgtccaccctgtatcctgtgtctgagtgtgtgtgggggggttctgtactaatttccatggccggtggcttttccttccatgcatcactcccccccgcatgcccaggggccacccgcctggcattaccgcatgctggggtcattgggggaggggggtggggctcacgctgtcctgtggtcttgagatttttatttttgcatatgtaatccattctgtacaggtagctaactttgtaaacgctgtgtattccctctgcccccatggctgctggtgtaaataaactgcatctcccgttggtagccccggcctacctactctcattaccattttcctgggggcagcgcaaagccattctctgtcacagaaagaggctgcaggaccacaaaatggaactttattcagtcacagacactgaccctccaatagccccagaagcaagagcctagggcccagcaatccatacccagtccttggagttgggcagggtaggacgctggccaagggccagtgctgtctcttgcttacagcctgaggactacgggagcagcagctgtggcctggccgctcccaatgctgggggcttggcttggtgccccatccccttcctgactgagctctatgaaggactcttaaaaaaataaaataaaatgcaagcaa

SEQ ID NO: 10749 - DNA, 2002 bp, Homo sapiens
ctgcattggaactggaggcagggaacatggggaggaggagggtcggtgccttcaagaaaacaggcactgccctggtggccctctcccctgccccctgcaggaaggagctgcctggacccgttcatgggggagggggcagaagtgttttttatatatgtgtatatatttttttttaagctctgagctgtcaacgagacgtttcctaccgatctcggctgccgtctctgttgtcatttctgggagagggagggtttaggggtagatttggaaccttttaaaaatggtcttgatgtatgtggaagagagtatgtgtatgtgtgttcctgtacatagcatgggtgcagctgtggatgtgtgcaaaagagtgtgagtgtgtgtgtgtgtgtgtaaaggggtctgtcctagagcccacatcagtttgttgtgaatctggaaaaagggtcggtgagggccgggagatgttgaccctggtgggagcaggctgaggctgccccgttctccacatcctctgttttgcccagtctctgattccattagggggagtgtgctgaagccattctcggatgcttcccagaccaggctccctctgccagagtcacatgcatccgagctgctggtctccattgtccagcaggaaggcggaaaggcaggcaagatggtgtgaagcttaaagcttgtatttgatggaaaaggtctcccctgttcatctgagaggccaagcctggccaccccaggctcagaacctgggcttcaagaaatgtgctgggagctcctaacttacacatccctccagccttccttgaatcctcccaccaccccctatttcctttaatttctcaggtctgctccctcctcccccaaccccacagctgggcaagaagtctgcaaaagctgcatctgcagctgtctctaactcttcccagccatctcccgtattttttggtaccttgattccttgactcttaataagccaagccaccttatctctgtagttcttatttttttgttgactaaatttggggggttcttttttatggtcatgtcactgacctattaaattggggcttggtgcttttccaccttccccctctgaatgaaagccaaggaatgggggaagagcgggaactctgccgcggaggtggagcaagaacggtgaagggccctggtcccagagaggctggtgggtccctctcccaaaggaaggcagacagtctctgctttgccttggaccttggtgctgggggtggggaggcctgggggggacactccccactcccattccccttcctttgtcctaatcctggaattaagtacaggggtttataggttctatttcttcccaagagccctgcaaagaaccccagtttcctatttggatgcccctacactgttgtgtttcagtggaatgtattttcatttaaaaacaactttgaatggggcactttttctttcctgttttaaaaattgaaaaattcttacagtacaaacaggactgtcagggtgggggtgttggtgctgtaagaggtcactcttgagtgcattttggcactgggatgggatggctggggtgggaagacccccatccccacccccaacttcttttctaatatttaaggagtgttttgtaggattcaacaaccaccacaacttgaatttgtatcatgggaggtgggagggagtggcttagaggtgtctgcctatgcttaaagccaactgtggaagttttgttttcccttttttgtataataaagtgaaaaacaaaggtttgactgctgtctggtcactggaatcaatgaaggttcacaggggtgacccaacaggtttgatctataaaaatgcttgaagccaatttgccttttcttcctagaactatcttcctcttccctaaagattccataggcaacctaccttcacattgttctgtgctactgttcttgcccttttctcaattccatttgttcaccttgggttgtgagaccactaaagattctgagaagttgga

SEQ ID NO: 10750 - DNA, 1210 bp, Homo sapiens
tactgccacgtccacctgtgaagtgcacttctccacgcacacgtgttcactcaaggacacacattgtccctcctggcctcatactgttccttgcagaggtcgggcactgtcccagaccatcaaagcattaactctgggtggagggttgcctaagcctcccaggcagggctcagtcacagagctcaggaggtccctcccagagataggcagcaaaacattggaggagcctgcagatgggacacgaggaagatgggatggggacagaggacacaaagaagagacacgggacaaggagacagagccagggatagatggggaagggcagcaggaaagacaagaagcacatctgcttggagaggaaacaaagtcatacacagccagttctcaaaagggggcactggccgctgccatgctatgagtagccctttttcctggttggcataccctggctgcagactcacatgcccttggtgctgtacccaaaaaagccagctgtctgcaaccactgcccaagcagagaggggtatggattgctggaactgttgacccctttgatgaggatgttggacagttgactgcacacacccaaacactctcatgggatgggagggagaggccaagctctagagtcagagccagggaaggccagaagaaactggtagagtggacaaggtgctgtcctgggggacacaagacttgggcctgttctcctggctctgccactgaaccgctgtgtatggggcctttggtaagtcatttcacttctgtgggcctggtctttatgtgaggtgagccaggtctgtgtggtccccttcaggtctaaaactgttttgtctgaggaggactgagatgggggaagaggaggctgagctctgcttctggttttctgtgggaactgtgggaaaggagcactgcctttctatgcctggtgcttctataagaggcaggggttgggctcagttgccatgagctcctggcacctgccagtgccactcttgtgagcccgcgaggatgaaagaagagatggacattgtgtgggagccaagagagaaggtcgatgaggaagagaaagagacacattggaaaggaggaacaagaaggagactatggagaagtggggaaagatgcagggagggagtgaggtgagagtggggaggctaaaaagggggtgatgaagggaagggaagccaagtggtgggaaagaatgagt

SEQ ID NO: 10751 - DNA, 1213 bp, Homo sapiens
cagtctcctcctcccgcctccccccggccggttccccccgcctccgcaacccggcggggacccggacgcagcgcagccgccgccagccccggagcggagcggccgcaccgcccccggggaccggatccggattcccgccgctcccccctcccgggctcccttcgccgtccccgcccgcacaggcgggcaagcagccggagagaagcggcctagcctgccccccgcccccgagccacccaccccggccagaggcgccgccaccgcccagccaccccgacgcgcacggaggagcccggcacagaggcgcgaccgcggcgggaaccgccgcctcctcccccgagcctgcggcccagccccgccggcgcccccgccccggcctccggggagccgagccaaggagagggcgggaggacggcggccgggaggcgggggcgcagcgctcaccggccccgccgccccctccggcggccggggagaactgcgcctgccggctccgagaagcgcgggctcctccgccagcggccggggctcggctcaggcctcgcttcctgccttcccctcccccggctctcggcgtcctcccaagtgccctggtctgctcgcgcccggtcgcctgctcggtggtcgcttcgggtccccgctgggcgcccaccgcaccccgcggttcgctcccgccgtccggccccgaccccagcgcgcgtcctcagccgcctcggttacccggcgcagcgcggcctccgggcttcccgctccagcggctccctccctggctctgagtggcggcgccctcccccgctcggccgggcacagccgcagctccctcccgcggcggcagcggctcctcctccgggcgaggcggcggcgctggggcggcggctgctgctgctgtggcggcggcggcggcggcggcggctgtggctgctgcctgctgctcctcgcggcgaaaagcacaaagcacagcgccctccgcctgcaggcagcccgcccgccgccggccccggcctcagctcgcacaccccccgccgccgccgcagcctcagccgccggagcggggaggaggagggagaagggaggaggaggagcgggagggggggcgggagaagcggggcagcgagcgcgtccttccccgtagagcgcacaccgacccccggggagcgagcgccagcccgcccgcctcgccggctccgctccctcccacagcctgcccgggcgg

SEQ ID NO: 10752 - DNA, 1239 bp, Homo sapiens
ctcacctgacaccccactgccccatctccccacctcgccgcccaggttctctgtgaaaacgctgctggagaagtacacagcggagcccatcgatgactcatcggaggagtttgtcaattttgcagccattttagagcagatcctcagccaccgcttcaaaggtgggcccagcgcccctcccccagcggtccctcccccagcgcccctcccccagtggtccctcccccagcgcccctcccccagcggtccctccccaactcccaacctttagctcccagccacctctttctgatatactccatggactctgaaccccctcattgaccctggcccccattctgggccatgcacagaagcttgtgtacagatctgggaagagggagaggcctttggcctacaatccccatcatgggcaagcgatatgctggggtgcccactgcacacgtgcatgtgtgtgcacagatctttgtgggaggaggctgcttatgcttatgcatgtgagtgcctcactacatggaccctctccaaactccctggtcttgctgagccccctccctgccctggctcagcctgtgccccagcaggtccagtgagctggttcagctcagacgggcagcggggcttttgggactatatccggctggcctgcagcaaagtgcccaacaactgtgtgagcagcatcgagaacatggagaacatcagcacagcccgggccaaggtgaggggcctgaagcaagcaactgctctctgctctggacacagggggcctgcctgtttcttggtttttgccccctgtgcacagcccaggggagaagggcccacacctgatgctggacacatgagtccctctggggcagcaagtaaaggtgaacatgatttccagggccgggcatggatccgggtggcactgatggagaagcgcatgtcagaatacatcaccacggctctgcgtgacacccggaccaccaggtcagacttcccaggcaactcagaccacaggtctcagagtgcacctgcattgcccaaacacagctgatccttaagttcctgcagcatccttcagttcctggactacaagtcccagcaccagcacacatggctgatttccctcttccagcctggcctgcagtcccaggacgaactcttttttttttttttttttttgagaaggagtttcgctcttgttgcccaggctggagtgcgatggcgcgatctcggctcactgcaacctccgcctcc

SEQ ID NO: 10753 - DNA, 2868 bp, Homo sapiens
agtgatttatccgccttggcctcccaaagtgctggctgggattacatatgtgagccaccgtgcctggcctccataaggtttttgaagggtgaccaggtgtccgcctggacccagctgctggggtactgcatgtgtagaggcagggaggcctgagggctgtgggcagaggctgagggcgtcaggcaaaggcctagcctgggccagccccatcacagacatcacttgtgtccctcctcttcccctgggctggtgcctgcttggccaggatgccttcgtgaagatcgtgaggcacgagggcaccaggaccctctggagcggcctccccgccaccctgtgagtagccgggtcctgcaccactctcctctggtacttcctgaccctttgctccctgttgaatggctaggtggggcaggtgatgctttaaaagtttgggtccttttgggagtcccagctaacctctctctgtatccccagggtgatgactgtgccagctaccgccatctacttcactgcctatgaccaactgaaggccttcctgtgtggtcgagccctgacctctgacctctacgcacccatggtggctggcgcgctggcccgccgtgagcatagtcttgggcctttgacctccctctgtccccacctcggcccaaacccagtcagtcccagctcccagccccaacctctgccagcctagggataggggggtgttctaggtccccagacctgggacagcaggtaggtgatgccatgtaagacctgtgatctcacttctccccattgtcacccccaatccccacacagtgggcaccgtgactgtgatcagccccctggagcttatgcggacaaagctgcaggctcagcatgtgtcgtaccgggagctgggtgcctgtgttcgaactgcagtggctcagggtggctggcgctcactgtggctgggctggggccccactgcccttcgagatgtgcccttctcaggtaggcacccaagctgcagggggtgggtgagggaaccctggggtgatgcacaaagggtctacagccaagtcccagctttgtgactagtgaccatgaagttacttagcttttctgagccatgggtttctcatctgtgaagtgggcctagcaggtagagtatttgcccaggcggtcaggagattaattcctacagagtgcctgcttctgagcctgcatgtagcagacaagactcacagctgggagggagtggtggcagtgaaaggtggacggtctggggccacttccttgcccttcccgtctctaatcagtgcatcccccaccccaagccctgtactggttcaactatgagctggtgaagagctggctcaatgggttcaggccgaaggaccagacttctgtgggcatgagctttgtggctggtggcatctcagggacggtgagtggactgggctggaggtgaggccagcggaggtctccctgcggggggcctgaggatttttggagatgcccagaagcagaccccatgaggcctttgtccctcccagccgcaagagccatctgggaggtaggggtgggggtccaggaagtggagctgagccctctccccgcccaccccaccaggtggctgcagtgctgactctaccctttgacgtggtaaagacccaacgccaggtcgctctgggagcgatggaggctgtgagaggtgagggcccagattgccgtggcaggggacaggtggggtcctgaatggggtctcactgagccggcctcgcgtttgcagtgaaccccctgcatgtggactccacctggctgctgctgcggaggatccgggccgagtcgggcaccaagggactctttgcaggtcagtgtgtgggtgtcgggggtgggggcatggcggacctgcgacctgacccctgacacgggcctcctttccactgcaggcttccttcctcggatcatcaaggctgccccctcctgtgccatcatgatcagcacctatgagttcggcaaaagcttcttccagaggctgaaccaggaccggcttctgggcggctgaaaggggcaaggaggcaaggaccccgtctctcccacggatggggagagggcaggaggagacccagccaagtgccttttcctcagcactgagggagggggcttgtttcccttccctcccggcgacaagctccagggcagggctgtccctctgggcggcccagcacttcctcagacacaacttcttcctgctgctccagtcgtggggatcatcacttacccaccccccaagttcaagaccaaatcttccagctgcccccttcgtgtttccctgtgtttgctgtagctgggcatgtctccaggaaccaagaagccctcagcctggtgtagtctccctgacccttgttaattccttaagtctaaagatgatgaacttctgcctggtgcctgtccctctggggcctggggtggctgggagggaggcttgggagggaccctggtgctggtttggctgcccagagtggcacctatgaagaggacctctccagtttggcgagagtcggggtgaggacctagagtgtaagggaccacaagtagacattctggtggtgaggtccctttggggacctcccccccatgttagggttagaattgggggtggtaggggctgggcacggtggctcacgcctgtaatcccagcactttgggaggccgaggcaggtggatcacaagggcaggagattgagaccatcctagccaacacggtgaaacctcgtctctactaagaatacaaaaattagctgggcatgctggtgggcgcctgtagtcccagctactcgggaggctgaggcaggagaatcccttgaacctgggaagcggagtttgcagtgagctgaaata

SEQ ID NO: 10754 - DNA, 1187 bp, Homo sapiens
cggaaccactcctgagtgaccttgggcaggccacctcgtctccccgagccttagttttccccggcggaggggggcggacagtccctgctttagaggtcattgccagggttgttgaggcaacagatgtttcgagggcggtggatgagggttgggttaaagtctcacagtgggccgggtgcggtggctcacgcctgtaatcccagtgctttgggaggctgaggcgggcggatcacgaggtcaggagatcgagatcatcttggccaacatggtgaaaccctgtctctactaaaaatgcaaaaattaactaggcgtggtggtgcgcgcctgtagtcccagctacttgggaggctgaagcaagagaaccgcttgaacgggggtggatgttgcagtgagccaagatggtgccactgcactccagcctggcaacagtgcgcagagcgagacgccgtctcaaaacaaaagtctcacagtggcccagcctcctttcctgccatccctggagttgtggtctgtttgaggtttggttttcaggactgaagcttcaagatggctgaccaggaccctgcgggcatcagccccctccagcaaatggtggcctcaggcaccggggctgtggttacctctctcttcagtaagacctaggggaggtggggtgggggcgggtggggatggggcagaccggagattggaggctgtgtggtcctgggggaggagtcctaggggtggggtcctgaaaggagccttcagacccgcttcctcccccagtgacacccctggacgtggtgaaggttcgcctgcagtctcagcggccctccatggccagcggtgagtacctgacctggaactagtgaggggtggtgcctgggcaaaagaaagatctcccagaggctggccgtggtttctcatacctgtaatcccagcgctttgggaggctgaggtgggtggatcacctgagatcaggagttcaaggccagcctggccaacgtggtgaaactctctcactactaaaactacaaaaattagccgggcttggtggcatgcgcctgtagtcccagctacctgggaggctgaggcaggagaatcgcttgaaccgggaaggtggaggttgcagtgagctgagattgtgccactatgctccagggtgggcgacagagcaagactccatctcaaaaaataaaataaaaaga

SEQ ID NO: 10755 - DNA, 1197 bp, Homo sapiens
actccactggccaccatatttcctttttcacaactttctcacccctgtggtttcccatgtcatcatgtggccgcttcccgcaaggccttagcggggtgcaggtatgaacatagtgtcaggcaaggaggcatctggaggggaaccctggcttttcctggggggactccctccctgcaccctagccctgtcctctcccatggctactgatgccttcccctcaccccagaggtggcccacatctgcacagatcagacccacaaaaatcacgtcttcctgactctcataagcctgcccagtgaggcccaggcattaggccatgtgctggggactcagacccacacatatacgcatgtcagcattcatgcttacaggtccgcacatgctggggcaagtgtcacacacggggcgctgtaggaagctgactctcagcccctgcagatttctgcctgcctggacagggaggtgttgagaaggctcaggcagtcctgggccaggaccttggcctggggctagggtactgagtgaccctagaatcaagggtggcgtgggcttaagcagttgccagacgttccttggtactttgcaggcagaccatgtggaccctggtgagctgggtggccttaacagcagggctggtggctggaacgcggtgcccagatggtcagttctgccctgtggcctgctgcctggaccccggaggagccagctacagctgctgccgtccccttctggtgagtgcccctcagcctaggcaagagctggcagcctgggttttcccaaagggtcatcttggattggccagaggaggacgccaggcacaagtctgtggtttatcattttccctgtctttctaggacaaatggcccacaacactgagcaggcatctgggtggcccctgccaggttgatgcccactgctctgccggccactcctgcatctttaccgtctcagggacttccagttgctgccccttcccagaggtgagcgtgccatcagcccagtggaggggcttaggtctgcatttatgcttttcctgcactctaccacctgcagataaaagggccctgccaatgcaggtttctctgtgttccacaggccgtggcatgcggggatggccatcactgctgcccacggggcttccactgcagtgcagacgggcgatcctgcttccaaagatcaggtgcagctggggtgtgg

SEQ ID NO: 10756 - DNA, 2992 bp, Homo sapiens
cccaccccctggcaaagaagctccctgcccagaggactaacagggcaggtgaggaggtgggagagcatcaggccaggggctggggcggggcctcattgactccaagtgtaggaaaaagtttcctccatcctggctgcccctcacgtttgctcctcttccagtggccttgtccagctcggtcatgtgtccggacgcacggtcccggtgccctgatggttctacctgctgtgagctgcccagtgggaagtatggctgctgcccaatgcccaacgtgagtgaggggctggagccagcttggctgtgtgcccccagccacctggccctgacacgcaccttacaggggctctgtggcatggggctggctggctgcttgctgggagcctggctgatgcagggttcatgctaccccctagtgggggattggggcagtgccagccatcagcctggctgctccctgtgtgctactgagcctggaagtgacaaagacccacccctgtccccactcaggccacctgctgctccgatcacctgcactgctgcccccaagacactgtgtgtgacctgatccagagtaagtgcctctccaaggagaacgctaccacggacctcctcactaagctgcctgcgcacacaggtaccagaggcagggtgcagatacaggggtggggccccctttcctcccttttaggcctggccttaggatcactgcaaggtggtgtaagcggtaccctccatcttcaacacctggttccagctgtggagccggcaaagggttgatacccctgagggtccccagtgccacttctgacctgtcctctctgcttccctcacagtgggggatgtgaaatgtgacatggaggtgagctgcccagatggctatacctgctgccgtctacagtcgggggcctggggctgctgcccttttacccaggtacccaggggtggcgggtgggtgggctgagcacagtgtggcaggcagccgggccccagtgcccacctgcccttcttcatctgccctaggctgtgtgctgtgaggaccacatacactgctgtcccgcggggtttacgtgtgacacgcagaagggtacctgtgaacaggggccccaccaggtgccctggatggagaaggccccagctcacctcagcctgccagacccacaagccttgaagagagatgtcccctgtgataatgtcagcagctgtccctcctccgatacctgctgccaactcacgtctggggagtggggctgctgtccaatcccagaggtatatgggaggggacagcatcttggcctgggcaggtgggtggccaagctcctattgctttctgccctccgcatagcccataggtgatacccagctctgacagattcgtccccagctggaggtgctgtaagcaggagaggcgggctggagtaggtaggggctcggcactgcgccccacatagtggctacctacaacgccctttcctgcccaccccccaggctgtctgctgctcggaccaccagcactgctgcccccagggctacacgtgtgtagctgaggggcagtgtcagcgaggaagcgagatcgtggctggactggagaagatgcctgcccgccgggcttccttatcccaccccagagacatcggctgtgaccagcacaccagctgcccggtggggcagacctgctgcccgagcctgggtgggagctgggcctgctgccagttgccccatgtgagtgcctccctgcctgcccctggataggggagctaagcccagtgaggggacaggaacataatgccattctgtgctcccttccccgccaggctgtgtgctgcgaggatcgccagcactgctgcccggctggctacacctgcaacgtgaaggctcgatcctgcgagaaggaagtggtctctgcccagcctgccaccttcctggcccgtagccctcacgtgggtgtgaaggacgtggagtgtggggaaggacacttctgccatgataaccagacctgctgccgagacaaccgacagggctgggcctgctgtccctaccgccaggtcagtgccaacccccatcctggggctgggtatggccagggaccaggtcccacctcgtccaaccctctcgcccccctctgaccatccagggcgtctgttgtgctgatcggcgccactgctgtcctgctggcttccgctgcgcagccaggggtaccaagtgtttgcgcagggaggccccgcgctgggacgcccctttgagggacccagccttgagacagctgctgtgagggacagtactgaagactctgcagccctcgggaccccactcggagggtgccctctgctcaggcctccctagcacctccccctaaccaaattctccctggaccccattctgagctccccatcaccatgggaggtggggcctcaatctaaggccttccctgtcagaagggggttgtggcaaaagccacattacaagctgccatcccctccccgtttcagtggaccctgtggccaggtgcttttccctatccacaggggtgtttgtgtgtgtgcgcgtgtgcgtttcaataaagtttgtacactttcttaacagtgtctgatttgccgccctgcctgccctccccagggccccagaacaggggttcacgtccactgccaacactcccctcccctaccccacagaaagacatacacagccttaacctcaccagttttatatttgctgctgcccacatcggctgtatcacattaccccctagtccccagagctgtcccagccaccagccctgtgacatcgtagcccagagatgggctagtcagcaagcagcaccccctcccctcccaggggtccacaaagaacgccccctcccttcccagccctcacactagcagctgaggctgggtcacccctcctgctttcccacaatagagctttctatgtacagccacgtctacacaggcactgcttccccccagccctcctccccggcacctccccgtggggg

SEQ ID NO: 10757 - DNA, 1137 bp, Homo sapiens
cttttgttgggaggtgagcacatttacagatattttgcttcatagtttccatgccctctgcccagctcagtttagacagtaaacgttccttgtttcttttctcccatgacactgacaagaggaattaccacctcagcctcttttgcccctcttcttgcctttcacccaggctctcagccctaattaacacactgacccaaaggtgcttgtgttgcaggtcccatctcctttgatgaggttaacaattcccactttggcattttcctaactattcgtgtggctagaattggttggttggtcacttgacaagaaaaaccatacttacctgggccaaggctctgttcctgccttcgcaaattctcaaaagagtaaagtttatgaaaagaaagtggcaggcaaacacaactcttgactgccctcccaccctcctacctgttcagtactcatctgattcagaagcatcacttcttggataactagcactggaaaaatgaaatcatctgtgtaagtgaagggactcatttttctttgctttcagcccatgtaaataaataatacagtattaacattttcgtgctgcttcccattagcttgtagattgagccatactctggctgcctctttgccttcctaggggcattttctttaacttccagaatagtgattttaaaagtaaaaataaaaataaaccttacttacaagcataacagattgtatttaactttatcacatatgatagagatatatatgctgtaaaatgagggaaaggaactttctaataaaccaatgatttgtggaaacttagcagagtctgtcgtaattgttgccccatccactcaaagttaggtagggttggaggtgtgggttataaataacatcttgtttgacatgaccaaggaatagattcctgtgaaccagttagagatgtttgcagttgtgcttctgaaagctcaggctacgcaaagagagaggaaagatgatggtgtgggaggtggtaatagtagttaatttctctcagttgtaggtagatgtattgggatgtacacctcctttccacttcctctttcccacaagaggaaagatttccttccattttagatatataatctgtgtgtagtagaatatatggtgtatata

SEQ ID NO: 10758 - DNA, 1215 bp, Homo sapiens
aagctaacagttttcattctgaaggagcagaaacataatcaatccctccctgagataaaatgtgggcatgcacattgctttggagtcagtattcagctgtaagtgtagtattgttttatggctgaaatagaaagctaatgaagaggcctacctggatccagattttatgttaacatggcagcaaaactaggaaaatgggaagaaattacttgcggggtgttctagatctgattttttttttttttttgaaagtttcagcctgtgggaggaaaagaggtatcttttaaaatagagatagttacatattttcctcatctaggctgtgtcactattgggtgcaaggatatcattgttggctagattcattttgtataatcatgtatcctcttgtgtgctggtagagattttaatcctgatttttccataaaacatgagtattaagaaataattcctggtttggagaaactggagaaatcacccttttaaggaagaaacactggaaatttctgctaacaccaagatatttaagagtgtacatagtaggtgctcaacaaatttattgaatgaatgagtgaatggaaaaactgggagagtcaaaagtgagcagaagctctccatttctacttctgtcacaaaccacattaaattgtaaataaggcccttctccacttgacttcaggcagcagattgtctagaagcctaaggacagcaatttctctgacaagacaaagtagatattttataccaggggttggcaaactactgcccacgggccgaatttggcccagtctgtttttgtatggtgcaaactaaaaatgatttttacatttttaaagagttataaaagaaaaaaatatgtggtctgtgaaatctaaaatatttactacctggcctgttggaggaaaggtttgccaatctctgttttataccattaactatgagattaacaaaaacttttacctttgtgcagaaggttaaaaaaaaaaaaacatggttaaggaaaaggagacatgttacctcttcatacactcctataactgtggcattgcaaaaaataaaaataaccacctttaaaaaaataaatcttatttaaattgctgtcttctgacttattttgattgcttctacgtacccatggaaatgaaatatgtgtgagtagttacttaggaatgtgttgatttttattttatgctttgttttgattagccctataac

SEQ ID NO: 10759 - DNA, 1240 bp, Homo sapiens
cacctcagcctcttgattagctgggactacaggcatgtgccaccatactcggctaattctgttttaaaaattttttttgtagagatgaggtctcactatgttacccaggctggtctcgaacttttgggttcaagtgatcctcccgcctcagcctctcaaagtgttagtattataggtgtgagccaccatgcccagcctagaaaatttaaccttatcttttagccattcatttacttttatttgcttttttaaaaaaaaatctttaaattttagcctagagaagcacctcaggaactctaaacatcttaggcaaaaattaaactcaggtgagactgaaggagaaatttcagaaatacacatgtacctcatgggtaattaatagacatgcacagtttccttcaaatcaaatgtttaataaggaaattcatataattccaagaaaacaggcaaaatttggaatacataagcctagctaagataaagaactaccagttaattcttaacatcactggagcttccagcaggttttttaattgaaggacaaaaagtgtccatacatttgtgttatctcttcagagcctgagggagaagagagtggctttgcccagtggaaaggctggggatttgagaatgatacagggggaaggagtcaagcagaaatgccaggaagaaccaggcaaagacatttggcgccagaagcatccacttaatttctgtgaagagtgcccctggtgtttcatcttggcctgttttgatgagaatgttatcttttgtgtctggataacgcgtcagcttcttaaagtacatataaagatattctgtcacctccccacatgcacacacttttaaaatctatttttattctcttgctaaagttgtaattatgtcaagaattttccagctctaactgccttcttagtacatgtctttctgcctttgaagcatatgagtttgccaaagtcattctcccctaatgacatattgtggacttacattaagaaaatgggccaggcgcggtggctcacacctgtaatcccagcactttaggaggcccaggcgggtggattacctgaggtcaggagttcaagaccagactggtcaacatggtgaaactccatctctactaaaaatacagaaattagccaggagtgctgggtggacgcctgcaatcccagctacttgggaggttgaggcaggagaattgcttgaacccaggaggcagaggttgcagtgagctgag

SEQ ID NO: 10760 - DNA, 1619 bp, Homo sapiens
acggtgaagcagacaagaaggcagctcggagcaagccctatgcaatgcgctggaaacaacaccgggctctggaagaaacggaggaggacaacgaagaggatcctatgatgtatccagagatggagttagaaagtgataaggaaaataaagagcagagccaacccaaacctaagcatgatggccgacgacggattcgggaagatgggctcatgaaaatctatgtgctgcagttgctggcaaggaccgtgtttgaggtgggttttctgatagggcagtattttctgtatggcttccaagtccacccgttttatgtgtgcagcagacttccttgtcctcataagatagactgctttatttctagacccactgaaaagaccatcttccttctgataatgtatggtgttacaggcctttgcctcttgcttaacatttgggagatgcttcatttagggtttgggaccattcgagactcactaaacagtaaaaggagggaacttgaggatccgggtgcttataattatcctttcacttggaatacaccatctgctccccctggctataacattgctgtcaaaccagatcaaatccagtacaccgaactgtccaatgctaagatcgcctacaagcaaaacaaggccaacacagcccaggaacagcagtatggcagccatgaggagaacctcccagctgacctggaggctctgcagcgggagatcaggatggctcaggaacgcttggatctggcagttcaggcctacagtcaccaaaacaaccctcatggtccccgggagaagaaggccaaagtggggtccaaagctgggtccaacaaaagcactgccagtagcaaatcaggggatgggaagacctccgtctggatttaatcctggcgggcttaaaacctgtgcttttcatagtttatggtaagcagcagctcactgaataatgacttccattgagtaaacatttggctctggttatcttcagggatgctgttggctcatgatccaagctcaggggactctggaggcggggctgggctgagggagagaaagggaaacacagtgttcccaggcacatgttcttagcaataatacagttgcagaactttacatttgtgtcttccagatctggagaagaacagacatatttaaatcattcttgttgaacagtttttgtatgtacagtattatggtacttttttttttttagtatgagaactttttttgtatttgtacattgaactgctgtagttatacttttatattaaaggggaaaaagtccttataaataatgcctattaggctagtgctattactttgttcagcaaattctaccctggctttagagtttttaatagatgctacacctaataaaagtgcctctcatattgcaggaacgatttcagatgtgtaaggagactgaagaggagataccagtttttagtcttggaaagcaagttcacagtagaaggaggttgagatctttcttttatgtgagaaatctttgaatctcattcatgcgatcagagttgtagccaatttttgaaaaccttattttcaaaggaaataaatgattcactgtaggattcctttaaatatcaagcatcaccagtatatgct

SEQ ID NO: 10761 - DNA, 1244 bp, Homo sapiens
cccaaagtgttgggattacaggcgtgagcctctgctcccggcctaatttttgtatttttagtagagacagggttttaccatgttggccaggctggtcttgaactcctgacctcaggtaatccacccacctcggcctcccaaagtgctgggatcacaggcatgagccaccatgcccagcctcttcttccttttttagtcttgctgttttactattgaaatccccgtgatagtccattcacagattgtgttacctcttggataagtttcttgcattcccaaagccagagctatgtaagtatagacattcacatctgcctgagcactctccagttggtctgaaagttgttcctggccaaaaaatacctgaaacacctttacaccactcctcatttggaaacgtttgccaatctctcttttctcttttcctttgtcctttcagtttcttggcggatctgatggataactcagagctcatcagaaatgtgaccctttgtggacatctccaccatggcaaggtaagacggaactttcagctacttggaacaggatttctcttttgtacctgctcatgttttagcccttagagtcacagcggttgaggtttgaggtcacaaggctcaacctcctgactaggggtgctgcatgcctgttacgaagtcatactgtgaaattctggcttttcccaagcagcaggtggagcctgttcctaagccacttgcatgcctgagccttatgtctacatctggacagaagatgggaaattgagccttactctgatttttataagttttcatttcctgagggatgcctgtctaagaaagatttcatcttttatttgaaaataatcctgtggcttcagtgttaattatttgctgtcccataaccctccttgctctcctttttctctccttatccctaaattatgtggtgtattgggagctgggggaagggcacagtaaattttcctctgtggtcggcagatgttaactgtttcttcccttttagacatgttttgtggattgtttaattgaacagactcacccggaaatcagaaagcgctatgaccaagatgtaagtagaacttctgttgagggtttaggatgaaccattcagaacagatagagatgtctctctcctccttccttcacccttcctgttctctataaataatgacgcctccaaagtgcagctttataattgtgatctctattaataggctgtaagaaaataatttcaactttctc

SEQ ID NO: 10762 - DNA, 1253 bp, Homo sapiens
gacagcacgctgcaagtagtggtacgggtgcggccccccacccctcgggagctggacagtcagcggcggccagtggttcaggtggtggacgagcgggtgctggtgtttaaccctgaggagcccgatggagggttccctggcctgaaatggggtggcacccatgatggccccaagaagaagggcaaagacctgacgtttgtctttgaccgggtctttggcgaggcggccacccaacaggacgtgttccagcacaccacgcacagcgtcctggacagcttcctccagggctacaactgctcaggtgagaacctcagccctgcctggcagtggcctggcctccctgcctcctcctaagggaagggtttcatgtgtcttctggcatgtgcccgcctcccccaagctgggcacgatttactaaggagttttgtacaatgtcccatcatgctctgtgggacactcattcattcattcagtctatgggggaggcactctactgggcccaggactgcaacagcaaatcagacaggacagttcctgtccacttggtgcttacagtctagaggggagaagacaccactcacagatcacacccacagtgtgtggggataaaccagggtaagtggtaagagggagataactgtgagccttcaacaccaaaagctgcctcacctacagaaggaaggcatagcccgcacccatagtggagatcaggtcatcccaaatccactggcctatgggggaacagaacaaacacacagagaactccagccctgcagcgggaacatggagggtgtgattagtgggattaatggaccagggaacacaggaggaaaaggaaaggggcttgagggaggagggaagggctgagctgggtggcaaggcactggggtcctcctccttactatgtcctctgcagtgtttgcctacggggccaccggggctgggaagacacacaccatgctgggaagggagggggaccccggcatcatgtacctgaccaccgtggaactgtacaggcgcctggaggcccgccagcaggagaagcacttcgaggtgctcatcagctaccaggaggtcggctgcccctgccctgggccttgttctcacaaccacccggggggaagtgagcccatggggtggagtgagctggtgtgggacagggtggcaggaaatggagagctggcacccctcaaggagatagatactgctcagtgagatgctgcactagagacacccgcctgttcaccctgctg

SEQ ID NO: 10763 - DNA, 1814 bp, Homo sapiens
cagcctgaaccgcaaggacgcagaggcccgcatcaatgcccagctgcccctgacagacaaggcccgcatggcccgccatgtcctagacaactcgggcgagtggagtgtcaccaaacgccaggtcatcctcttgcacactgagctggagcgctccctggagtacctgccgctgaggtttggggtcctcacagggctcgctgccattgccagcctcctctacctgctcacccactaccttctgccttacgcctagtggggcactcaaggcagggagccccaggcctccatctatctccttggaggctgaagccaggtaacacatcctgtttcctctcagccccctccccacacacacacacacacacacacacacacacacacacacacacacacacacacggactctccgaatcagggctgggcctctgtgccaggccatcccgtctttggagtgtatcctatttgagatcaagaaatagcctgctgtccttcccaccttccctgagcagcacctacagaacagcaaccgtgatggtgtgtgaaagcaacagtcagagactgctatacatttctgtgggtgggggtagggaatactggctctgtggccctcctcagagctgggaggccaagggttcactgggcttgaatcctctctaagcacctaccccattgtggcctaaacctcctcagtggaccacgggaaatcatgttggaccaagggtttccatgttcaaacagtcaacaaggccctcccctaggttgagatattttttatactgaaggcccaggccccccagtatggcttgctgccagcaagcagcaaggattctctcgtgggtaacgctgtagccaggcaggaccagcctcttctgggagacccctctccccacgtagggtttgtgtagtgctcccacatcctgcttattgcctgccacccctgcttctcgcctggacctcttggtattccgtgtacaccatccttgctgtttcttgcctctgtgccttcaacctgctgctcctggcctgggataccttttattttcttttatttcttcttcctttttttttttttttttttttttaacctacaactagctctcagttcaggcactgtctaaagccccaggctgggttaggtggtctaggataccaactccccctcaacattttaccttaatccaacagtacagtaattagccgaaacttgcctggtttttcctactagactgtaagccctctagggacagggacagtgtcttattcatctctgtgttcttagtgcagagcctggcccgctgttggtgtttaataaagtgtgttgatctgaaatgccccagaccaaccaagattcccagacttggcttcttcccacactgggctggagtcctcccggagctcagggggaggtgagggccccagaaggtgcacttgccatcaggcttctccctgggtcccaggaggactgcagccaggcccgaggcacctttgtgggaggtgggtagagggctgaggcagcgtcacaccttcttgccccgcctccccatctgccttccccaacccaattagaccagcgcagacataagccttccctgccagggcctgcagacttgctgatgtgttgatcctgcagccagaagcctattaaggctagaaatgagtgtgacggatgcaaatgctgtggtggccatacttagtgccccctttcccagagccgcttgtgctgagtctagctcattaacttgctgcaaacccctaaggggcaaagaagggccgggtaaggcagtggtgggctgccaggtgggtggccaggcagg

SEQ ID NO: 10764 - DNA, 4056 bp, Homo sapiens
tcccccagtgccacaggggacataggggtgagctggagcgtgggccagttttccctgggaggtctgatggacgtgtgaaccctggtgtggaggttgagtgtggggccggctgggtgtgagtctgctcccacagcacaggcggtggacccgggcccagccactcggaacttcagggatagggggtgtgggagagtctttgggccactgtcaactcagctctgcctctccctgttggctttcctaggttggactggtgctacaataaccagtcaccagtgcgattctggataaagccactgaaaattcgaaccaggaaatggaaccccaccactgttggtccaattttcacacacgtgagaatccctggcaaagggagcagaactgaaccggctttaccaaaccgccagcgaacttgacaattgtattgcgatggcgtgggctgcgtgacgtcacctccggtcgtgtctctggtctccgtgttttccagttaattacatcctcatgcagccgtgatcaagggaatgtaactgctgaaaactagctcgtgattggcatataatggagttaacgggtgaataataaaagtatatatatatattatatatatataaatattttaaatatctttcatgttccaaatgtacaaggatgtttggtctttaatgaaaagctgaatccagatcattcctcagaatgaggacccgaggacagtggcagacagacgcgttggcacagttcatggtttcctccagaggagacattggcttatcatggggaaaaagaggatctggagaacctcatccagctccccttctgaatcagctgggatgactggctttgagaaggaagggaagatggaacaggctcagatctcatgggatagcacgtggagctcttggctggggctgaccctgggcagggactttcctgcagggccagacctgcctgcattctgagacaaagcaatggacggtccgcagaagcagacctcattgattgagtcctttcttccatccccttggcctgctccctgtaggaagtcatcctgccaactgatttaaaagggctctttagccagttgttgccaaccttatagggatgagtcccctgtgagattttgcttttccactgcctgggatgatgcagtttgaagaggcccttggacctccttgtaacatcagggacctttggagaccattatcagtgtaagccctgcttagctcatcttagagcaaagagccagcaccctgatgtccctggggtggctaggcaggagtggcgtggggccaatacccagaccccttcagccaccagcccctggcctgtgccttccaacccattagccatttcttgttgtgcccctttccaagatacagcctgcaagtggtagcaagaagtgattagaggcagatctggacttggcaacagaagtggtttcccatctccattgtctgagtctgattttcgctgatgctgttttgtggatttttgtggtagtgatggttgtcagtgctgccagtttcccaaaacgtaatcaagcctctggtcacatggctgtcgatgtaggcattctggagtggtgttcagccaagtgaccgggcaaaattgggctgtgaaattgtacttccaggcttggatgtaatttttgctctagagagaagcaagtggtgggaaggaggtagcatgacgtgtggtgtgcgggtttccttgctgccgtcacctctccgctcatacaggaatgaagccttagccaggaggccaggctcagccctgtgccactcaccgaagccactttctacaggccagcaggggcttgttgcaggctgtgggttttggtgtggtttgtcagaggctaattctgcagagtttccaaaaccagaagacatcgtatgcttgggatgggggccgtgccacccgtgggaatgctgcccgctctgcagactgctgctagagccagcaactccactaaggtggattttcatcaggggcctgcagggccctcccttttcccattgttcctgcgctgcaaattgcaggccccagcaatcgtgactgacgtttgctccttgactccaagaaactgagaccaaagaagctgctgttcttagcaagatgcgcactgcattccacaggtgggaggagtcggagaggcaggggcttgctttgcagccccacagacaacagttgcacagtgcctcaagccccagagtggctcaccctgtccagacctttgaggatatcaaaggacaaagtgcccaagtctttcctaccttgggggaacctggaacttggaaaggctccctgtcctagtcttgatctgttctgggccaggtcccagcttgagctgcctctgagatttgggctgtgcggatctctggagtgagctctgtttcggttgacccaggtcatggaatggaaacggtgaggccccagtggctgttctggaagaaacagatctcctggcaaaggccccagcatctccctcactgaaaccaggtggccggctcctcggactctgctttatgttgcggtgagaactctgcccaggtgtgcagggtttggcttgtgggctgcttgctgctcatctgatttttgtcccagtagtccctgcgttcttcattcaaccccttctgggacttcagctcagagagcaccatcccgggggtcagggcctccccacaggagccctgcagtgtggtagcgccatggctgtctcaaaccaagcaaaggaaggaccctgaggccttcacgctaaccgtcctcgagcaactgctgttggaaggcctccctgggcctggcccccaccctctgccacccagtcctcccagctgccatgtttcaaagacgacctttacctcctgcctttggattgactctgcatttgaccacggactccagtctgtgtgtagggagagagctgagtaggaggcctccactccggatcgaggcctgtatagggctcgtttccccacacatgcctatttctgaagaggcttctgtcttatttgaaggccagcccacacccagctactttaacaccaggtttatggaaaatgtcaggccttccccacaactcctgtctaactgctgtcgcccccctacttgctggctctcagaagcctaggggagtccctgtggtcctgaattctttccccaaagacgaccagcatttaaccaacctaagggcccaaaggccttggacaactgcatggagctgcactctaggagaaggaggggaaccagatgttagatcaggggagggagcaggagtgtccctcccgtcagtgcctacccacctgtgaggcagccttctgatggcctggcccaccttccccagaaccaggggaggcctgaggcttcagttttactctgctgcaaaatgaaggcgggcctgcaagccgactacacctacggaggctgttgaggacaatttcattccattaaattaaaaaatactgactggctggcaggcaggtgccatgtctgggaacagggacgggggagcttcacctttttgtcttggcttttctttgggctgtgggggggcatccatttccagggtcggggaggaaataccaaatgcattgttgttctgctcaatacatctcacttgtttctaataaagaaagcagctgaacaaaaccttctgtcctggtattcctggtcagcaggtggcagtggaagaaatggagtgctggagcctaggctggagccaggacgacagggcttggacacaaagtccctcaagcccacagcaccaggccagcttccaaaggccttcctttaaggctgcccttcttccagggcaaacttggtgttgtcagacccttcccacccgccagagacgagctgctattgacccaggttcactccaagttagagcagcaactgggctctcagccagcacctgagcacctcagcacaggagccggcccaggcttccctagctgggcacagagcagcccccttggtccaggtcagcagtggctcctctggtggaggtgcaggccccgtgccttcccactgtgcccaggtgccacatctctcctcctgcac

SEQ ID NO: 10765 - DNA, 2637 bp, Homo sapiens
cgaatcttctcgtattcctgaaacagaatggtacggtccagaacccgccccatcttctctgcgattggccgtccttcctcagcgagtcgtgtgatttttcaccaatggccgctcgcgtttctttagcgaggtctaagcgatggaaggtggcggccagggagacgccccctacgcgtcctgggattggctacgtcgcacggcgcgcgagggcggcgggcccgaaagataagaactacgactcccggcgccccgcaaagggaactccgttacgcatgcgcacgggcggggcgaaaaagcttctatataaaaggggcgcagaggactgggagacagcagttggaagttggcaggtggagaggcaggttgggagggaaagtcgggggaggacgcggaagaggagctgtgggaagggggaggagggagggaggaaaagaggaggaggcggaggagaactgagcagagcagagcatcgagccaaaggggagatgagtttgtctgtcctctgctgaggctacggccgggcctagggaactgggagcttgggtggaagcgacacccgtggaagtgggaggaggtggcgccgggactttaaccccttgtgggctctgcggcaggggatttaaccctttgtggatctggcccctcggaggcagcgtcatcggtagttttaaccccttcggggctgggtttcacgcactggacttaccctcatcaccttgctcaccaactcctttattggggtgctccgcttggaggtttgaggcccacctccgcccattacgtactgttcctgccgctgcacccccttggacccgctagctggccgcactgtgggcgcttaaccctttactgacttgagctccccagattgcagttggagtttgctgatagaaggactagctaaaggcgtcactgcaggaattacaaactgaagaggactctgttggactgttttttttttctttttcttttttttaagaaaaacccatttttttccttaaggacttactagccaaaatttcttaaacttcgaggactctactagccatggccgagccattcttgtcagaatatcaacaccagcctcaaactagcaactgtacaggtgctgctgctgtccaggaagagctgaaccctgagcgccccccaggcgcggaggagcgggtgcccgaggaggacagtaggtggcaatcgagagcgttcccccagttgggtggccgtccggggccggagggggaagggagcctggaatcccaaccacctcccttgcagacccaggcctgtccagaatctagctgcctgagagagggcgagaagggccagaatggggacgactcgtccgctggcggcgacttcccgccgccggcagaagtggaaccgacgcccgaggccgagctgctcgcccagccttgtcatgactccgaggccagtaagttgggggctcctgccgcagggggcgaagaggagtggggacagcagcagagacagctggggaagaaaaaacataggagacgcccgtccaagaagaagcggcattggaaaccgtactacaagctgacctgggaagagaagaaaaagttcgacgagaaacagagccttcgagcttcaaggatccgagccgagatgttcgccaagggccagccggtcgcgccctataacaccacgcagttcctcatggatgatcacgaccaggaggagccggatctcaaaaccggcctgtactccaagcgggccgccgccaaatccgacgacaccagcgatgacgacttcatggaagaagggggtgaggaggatgggggcagcgatgggatgggaggggacggcagcgagtttctgcagcgggacttctcggagacgtacgagcggtaccacacggagagcctgcagaacatgagcaagcaggagctcatcaaggagtacctggaactggagaagtgcctctcgcgcatggaggacgagaacaaccggctgcggctggagagcaagcggctgggtggcgacgacgcgcgtgtgcgggagctggagctggagctggaccggctgcgcgccgagaacctccagctgctgaccgagaacgaactgcaccggcagcaggagcgagcgccgctttccaagtttggagactagactgaaacttttttgggggagggggcaaaggggactttttacagtgatggaatgtaacattatatacatgtgtatataagacagtggacctttttatgacacataatcagaagagaaatccccctggctttggtttcgtaaatttagctatatgtagcttgcgtgctttctcctgttcttttaattatgtgaaactgaagagttgcttttcttgttttcctttttagaagtttttttccttaatgtgaaagtaatttgaccaagttataatgcatttttgtttttaacaaatcccctccttaaacggagctataaggtggccaaatctgagaacaattaaattcattttagttataataaatttaatatttgtaaatgtaacatagtttcagtgtgatttctagagctaattcaaaatagtattgatatattttatgtgactgcatttttggggaggggtaccgaaatcgttaaatttgtcagtttgcaaaaatatcaatctttaatggg

SEQ ID NO: 10766 - DNA, 1131 bp, Homo sapiens
cttggagactttatttctatatttaaagtattttaacatgtccgggcacagtggctcatgcctgtaatctcagcactttgggaggccgaggtgggtggatcacctgaggtcaggagttcgagaccagcctggccaacatgggtgaaaccccatctctacaaaaacataaaaattagctgggcatggtggctcatgcctgtaattccagctacttgggaggctgaggcaggagaatctcttgaacccgggaggtggaggttgcagtgagccaagatcgcgccattgtactccagcctgggtgacagagcaagactccatctcaaagaactaaaaagataataaaataaaaagtactttaacagtgacaaatgtaagataccccgaggattaaccagggtggccattgcctaggctcctgcccatcagcattccaggtaactttatgtctcatcccccttctcaggggactacatccctggcacagagacccacatggctccggaggtggtgctgggcaggagctgcgacgccaaggtggatgtctggagcagctgctgtatgatgctgcacatgctcaacggctgccacccctggactcagttcttccgagggccgctctgcctcaaggtcggtgacggcacccagcatggccaacagggggagctgcagggccctggggcccaggctgcaggctggaggggctgctctgcggtggcagatggagcaaggggaggcctggtcatccatgtgggatcctaattcaaatacttgccacccaaatctgggggtacaaggggagatccagctgcggaggctcaccaagttcatggcaggtgagaactctcttctgtccataccctgggccccatccacctgcctcctaacgggccgggcctggaggctgtgggcgtcttgctgcctggctctggcctgttttactggctccatttgtccctttcctgggaaaagtgccctcactgtagcccagacccctccattccttgtggtagaccccagcacagcgggaacaggggccggcgggagttgcgcaaagagcaataacagccgggtatcaggaaatgagggaaggcaggcctcacctgttgtcttttgccccccagattgccagcg

SEQ ID NO: 10767 - DNA, 1212 bp, Homo sapiens
gcgaggcgaccagggagcggctgggatggatcgcctctcagccccgggctgggctgcggcctggcccctcgccccggagcagtggggtcggcggccaggccagcgcagtccgacgtaccccgtccaacccactcgcagcggtccgcgggcgcgccctcgcacgcgctgccggtgccgcgctcgccccgggcctccaggccgcgcactcctgctggccacacgctggctccgagcgcgcgcaggggccgcctgcttccccttcactagtgccccgcgccgccgccaggcccgcccgcctgctctgcgccccagtgcccccaggatggagctcgcctgccgcggggcggacgtgtctcctgcaggagtgcgccctggcatctgccctggcgtgaaaccctcccggcctttcatgggaagttctcaggtcacacctcaaggcggggagcaggagctaagcctgtcctcagcatgcagcggggcagtgctggccgcccgcagcatcctccctccgccctcggaccccagtcctcctctgtaattcttctgggctctccaactcgggactttatctgtcggttcaaatataacattcccatcttggaaacccatcgtggccctggcatcttgcagccactgggcaccaggcagagaggggccacttgtacgtacgtttcccacctgcccgggagcctccttagtgctgggtagcttcagaaaaagtgtttccttcctagtcgaggttaaaaagttgctctcggccctaaagggtggactggaggtatgaatgagggagaggataagtggtgaaaaggtacatacatcagcaaagtaaatggtaaaactacttttgatcgctggagacaatgaacaccaatgacttaattaaggactttaaaagcacatgaaattaaatgattagagtgaggtcatgatataaaataggagtctggagtttattccaagaaaaatgttggaaaccccttgactagaaacatggtctttctgaaagattagaaggagacagtatcttaacattagtgatgtgttttttgcttagtgtcttcatacctgtgagctccgttttccttcagatggctgtgtggtaagacagattgtagtgtcttgttttatgggcgaggcacctgaggcaggtgtgtatgagggagtgggggtggtatatatcttgcctgatgcctcatagctgggactaag

SEQ ID NO: 10768 - DNA, 1854 bp, Homo sapiens
gctcatcctgcagcagtgcgcggacatcttcccgccgcactgactgctggcctgtgactggggcggcggccgcggtcctgccacacaagctgggcggcggaggccacgcagccgggccttcttctctctgggaccctccgccagcgcatagccgcaggccggtgtgacttctgcaccctcggttctgagggtacggtgacccctagtgggcagtttgcaaaatgtgattccttcttcccaactccccatccccccttcccttcccgtcacgtcctgtttgggggttaattcggttttttctctgttgcatcgcgcctactgtgcgtgtgcgatagcgtgtgtgggggtgagagtttgttttctggaatggtaggtgctgggaggaggagtttgatggagggcttcctggctgcttctggccctcacctcgtggaggccttcacagagaccctgtgggccctggccctgtgctggcactgtgccagtcatgaggcagctctgatcacttccccactgtggaaacaggactgacccagccttcagtgtgggctgctgaagctatcctcctcaggcctcagggatgacctcctgcctgagcctctcacaggctggctgtgggccagtttcatctgctttcctgttgggggtcccgggcctctgctgtccttgacccactggtgttctgtgcaaggcttcttcccattcaccaagtgcacaccttgcatctgccgctcggcatgcaccagttccacacaccatcccattttacagacaaggacgctgaggcctgcagcagcagtgtgacttgctcaaggtccagtgagtgacctcattccccagaaaaggctcctcccacaccagagtacagcctgggtagggggaaaatcagttctttcagctaccacccatccaacctttgggcctatgtgaaaagaaaggaactaagctgggtgtgttctgtctggacctggggaggcccctgaaggcaaagagggaaactgtcccagctgttctgtcctaggggagggggacatagccctagcaggagctcccagcccctcttggcactctgacacacaagtacacccatctggggcccgctttgccacgaagagctgggcaggcctgcagggtgtggggaaggaggacacaacctcaagaaaggaagcgtgaaccccagggaacagcgggtcccttccctcctcagacacaagccacctcagcttgtggctcttggcccccagccccaccaacccacctgttcatttattcaacagacaatgacagctgatatttattggacatttgcaccatgccaagcattcggcttggattatcccatttgtttctcacagccggtatttattgtctgctcctctgtgccaggtgctgtgctctgggcaggggcactgcatgggctgcctgccctggtggagcttgtggtctgatgggtgaggctgacccaagcccaccccattgccaacagggccagggcaagagtacacacaggggcctcataccatatgtctaaatatttaaaagttatcaatcaagctaacaactgttaaataaaatatgttctattctcctactttgacaaatgtgtcttgataatgacctggaaggccaggttctaatttaaacttctttgacttttccaagttccatgcccaaatgtggtggccggagaagggcaggccctgggctcagccttccctctcatcttccctcccacagagccctcctcccccaagcagaggctcacgggcacatatgtggacatcgtagtccatgtgtgccaactgcccataccccctgcagccagctgccgcttggctaccccactggtgacgt

SEQ ID NO: 10769 - DNA, 1232 bp, Homo sapiens
cctctttactccccaccccagtgcgtctcgcctgctgagcccaccgctttctcagcgtcagagcccctagctcttctctagcctggggccttggccccattaggagaaggagaaatgactggaaaccagcactgtcagcactttgagccctcctcggtttatggagggtcgccgtcttgcccacccccgatccccgtgcgctcctcacccctctacagacaggggcgctgctgcagatgctccaggcccaccttggtgggtgcccggggtcacactctctgcctgactgacccctgccagggcacagataggcaggaccccagagagggcaggcagccacgccctgcactgtggagaagtgacctggtcctaagctgtgcagggcgtgcgggggaactgccctgtggatgcagccaccacctcacaaagccatgaattcccaaagcatcactgaacttgcccagccgggacactggagactgaagaagttccccggagcaggactgcctttgaaggggccttggggctggggtgggagtctggaattgttttcaaagtgatggtcagaccctccaggcttcggggaaatgtgggtttgctggtctctctgtcgccttcccccacctctcctggacctagcaggccctcagtcctagctgtcttacctgcgctcagcttggagtcaggcctcaggtggagagccgcatgtcactgtcagagatgagcccacccccacccttccctgggggcgattagctgctgagtcacccacccagccttggagctggatgcctgtgcagcagaacagaggcaacggtggcaggcaggtggaggctgcgcacagcttctcccggtcatggcacacacctgtgcccagacgccaatgcctcctaagccaggagctgggttatgcaccgccatggcccacattaacgctccaccacaagcccagcctagtcagagccctcattgccccatccctgagtgggcaggagcctggcctggggagggcttgggcctgtgaggattctccccgaaggtgccctcggaggcagcaggtttgaggccctggggggcccgttccccagaagctgccagtgctttcagatgcattgactcttcccgcctcccctccctcagaaaggtagtgcccacactatttttaaaatgttattttatgcaatacactgttcctagtgagcagggctctggccctgaggagtctttgcaat

SEQ ID NO: 10770 - DNA, 4984 bp, Homo sapiens
agcatgtgtgtgtgatgtgtctgtgtgtggtgtgtgtgagcatgtgtgttgtgtgtgtggtgcatgtgtgtggcgtgtgagcgtgtgtgtgcattgtgtctgtgagcatgtgtgagtgtgtgtgtgttcagcatatataaggcatgtaactgaacacagcactttagagggctctcctggagtcagagggggtgggtaggaggagaagggaggtgggctagtgtgctgaagtatctactccttgtcatagtctgtgacaacccagactagcccatgagccaccctgttccctgcatttccaatgagacctcggtggacatgttccctgaggtgaggctgactgatgtcatttgacgatcttgatgccaaatccttttatatcaaaaacaaccagaacactctcttttctcttagtgctttcacccagatgaccacatttcatcctcccagccactctgggccaggtggcactgctggtttgaaagggaggtctcccctggagtaacttccgtgggcggattcacaccctgcccacagtcctgtcccagtcagcccaccatggtggtctccggttcctccagaattcccgcttttcagctcatccccacattcccggagggactgagagcgcagccccagggccctgctctttgggggccgtctctacacccagagaagcagcaaggcattcctaggtttctctttcagatgcagaacttcagtgttcagagatgttcccactggtcctgagagggctcagttcagctttaatgactgcgctgttgcgtgtgctctgcagagggcgggtggcccagcgtggctgactgcagttttcctgacgtggagcccgagcctgccccgctgtttattaattaaggatcactctgcttgcagaaccctgaactccccagaactgtgaggtgggagaaccccgagaggccacctggccccacttcccacctgctgcccaaaccccctctctgccttcctgacagtcaccccaactcccagtgatccccatcaaccatctgacaaggggactgagagggaagagaaaggaggggcccaaagaggaaggtaaaactgtcgggaacagcccccaaatgtgtgacagccttcagtggagttgcccactttcccttttctcctccctgcaggacctcccttctccccagtcctccccaacttctgaggttacattgagaaaagtctgcagagaggtgccagcatcacaaggtgttaaggaccacgagtttggcattttaacagatgccagagccacttgagaaatgtggtaactaagcccagagaggtacagttaacctccccagagtcacacagcaggttcatggcaaagctggactagcacaggtgtccttcccctgcagatccccttctgtgccccacatcacctccctccagtgtctgggccacctggagatgggccctcagactcacccggccagaggtgccatctcatgggagaggtctggccaggaagcatcgatatttgagatcccaagaaatgaagacttggcctgtcagatgacagacttcggtcatgggaacacgtgatctgttttacacatgcgtcccctcagcagcagctttccagaacattcccactttcttctgtagtgagaagaactctttccctgcagcctcctgcccaactcctccttcagtgtctttgcttcagtgtctttgataaaccattctgctttgcagagtgcgagctctgccttgcagggttcgcatctgcctgtgctgagtaaccaacgctaaggtcgagtggtcggtcacctctcataagagctagggttgtctcatgctgatgactaggacttgccctcaaggagaaaaataaatcaaaacaaaagcaaaaacagcaaacatgcatctcttaaagaaggctctgagtccaggtaaatttccttccactgaagcagccaggctgaattcgaattatctttgcccctgcttaaaaactaatgcaaattttcctagagaatatccactaattcctggagggggcatgggcattcctgatgcccatgagaggaccatttgctcttccctcagtatgctaaataacagaagcgacatttgttgctggaaagtatcagtgaagttaataaggtttttcttgcccagggtgagggaacagttcccaatgacaaatgctgtatgggaaggggctgtagaactgccagcccctttggtccatccgtaaagtgaactctgtggatcctggaggattccagcgtctttttttttttttctttttttttaagacagagccttgctgtcacccaggctggagtgcagtggcacgatctcagttcactgcaacctccgcctcccgggttcaagcgattctcatgtctcggcctcccgagcagcaagactacaggtgcgcaccaccatgcccgactaatttttgtattattagtagagacgggggtttcactctgttggccaggctggtctcaaactcctgacctcaggtgatccacccgcctcagcctcccaaagtgctgggattacaggcatgagccaccatgcccagccagcatctttcatttttctgtctgctttggccctttcctctctcactgtcttccttttccatttccaaagtcagtccatctcactattagcacaaaaactgctagagcgcttgtcattggtcatctctccctgcacctggctggtctgttcttggccactgaagcgtttcccccagctgttgctttaatcattttattgttattatgccttacttaagaaatggatatgagatgcatttacctgtctcttcctgccactctgcagagccagtaagatgtggtggaaagggcccaggctttggaggagggctggctggggttggatcttggctgccccctactagctgtgtgaccttgggtaagtagctggacctctctgagcctggttcggaatcatagcacctctctttcagggctgctgtaaggaatagcagtggtgtgtataaagcagagcgcacagccagcaactggcccctagccacactgctgagcacctactgtgataagctgccattgtggtgtgtgaagcaaaggggaaacatgcctgctgtagtgagcttcctgtagggcaggttgtagaaccagaggtgggttccaaggttacaaagggactcttagtgtattagtctgttctcacattactataaagacctacctgagactggatcatttataaagaaaagaggtttaattggctcacattggctgggtgcggtggctcacgcctgtaatcccagcattttgggaggccaaggccggcggatcacttgaggtcaggaatttgagaccagcctggccaacatggtgaaaccctgtctcttctaaaataaaatacaaaaattagctggccatggtggtgtgcgcctggaatcccagctactcaggaggctgaggtggaagaattgcttgagcccgggaggtggaggttgcagtgagccaagatcgccccactgcactctagcctgggcagcagactgagactctgtctcaataaaaaaaaaaaaaaagaaaagaaaaagaattgcaagaaataaattattgtttatgagctatatggtctgtggtaccttgttgtgggactgggagtcttggcgtctccctgaccctgcctgttgctgcagcaccgctcagccctgcctgctccctacctgcctcccctcggcctctcctgcctccaccgggcccctggtgcctcctctagagacagtcctcctgggaccgattgtgttctcacttacacgaggcatccaggactacagataaccagaggaaggggcgccccccccgcctgccctcctccctggcatcctcacgctgcagaggtcagagcctcatcccagccccttacctgcccctactctgtggagaaccgtggtcagttcgccaggccggatccacgaacggccttgtggaagatggtgagctcacacccagagctggctccgatgaccctgtctcctttacatgtttctaccttcccctccctaccttcccccactgctgggcgcagagtggaggcagatgaggtttaaagctcagaagggcttaaacgggttggggcgcagtggctcatgcctgtaatcccggcactttgggaggccaaggcagaggatcacttgagcccaggagttcgagaccaacctgagcaacatagtgagaccgcgtctctacaaaaaataaaataaataaaattagctttgcagggtggcatgcacctgcagtccctgctactcagaaggctgaggtgggaggatcgcttgtgcccaggagtttgaggctgcagtgagctatgctggcaccacagcactccagcctgagtaacagaatgagatcctgtctcaaaacaaacaaacaaacaaacaaaagaaggcttaaagggggctccaggtgggcttggcagcacaaagctatgaagttctatcttagacacaagttctgttactgggcctttgcaggctggcctgggtacctggctgccatagacagggaaccttccagatgagctgcaggcgtggagcacaggagccagggtgctcttcctgggctctgtccacaggcagaacgtacacagtctttgtacacgtccggcggctctggtgcctatttttgtttgtgtttttcttttgtttggggggatggatttggtttcccccgagccctctgtcctcctgtcacctggctggtgctcggcaatgttgaccagctgcctggctggagttggcagtggctaaggctgtgacagctaacatgttcctgagtcctctcatttcttcaccataatgccctgttgagtttgcagatactgtctctgtttttatctcccggggaaactgaggctcagagtggctaggccaccttcccatggtccctcagctcatgagggccacacagggcattgcggtggccttctcctc

SEQ ID NO: 10771 - DNA, 3433 bp, Homo sapiens
catcgacgcaaggctcagctcccaccacgctgtcctgcaaagcaccgaaggagtgagcacatctctcagccagggggagcagcagatgcagccaggagggaggctcaaagcacggctaagcacaggctggaggcatggagggggcgtctgaaggggggcccaccttccgctgttggagtgctcttagcatcagaggtttcagagcccggttcctcagatccgtcctcagtgggggtctgcaggggagattctggaacacatacagtgagccctcagaacggtggcctctccccagcgcccccttttgttctcaggaggaactggggagcagtgtcctgtggagctgaaaatcgctccctgtggaaacagctggaacacggcctcgcaacaaacccacaaaggggaccaaccccacctccctccctgccaacacgactgtgccccacaccagggccatcagatgaggacacaggtgatgtgcgtttgctcctgggtgaaaggacaaagtgcctcttaaccagctagtggtgccacctgaggcaaaggtttatcttccattggtcaacgggcagcaaataccagaaagccgagctacgcatgaaccttctgctttgtcattgctattaattaacaacaagtagacacctggaaaaacactcagcgatccaaccccttccttggaaaaggagtcagctcagggcagacacggtgcttacttctaagtggacattgggtggtgtttggacgccaccaagctcctttcatagaaagacctccaaggactgatggacaagctgtgagttacatttgaaatggcagccatgtgtacctacaataaaactgtcctttcagaatgggaagcctgggcaagagaggcccaaatgatcacagtggttgacagtcacgccctccaccaagaatgtccttagtaaggcagcttttgttgccttaatagaaatgagaaaactacctcctcctcctcctagaagggctgaattgtcccttccctgtggcactttggccactgggagtcaatctgccctggttattttatgggcttatcaatgcatcatgcagtatccagggctgagcaggtcaaggccttacactctggaaggttgagaattcttgagagcccaatgtatacagagctgagtgctaggtactgggaagggacaaaatgctcagaagatacagcctgtgctctgggagcacacactctcctgagggaggaaggatggccacacagagcaaaagactccagggcaggcccatggccagccgatagggtcctcctggagatgccccaccaggaagcaggagttacaggctagagagcatgggaccaaggggcaagatggctgggttcaagtcccagttccacttctttctggtcaggtggccttggacctgcctctcagggcctccgtttcctcatctgtaaaatgcgtgagatgacctcaactctacctgcctcctcctagagctcctgggagaatcccatgagtgaatgttggtaaaagcaccttcaaatcatgaggatttatacatgtggatctagttctcatccatgtaaaggaggcaaatgtttatgggggcagccctgggcttcccttcagttctgccccacctgggctgtccacaggggaccatcgtggtaaatcatggctcataccatgatgggtggacggacggatggatggatgaatgggtggatggatggatggatgattggatgaatgtattattggatagatgactggatggtgggtgaattactgaatgattagatggatgtataattgatgtataattatatggatggatatatgaattaataatttattaggtgggtgtatgaatgtgtaattggatggaggtataattggatgtagaattatatggatgtgtgtatgtataattgaatgattagatgcatgtatgaatgtataactggatggatgtgtaattggatatatgactggatggttacatggatggatggatggatggatggatggatgggtggatagatgaatggatggatggatggatggatgggtggatagatgaatggatggatggatggatgggtgatgtgtagatgattcgatgtatgtatgattgattggatgaagatatgggtggatggatggatggatggatgaatggatgatgtatagatgatatatgtatgatcaaatggataatgggatggatggaggaaggaatgatggataattggatgaatcgatggaagaatgaatgatgtagagatgtatggttagatgtatgtatgatggatgaatgatggatggaaggaaggatggatggataaatggatagatggatgagctggtgatgtgcagatgtatgattggatatatgtatgattggatggatgataggaaggatgaaggaagggatgggtggatggatggatgaatggatggatggatgaaccgagggaagaatggattatgtacagatatatgattggatggatgataggaaggatgaaggaagggatgggtggatggatggatgaatggatggatggatgaaccgagggaagaatggattatgtacagatatatgattggatgtatgtataattggatggatgatgggatggatgaagggatggatggatggatggatgggtgggtgggtggtgtatagatgactggatgtatgcatgattgggtggagggaggaagatatgggtggatggatgggtggatagatggatggatgtgatggtaacatgtaaagcttccatcagaatttctgaattctttgccagtacctcttagtcatcttccctcagctcctcctgtgcctggcactgcatgcccagaaaagcctctccagtcttcccagtggtgtctcagccatcagatcaatggttcctcagctctcagctcagtgaattcactcccctctgtatgacagaaattccttactcttcatgcacatggtggctgaatgggtttcctctgctgtctaattgtcctattcatggcttagactcaactctggaagactggaagatagagcctctagagagtcaggcagatggggcccaaatcctggctccaccacctattggttgtgtgaggctgagcgaattacctaacctctctctgcctcagttttctcccctgtataatgggcatagtagtagctccactggctcacagggcttctgtcagcatgaaattgttgaatgcttatttaaagcactttgtaccatgcctggcagatgagacgtccccaataagtggcagtgattattttcagtcattatcatgtcaccttggttgaagggcccagtgtagcactgctcatgctcaccagcaggaacttgagtattttattttatttagtgccaatggtggtgatgcagatatggaattgactgggaatcctg

SEQ ID NO: 10772 - DNA, 1147 bp, Homo sapiens
gccttgcttgctggtgctgagtgtgggcaccttcatcccgtgtgtgctctggaggcagccacccttggacagtcccgcgcacagctccacaaagccccgctccatacgattgtcctcccacacccccttcaaaagccccctcctctctctttcttcaggggccagtaggtcccagagcagccatttggctgagggaaggggcaggtcagtggacatctgatcttggtttagtatccttcattttgggggctctgggtgtggcctgggcctctggactttggccacggtgtttgttccagcccttctcctaacctgtcctttccagacactcggcatctaggttattagcacctcgcatactttctgacatgctcctcagtcctgattttgaccatcttctcttgcttcccatctgtgtcagtcaagactgcatttggctgtaagaaacagaaaccccaactaactgtggcatttacatgaagaggtttacttttctcacataatcagatgtctagacttggccagcacctcaagggtcattgatgctctcctgtctttattttctgtcatctttagtggttggattgttgcctcatggttacaaagtggctgctgcacttccaggcatcacatctgcctttgaagcaggaacaagttgcaaagtaaagtggccaaaagggccctgaaactaaatgtgtccccttaggaaagcaggagttttcttgcaagtggcaatcttctgcttatgtctcattggccagagctgggtcttacggccaccccttgctgcgagcaaggctgggacattgagcattttgccgtccaacctctttagcagaataaaccaagggggaagaacgttaatagtggcttttgagtcactagttggcagtatctgcccctctatctttccatcctccccatggagtttcaaggttcctttctcagtacttcttcaggctctgcacgttcatttggatcttgtgtcttggggtgaaaaactggcccaagtgtctccccaagcatccacctttggattaatttggaaaatggctgtcaagtgcccgcctcttgcttggtataatgctacagctttagaggacgcagcaggcatgggccttgccgctgaggttcttagcctcatgag

SEQ ID NO: 10773 - DNA, 3078 bp, Homo sapiens
agcaatgtctcctccaccggcagcatcgacatggtagactcgccccagctcgccacgctagctgacgaggtgtctgcctccctggccaagcagggtttgtgatcaggcccctggggcggtcaataattgtggagaggagagaatgagagagtgtggaaaaaaaaagaataatgacccggcccccgccctctgcccccagctgctcctcgcagttcggttaattggttaatcacttaacctgcttttgtcactcggctttggctcgggacttcaaaatcagtgatgggagtaagagcaaatttcatctttccaaattgatgggtgggctagtaataaaatatttaaaaaaaaacattcaaaaacatggccacatccaacatttcctcaggcaattccttttgattcttttttcttccccctccatgtagaagagggagaaggagaggctctgaaagctgcttctgggggatttcaagggactgggggtgccaaccacctctggccctgttgtgggggtgtcacagaggcagtggcagcaacaaaggatttgaaacttggtgtgttcgtggagccacaggcagacgatgtcaaccttgtgtgagtgtgacgggggttggggtggggcgggaggccacgggggaggccgaggcaggggctgggcagaggggagaggaagcacaagaagtgggagtgggagaggaagccacgtgctggagagtagacatccccctccttgccgctgggagagccaaggcctatgccacctgcagcgtctgagcggccgcctgtccttggtggccgggggtgggggcctgctgtgggtcagtgtgccaccctctgcagggcagcctgtgggagaagggacagcgggtaaaaagagaaggcaagctggcaggagggtggcacttcgtggatgacctccttagaaaagactgaccttgatgtcttgagagcgctggcctcttcctccctccctgcagggtagggggcctgagttgaggggcttccctctgctccacagaaaccctgttttattgagttctgaaggttggaactgctgccatgattttggccactttgcagacctgggactttagggctaaccagttctctttgtaaggacttgtgcctcttgggagacgtccacccgtttccaagcctgggccactggcatctctggagtgtgtgggggtctgggaggcaggtcccgagccccctgtccttcccacggccactgcagtcaccccgtctgcgccgctgtgctgttgtctgccgtgagagcccaatcactgcctatacccctcatcacacgtcacaatgtcccgaattcccagcctcaccaccccttctcagtaatgaccctggttggttgcaggaggtacctactccatactgagggtgaaattaagggaaggcaaagtccaggcacaagagtgggaccccagcctctcactctcagttccactcatccaactgggaccctcaccacgaatctcatgatctgattcggttccctgtctcctcctcccgtcacagatgtgagccagggcactgctcagctgtgaccctaggtgtttctgccttgttgacatggagagagccctttcccctgagaaggcctggccccttcctgtgctgagcccacagcagcaggctgggtgtcttggttgtcagtggtggcaccaggatggaagggcaaggcacccagggcaggcccacagtcccgctgtcccccacttgcaccctagcttgtagctgccaacctcccagacagcccagcccgctgctcagctccacatgcatagtatcagccctccacacccgacaaaggggaacacacccccttggaaatggttcttttcccccagtcccagctggaagccatgctgtctgttctgctggagcagctgaacatatacatagatgttgccctgccctccccatctgcaccctgttgagttgtagttggatttgtctgtttatgcttggattcaccagagtgactatgatagtgaaaagaaaaaaaaaaaaaaaaaaggacgcatgtatcttgaaatgcttgtaaagaggtttctaacccaccctcacgaggtgtctctcacccccacactgggactcgtgtggcctgtgtggtgccaccctgctggggcctcccaagttttgaaaggctttcctcagcacctgggacccaacagagaccagcttctagcagctaaggaggccgttcagctgtgacgaaggcctgaagcacaggattaggactgaagcgatgatgtccccttccctacttccccttggggctccctgtgtcagggcacagactaggtcttgtggctggtctggcttgcggcgcgaggatggttctctctggtcatagcccgaagtctcatggcagtcccaaaggaggcttacaactcctgcatcacaagaaaaaggaagccactgccagctggggggatctgcagctcccagaagctccgtgagcctcagccacccctcagactgggttcctctccaagctcgccctctggaggggcagcgcagcctcccaccaagggccctgcgaccacagcagggattgggatgaattgcctgtcctggatctgctctagaggcccaagctgcctgcctgaggaaggatgacttgacaagtcaggagacactgttcccaaagccttgaccagagcacctcagcccgctgaccttgcacaaactccatctgctgccatgagaaaagggaagccgcctttgcaaaacattgctgcctaaagaaactcagcagcctcaggcccaattctgccacttctggtttgggtacagttaaaggcaaccctgagggacttggcagtagaaatccagggcctcccctggggctggcagcttcgtgtgcagctagagctttacctgaaaggaagtctctgggcccagaactctccaccaagagcctccctgccgttcgctgagtcccagcaattctcctaagttgaagggatctgagaaggagaaggaaatgtggggtagatttggtggtggttagagatatgcccccctcattactgccaacagtttcggctgcat

SEQ ID NO: 10774 - DNA, 1429 bp, Homo sapiens
atctcccccttgtggggcaggctcttggggccagcctaagatcatggtttagggtgatcagtgctggcagataaattgaaaaggcacgctggcttgtgatcttaaatgaggacaatccccccagggctgggcactcctcccctcccctcacttctcccacctgcagagccagtgtccttgggtgggctagataggatatactgtatgccggctccttcaagctgctgactcactttatcaatagttccatttaaattgacttcagtggtgagactgtatcctgtttgctattgcttgttgtgctatggggggaggggggaggaatgtgtaagatagttaacatgggcaaagggagatcttggggtgcagcacttaaactgcctcgtaacccttttcatgatttcaaccacatttgctagagggagggagcagccacggagttagaggcccttggggtttctcttttccactgacaggctttcccaggcagctggctagttcattccctccccagccaggtgcaggcgtaggaatatggacatctggttgctttggcctgctgccctctttcaggggtcctaagcccacaatcatgcctccctaagaccttggcatccttccctctaagccgttggcacctctgtgccacctctcacactggctccagacacacagcctgtgcttttggagctgagatcactcgcttcaccctcctcatctttgttctccaagtaaagccacgaggtcggggcgagggcagaggtgatcacctgcgtgtcccatctacagacctgcagcttcataaaacttctgatttctcttcagctttgaaaagggttaccctgggcactggcctagagcctcacctcctaatagacttagccccatgagtttgccatgttgagcaggactatttctggcacttgcaagtcccatgatttcttcggtaattctgagggtggggggagggacatgaaatcatcttagcttagctttctgtctgtgaatgtctatatagtgtattgtgtgttttaacaaatgatttacactgactgttgctgtaaaagtgaatttggaaataaagttattactctgattaaataaggtctccattcatggattccaaggacaagaaagtcatatagaatgtctattttttaagttctttcccacgcacccttagataatttagctcagaacaggaaatgatagtattaataaaagctggacatcaggattaacagctctctctggggccctgaaggtgagagttctcagacttgctcatttgcagttgcttctttgtgatgctggcaaaccatcctagtcccattcaaagggcaatacaaagccttgtggctgacctcacgatgcagcactcagtttgcaagaccggcaccagtgtatgcaaacctgagaaggttgggga

SEQ ID NO: 10775 - DNA, 1565 bp, Homo sapiens
cgcaggaacactagatagactggtcctaggctccaggccacaaggtttgtggcagggccttggagcaggaagcaggctggctgggactgggtcctcaaagagcaacttgtctgcctacagtctgtccagccctgggagcggcggaccttccccctggcgcacagtccccaggcggagtgtgaggaccagctggatgcacaggagcgagcagcccgctgcactcgacgcacctcaggcagcaagactggccgggagacagaggcagcgcccacctcgcctcccattgtccccctcaagagtcggcatctggtggcagcagccacagctcagcgcccgactcacagatgagcgggagacagccatctaaacagactcactaactattggcattaaagcttcagaaatctctgcgtttgatattcaaacatcatatgccggaaattttcacagtttttagtgaacttaaggaatttagatcctactttggtatttttttttcttgttttaatttttgttttgtttttgtttccatgttttcttgtcacacacctgagcacttcctcccgttggcaaacagaagttcaggatgagaccctgctggcctggtcctggcacatcctctgcactgttgaatcactggacttactgatcttagatgaccaccccctccctcacacctgtgggcagggcagaacagcctggcgggctacagtttagcatggccttcttgagctagggtggaatggggcagggtgctctggactcttaccccctcccctcccatctgtggcttggctctgctgtggccctcctggctgggtccccttggtttttcgtgctggaacatccccaccagagcctctctgccataactgccagctgctctccccgagtgctcagctggcagaacacctttcctttctcacccagaacttaagagactgattttttgtttcatctgcatttggtcttctctgttttgactctttcactgcagtaacctggctgtggctgctcaggttcccctcctcatgccccttggtacccttccctgtctgctctcccatgccatgtacacacccacaacccgtccttccacttggaatatttttaccacctatcctgatctttgaaggtagggttaggactacttaacctctattcccactcccctgcaaactgggggttgtgggaagtgagcagccatctccctgtgtgattttttttttttttccctctgattcactttgccatgtttccttcacatccagatccctgtcggtgttagttccactcttggtctttcacgctccccttgcctgtggaacattgtctggtcctagctgtggttcccattgttcccccttcacccttctctgttaaccttgtgcctgtctcctgtatgatcacatcaccaaaaagggggaggggggagaagactctttttttttggccattttgtaatcgtataaaaatagtagacaactgcttaatggttggggttttttcacaattttcaacattagtgatttttttttctgtttgcaagttaaagggtttgtcat

SEQ ID NO: 10776 - DNA, 1189 bp, Homo sapiens
tgaaaagaagagaagaggtgtggttggtaattgaaggctcctaggtggataaatttgctgaagaaagcaagtaatgtcccacctgggaatcaagaaccaactgttcgtcttagcggaccatcaaggtcgtgaaagcatgcagagtttataaagtgttctcagaaagcacagttttagtatctttttaaactgtcagaagtttgatacctaggtaagcacttagagcttcaagtagttagatttcatcaatgaaaaggaagcaagtttccttacccactttgaaggtcagtgtgttagacaaatggaaatcttttaacaaactaatcaaacatccttttagtagtgtcacacaagtatctagaaaggtcttcgcaataacaaatggggagctaacttctcaataacaaatggggataacaaatgggtagctggctttttatcagatgctgaattgtcagttttgtttggcttttttcacaggttcaccggaacagcacaatccgccctggctgtgatgtgaatccctcctgcgcactgtgtggttcaggcagcatcaacaccatgcctcccgaaattcactatgaagcccctctgttggaacgtctttcccagttggactcttgtgttcatcctgttctagcatttccagatggtaagaaagaccacagactagaaagtctaatgaaagaaacttgagagacttctaggtgaaagaaaatcagccaaggtgcagttacaactcagatactttcaaggtacaactttcgtcaaccaagtcttctcttagaattttgcaaaaagactgtaacagatccaccaaaccagaaggtgccactaaaaggttgcaacttaatatgagatttccttctaactcttcaagtagctaggagggatctgggctcagttgcctctagccacagtaatctggtccaaaatacgcttagtatatctttaaaaatgttttgtctgggccaggcgtggtgggtcacgcctgtaatcccagcactttgggaggctgaggtggacggatcacctgaggtcaggagttctagaccagcctgaccaacatggtgaaaccaccgtctctactaaatataaaaaattagccagtcgtggttgtgcctgtctgtaatcccagctacttgggaggctaaggcaggagaattgcttgaacctgggaggcagaggt

SEQ ID NO: 10777 - DNA, 1314 bp, Homo sapiens
gatctccaagggctatgtttgtaaatctgtatttatgaagattcaagggagaaaacaaaagattcagggagattctgtacaagtgaatgatgtgtacaacacccttaaaattcgggtttcatagaactgattctaaggaagcccattaacatttgcaaaattcatcattttctaaccaactgtagttctctagactttatttactcgtgtgtttgatgtagaggagaactcaatcactagaacttgagtttatttattgacttttatctttcagacatgatgtagttaatgtgcaccaagaaccttacacataagcacacacaggtagattaacagacatcaagaggagacctgcttctgctctagaatgcttctttgtgtctgaacattagcaaatagaggttgaactagtataagaggctttgtttctttgtgttttcttgttgtttatttattttgtttctttgtgtgttctgagaatactcttccttccccttgtatagtcttcagcctgtcttggcagaccacattccaggtgacagctctgatgctgaggaacaattacataagaagcaacgactgaatctcgtctcttcatcatctgatggcacctgtgtggcagcccggacacgtcctgtactgagctgtaagaagcggaggcttgttcgacccaacagcatcgttcctctttccaagaaggtcggtacagatgagagttggtcattgtcaagcagtgagccagatgctcagatagagttagtctcttgccaactttggtgttttctaaacttggctaaccaccaaggtcttctggggagctttataaaatactaggttcctgggccctgtttgctctggagttggatgttggaatcttgttttcagaaaacacaaagctcctcggtgactctgcagctagttttgaaaaccactgtcttgagctttttaatagaaatgggagagactgaaagtttaagtactgcccttaacactttgaaggagaatagtgtgccctctcaccttcactgttatcactgaaaatggcagtatagaatcctttgccctaaaaaagaatcttggccatgtgcagtggctcatgcctgtaatcccaacacttcgggaggccaaggcgggaggattgcttgagcctaggaattgaataccagcctggaaaatatagtgagaccttcatctctacaaagtatttaaaaattaagcatggtggtgcacacctgtagtcccagctattcaggaggccgaggcaggattgcttgaacccataaggttgaggctgctttgagctgtatttgtgcc

SEQ ID NO: 10778 - DNA, 1228 bp, Homo sapiens
atactgtaggcaatttgattggaatttctttgaatttatagatgttcatgagaatcgccatcctaaaaaaatgtgtcctaccatttgtatagatcttcatgctttcaggcgttattttctctgtaaagatatttaatatatcattagttttgttggtgttatgaatggtacttaatgatattttctactttattagtttttaaatattctttactgaacacttttgctgaattctttattagttttaataattcttagtgtcagttggatttcctgtatagattattcttaatgtatgttttattttggcatggacaataattttattgtcccagagaaattaaagggatttcagagaaactgtgtgccacaggatcaggatgctagaacgcagttccacttaatttgggaaatacctatttggaagtttatatccatgtgcatcctgatgagcgggaggtgtcttgtctctctcttgggtttttcttgacactagagttagtctctgcaagggcctttaaaagttaaattccactccccaccccccaatctggtatagatattactgctactcttggatttcactcagtttatttccttttaggagacgcaggtcagaatggaaatgggctgcagaccgggcagctattgtcagccgctggaactggcttcaggctcatgtttctgacttggaatatcgaattcgtcagcaaacagacatttacaaacagatacgtgctaataaggtaagggataagtatctgatgtttttaaatgctgccgaaaactatcaatatcgcttttctcacatcccctcccacctcgtaacccccataaccctcttcttaactattgcaaagtaaatggtttaatgacctgatatagtggtttaatttaagaacctgatgtggctgcgcgtggtggctcactcttgtgatcccagcactttgggaggccaaggcaggaggatcatttgagctcaggagttcgagaccagcctgggcaacatagtgagaccttgtctttacaaaaattacaaaaattagttgagcatgatagcatgtgcctgtagtcccagctacttaggaggctgaagtgggagtatcgcttgagcccacgaagtggaggttgcagtgagccaagattgtgccaccacactccagcctggacaactaagaaaggcctgtctcataaaaaggaaaacactattagaatataatgtttaact

SEQ ID NO: 10779 - DNA, 2419 bp, Homo sapiens
agtataatctatacttctagagaagtgagaagctgatgaaaactggattccctggccagaaaaatgcacagacctgtgatatttggcatactttttttagtgaacacgggaattccttactaatttttttctgtttaattattgcttagtttgatgtgtcttgctttaaatccatttatttcaacaagcttaaagagatttttttttaatggagatgatttaattttaacaatctgtgattttctctgaatcgaacttgtgttttggcacctttcaatctgtggtaacaaatgacaagaagggtgcaattcttccttcccttgtgcagggattttgcctccccctttctcccagatgaaagatatttgggtctctagaataactgtggtacagttagctccagagtgttttctttctggaggcagtttagacaacagcctcaagtagtgcttttgttaaaaatatacatgtttttaaaagtgcttgtatttctaatattcttttctcctttctcttctagtctgttctctggggaggcagtaaggggccgtggagctggcctcggcctcggcatcgggagaggctggacttcctgtctctctgtgctgaatggctgcgatggcgcccgctctcactgacgcagcagctgaagcacaccatatccggttcaaactggctcccccatcctctaccttgtcccctggcagtgccgaaaataacggcaacgccaacatccttattgctgccaacggaaccaaaagaaaagccattgctgcagaggatcccagcctagatttccgaaataatcctaccaaggaagacttgggaaagctgcaaccactggtggcatcttatctctgctctgatgtaacatctgttccctcaaaggagtctttgaagttgcaaggggtcttcagcaagcagacagtccttaaatctcatcctctcttatctcagtcctatgaactccgagctgagctgttggggagacagccagttttggagttttccttagaaaatcttagaaccatgaatacgagtggtcagacagctctgccacaagcacctgtaaatgggttggctaagaaattgactaaaagttcaacacattctgatcatgacaattccacttccctcaatgggggaaaacgggctctcacttcatctgctcttcatgggggtgaaatgggaggatctgaatctggggacttgaaggggggtatgaccaattgcactcttccacatagaagccttgatgtagaacacacaactttgtatagcaataatagcactgcaaacaaatcctctgtcaattccatggaacagccggcacttcaaggaagcagtagattatcacctggtacagactccagctctaacttggggggtgtcaaattggagggtaaaaagtctcccctgtcttccattcttttcagtgctttagattctgacacaaggataacagctttactgcggcgacaggctgacattgagagccgtgcccgcagattacaaaagcgcttacaggttgtgcaagccaagcaggttgagaggcatatacaacatcagctgggtggatttttggagaagactttgagcaaactgccaaacttggaatccttgagaccacggagccagttgatgctgactcgaaaggctgaagctgccttgagaaaagctgccagtgagaccaccacttcagagggacttagcaactttctgaaaagcaattcaatttcagaagaattggagagatttacagctagtggcatagccaacttgaggtgcagtgaacaggcatttgattcagatgtcactgacagtagttcaggaggggagtctgatattgaagaggaagaactgaccagagctgatcccgagcagcgtcatgtacccctgtgagtagacctcatgcatgatagcattcttgagaaatgttggcacaaggaagaatgaatgaatcgccattatggagagaatgtgattctttgtacataggtgtctaggttctgtttgttttttccctgatgttgggtagatgagtgcatatacatgctagtgaagaaggggaagatacttttgctgtagggttgtattgttgtagtctaaatggtggtaatttccttttgaagtctaagaaaaataactaggagacatcttatgtgtaaaattgtactagtacctctttaagagtgaatttagatttcttttgaaactatatataggacatgataagttaatggcctgattgttgagattttgttgtttccagtaagcagggacaaatgctgagttgacctagttacctttgtaggaaattacagttgcttttgattgaactttcagcagagagcacacccagtcttcaattttaacacttgagattttcttacattttaaggactgacaattagaaaat

SEQ ID NO: 10780 - DNA, 1148 bp, Homo sapiens
tttagagttcattaacaggaacaatgtcatatggtgtagtattttttagaaaaggtttatatcatgagaagtagatgtttacatgcttgagtacctataaggaaaacattaggatcataataatctcctctaggctgggcgcagtggctcacacctgtaatcccagcactttgggaggctgaggcaggtggatcacttgaggccagttgttcgagaccagcctggccaagatggtgaaaccccttctctactaaaaatacaaaaaacttagccgagtgtggtggtgtgcacctgtaattccagctactcggaaggctgagataggagaatcgcctgaatccaggaggcagaggttgcagtgagctgagatcgtaccactgcactccagcctgggaaacagagcgagactctgtctcaaaataatagtaataataataatgataatctcctctgatggtgctttcgagactaggaaaatgcctattttatttttaatttcatcaggcttgccagatgagaaaggccgactacagattcttcacatccacacagcaagaatgagagggcatcagttactctctgctgatgtagacattaaagaactggccgtggagaccaagaatttcagtggtgctgaattggagggtctggtgcgagcagcccagtccactgctatgaatagacacataaaggtcaggaaaatcagctaaacagattataaacattatgccagtattctttctctttcctttcaagcatatcaaggggtagggaaatgctgacttttggtggagaagagatggtaaaaggaataagaattaattgtcaactgctaaatcttcagagtagcaggaaggaagataatgtttgcatctgccctgtagtaaccactgactcatctaccttaggtcatcaccatctgacacagacacgtaaagtgaaaattttgaagaagtgtttttaaatctttgtattgtattaaaagttgtaatatggccaggcatggtggctcatgcctgtaatcccagcactttgggaggctgaggcgggcggatcacaaggtcaggagatcgagaccatcctggctaacacggtgaaaccccgtctccactaaaaatacaaaaaattagccgggcatggtggcgggc

SEQ ID NO: 10781 - DNA, 1233 bp, Homo sapiens
tgttttcagttctttgggggtatatacccagaagtggaattgctggatcatatgataattctatttttaattttatgaggaaccaccatatttttgttttccacagtgactcaaccattttacttatgttcccaccaacagtgcataagggttctgatttctccgcatcctcaccaacacttcttattttctgcatttttgtggtagtagccatcctaatgagtatgaagtgaaatctctttgtagtttggatttgcatttccctaatgattagtgaggttgaacatcttttcatgtgcttatttaaggccatttgtatatcttctttggagaaatgtttgtttaagttctttgcccattttttatttagttttttgttgttcaattttggcagttctctatgtattctggatattaatcccttatcacatatatggtttgcaaatatttcagatttttttatgtgtgaaaatatgcttttaaatcctcaagagttacgttcttaaactgaatatattcttaactattcttaaatcttggaagtccttacattttgtttttatctcttcttaggccagtactaaagtggaagtggacatggagaaagcagaaagcctgcaagtgacgagaggagacttccttgcttctttggagaatgatatcaaaccagtgagtatgcccattgagtgatatataggccaaaaagtaatgataataataactcaggcgaaaagtaagtgccatttactcagtattatggaaggttatagcatatgcagtttcataaaatgagaaaattttagtattggaaatgttcagtatgagaaacatctgtacaataatcctagtggctggtgatattatttactgaaatattttcatgataggaagcttaccatcttgtaaggcaggccattcaattttgagactttccagttattgttttactttatattgaactagaactaattttcttattggttcttatacaatcccaagctacagaaacctaacttcagtccatcttccatatgtcagttattaggatatttaaaattaactctcatatcctcctctgtctctctctctctctctctttctcttcctttcctcagcctcttccaaggcatccctttttcttgctcagtacatttagtttctctgactactatagtttctaagacttaaaaagtgtcagttttcttaaaacgcactcaaaatggtcatagttgg

SEQ ID NO: 10782 - DNA, 1830 bp, Homo sapiens
cattaacccatcttcatttcttctgatgtatttagatggatcctgaataccgtgtgagaaaattcttggccctcttaagagaagaaggagcgtaagtacatacaacatttaatgaccatcaaccaaacttaccaccctgttaaatccctgtgcctattctaagagttgctttcctagataagtttgtttccatttatttgaattcttcgctgtgttgtaggtccgagagaccaagcaaggaagttggttgtactgttggtttgctctccctgtcctgcttcgcaaaacttccttgtcacaatgcaggaaaaacttaatggtacatatttattggaacctgcttttacatgcatggagctgtgaccattttcttttgtgaagtgctcatctaatagcaaatgcatagtgggaaatgtaggataaccattaagaagcttttagtgatttttttttttttttttttgatgaatagttttttacggaccctcatctgtttttttgtgttttggtatttcttttgcagtagcccccttgattttgattgaaaatgaactatttgaaacacacagtgaccaagggaagtgaccaaggtgaagatggcctaggatcttcactgtcttactcaagatactggactaagtggaacgttctctaccttcaacatgtgctcgctctgcatgattagtgcaataaaactcccttccttatgcatactgagatagcttagtgtctcgtggaaggtgtcaatttggtttagaatgctgcgcttaccttcccatgcaggctaaagtgattccttcttgctcagtccctctgggtgggaaccatccagtacttgtggacactacacgtttcaacctctctactagcaccatcacccttgaaaactctcagtcagtgtcatgaatgttgcatgacaacagttggccgattagaaggcagactttctacatgcaaatctggcttagtaaatcgaggtgtgggccagagatcctctgacagctgtcctgagctaacactaaaagtcactgggtatttggttaaaggtctcccacaagactggtattctctttgcctgaagaaacaaggcattgaatctctaaaatgctgttctcaatcattgtcagagatgttttcaagttgcagtcagaagatctttcttaatagaaagtcagatgactaccgtgttggttgtgacttccccttaagtataactaatttgctctgtggtaagagatatgctcattattaccacttagaagatgttgttaaaaacatgtgaaagataggtatggaaaaagcatacacccccaaacagaaaggagttattaaagtaatttacaaacctctcagcactaattagtgtccaactccaagtgggtcaattccttagtataatattaaggcttactagtatcactgctttttccttagcttaatgacttacttagaatttatcctttattttaaatgatctgtactatctagtgtctaaaacactattctccagaaaaatcaatcattttctagccctctccctcagtcctttattgtccattccaatacattgaacacatttcctttaccctccacacacttcttccaaaaggaagcacccgttgagtccttttgagggtgatttgtcttacaactgactgacttagcaggaatttaattaggtcatatttggtgatgagacttatggagtgtgcctctctctcccaactgctgcttaaaatgcaaggacaagcaattagaagccatcctaaggtgcttacctcacacgccacccatgaggcttgtggccacagtggcacttgggtgtggctc

SEQ ID NO: 10783 - DNA, 1801 bp, Homo sapiens
ggccctcattttgcccagccagtgtgggcagatcccaccgtggagacatctgtagtgtgtatgtccttgtaacactctgttttcagggactacaacctttttccttctgtgaccagccccggattcaggctgtactaataccaggtatattgtggaatttagtataaaggccaatctgtcctgaagtccatctaatgtggtgaatcactgaaagtctcagaaagacctggttagtgtatgttctcatttaccacaggcctaccagccctgggcacagcagcttcatggcaagacataaaatgacactcaaaatccttcagatctggaaaccggctcagtattaaccctacctttggttgtcctgccctacctgctctgttagtttcttgttgcttgaactgtcttctgtcttatttcccttcctttctgtgttcctcttcacctctcttgttcccctccccgctgctctgtagtcatgttggtcctttcaggcacctctgtggcatagctcccctttggtaagttttcttaattgtcatagattaactgagtttcctggatgctaatttcacactttcggttggaggagatctccattgttcctacccctccgggccaaatgggccccaggtttccaaggaaggagcaatctgtgactcctaaaatgggttggggccctgccagagttaaagcagtgactggagggtggactggggggttgcagcatctttagacctagatctgtctaactctggggaggcacattgacatttccattacacacagcactgctgcggtgccagggacctagcgcaggacttttggtaatccataaaatggattctgagactgcgacggcaaggctgtcctgtcccccaggcacccaaggatcctgccagacagcacactttggaggaaggtctgcagggagcagctgagccatttgttcttgaactctgggaggcagaagtccccgcacccatcatgcgtggactgataggacatcttttcgtggtgtgcaccagtgctttccacacttgacagtggttggctttgatgaaccctcatgctgcaccttcagagccagtcctctagtttggaataaaaattgcagaggtggtttttgggtctttaccacctgcggctggtggacagcagccagtgtgtctggacacccaggggcattgagactgcatgttgtcacatgaccacttctcttcacacatctgctttcagtgcctggtgaaaaatagaccttggcctaacagtgtgactctctccaccgcctcagtgtagggaagggtccaggccagggaaggagcaccctctagtggaggcgggggtgaattcttaggtcgagctgatgcaagaaactccggtagccagcctctgtgaccttgtacatgagtttggtgtgcctattgtgatttaaaacaggtgggttatcaagaggaacttgagatctctttattacatggacatttacttcagggggaccactgtaagaaaagccaaactccaagaccaagtaagttagaggagtcttgattttttagacttcactgcggagttctgtacaccctttgccctgatgaatttgaatgggtttgatttgcaaatttggatttacacccattgttttggaagcacatcagctgaataaagttgaggtttattttatttagaaaatcacattttgtaaaagaattcgatattcatttttataactaatggccccctttttttatgtttctaggccagagattctcaaacactgctccatggccaggggctgggctgg

SEQ ID NO: 10784 - DNA, 2174 bp, Homo sapiens
atagactgaccccataaaccttttgaaactgaaggttatagtctgtgtttctgtggactagcagggagtattcttaaagtggagtcagtgattggaggttgggggaaatgtcaattttttttttttaatgtctcagagaactagctagttgtaattcctagggcaggaataaggaactcattaggaagaggcagttttggtagttaaaacttaaaggtaaaatgcagtaagctaatatcagacctattataaagttaggaaacttgagttgcattttattaaaggatatgaggatttttaagggcctttatttagggttttatctctctgaatataatacaatttttcttacttgttttcatgaaccaacaggacatatttgtcagaaaacttactgtggacttctgttttatttttaaagtgggaacagatgaatcccaggagagcagcatgacagatgcggatgacacacaacttcatgcagctgaaagtgatgaattttaacttctggaaatcagacttttacaactggatgtgtgactagtgctgacgtgtttcttgtccctctgtatactgagtctttactcttgagctggcggtgtcatcgtccgtcacttataccatgagtgtgccactttcattggaccctgactgtatacagaatgaaaggcagtgcaatatttagctgctaacaagactggctcttttaccagtatgaatgacaatttatggggggtagggtggggaactttcttttctgtttttctttaatctccctttgttggaaagtatcatgaaaggaagagttatgctttatcttgaaggaaccattagatatggaaaatagtgatgaaccagagtttcttggttgctttttcaaaaatttgtttttatttggttctgttcctgataaacagagtaactgaccttcatttctaggttcttcaagaatggtgtttgcaagtgccagatggaacaataaaagacgttgcctataacagtgacttgattgccaaggaatgtaaattaccttaaacttgcagtatctcccataaacaaatgtaatgggcatattgggactcgtatgtaggaatcaaatatccctccatacagtgtactcttattcttggcaagaatgctttaatgtctaaccaagaattttaatttattcatcttgcttcaaagtgttgatcattgttgtcttggtattgcaaactttaaaattgtttcttaccatattgcctcttctctttgagctctgtgggatcacctttaacattcagagatgatagagtggttccccactgagaagccaaaacaaggcccttaataaccccttaagttcaccatatgaatcagaaggagaacactaaagtggagagacttttaagagatcatgatagtgaaagccttaatataatcagaattgtaccataaccttgaatctatatttgttcaaaacatccctttgacttttctaagtgtttgcttaagcagagtgtaagaatgtgtggttacctttggttgagatcctttccattctttttgactctctgcttcagattttttcagtagtgtgagtcaccaaaacatttactaagagtaattgggtttaggatgttggaaatttttagcttgggggaaaaaacattcttatgaaggagataggttctcttctgagtttgtcataatatagattggtgtctttggaaaatggccacaattttaagaattcaattatgcatataaaatgataattattggaattccacagtaacagatttaaacagtcttaaattgtttatctcctttactgtaatgtattgaaatttttagagaaattttagttgttaacattttattaagtgccagtgtcagaatataacaaattatagtttcttatgaatgacaggcctacagttattattctggattatttgatggaggacaaacttacctgtatttgttagtcaagctgtgaaaataaggtggattacaaaagatgtgaaaaaaattttagtctgtagactcagtaattttctataatttactgttaatctcatttgaacatggattaggtacaatttataaattaattcaagtcagggtctttaggtatcaggtgccagagagatatttaacagatttccctacctaaatttatgtatatgtac

SEQ ID NO: 10785 - DNA, 1189 bp, Homo sapiens
ctggagaaagggctgaggagaaatctaaaatacatgagtataacaggtgtgaaatttcttcccttttacaggagaatagcaaaaaattaaaaatgaagtttccacctaaaatcccaaacagaaaaacaaaaagtaaaactaataaaggaggaataactcaacctaacataaatgatagcctggaaattacaaaattggactcttccatcatttcagaagggaaaatatccacaatcacacctcagattcaggcctttaatctacaaaaagcagcagcaggtctgttttaaatgcttaatattatctttgtattttattatgtacttattttaagtaaatttctttatgttcattacagtaccttcattgttttttatatagatgttggaatttttaatagattagtttgtaattaccttttctagagaagcagactagtttattgcgttttttcctttgtttactatgttgttttctcctagaaggtttgatgagccttcttcgtgaaatggggaaaggttatttagctttgtgttcatacaactgcaaagaagctataaatattttgagccatctaccttctcaccactacaatactggttgggtactgtgccaaattggaagggcctattttgaactttcagagtacatgcaagtaagtatagaaaatggttatatatgcctttctagagataatttcaatttcattaaaataaatgcccatgcttaagaaggctagatctaaaagatcagtatttattatgtaatgtctatatatttattttgtcagtatttataatttatagatatagttctttcttgtgttaaggagtaatttaaattctttgcaacttctcggaataggtttatagagacccaagtcatccagacattcttacgtagagtgtgtcctattcagttgtgtctgaaaatacatatttatatttaccatgtaataggatttatttatttttctgcaatatacagagttaattactggggtgaatttttgacatcgaatatgttttataagcttgaagaatgctataaagaaaattgtgctgaattgaggacacaatgtctttaatacaaggctttttactctttggattttaattaaatttgttgcttaagttatctgtctataccagaaaaggagagaatgattaacctaaagccaaagaaaatt

SEQ ID NO: 10786 - DNA, 1231 bp, Homo sapiens
gatcataaatttccagcctctcaaatgattctaaataagtgtttgccactattgtaattaaaaaaaattttttttacaaaaaacaaattggccaggtgcagtgtctcatgcttgtgatcccatgagatgagaggattgcatgagcccaggagtttgaaaccagcctggtcaacatagtgagaccctgtctctacaaaaaaattaaaaattagctgggtgtggtggtgtgcacctgtagtcccagctactcacaaggctgatgcaagaggctcacctgagtccaggaatttgaggccatgtgaactatgattgtactactgcactctagcctgggtaacaaagcaagaccctatctctttaaagaaaggaagacagagagagggagggatgaaggaaggaaggaaaaggaaagagagagagagaaaaaatttgtgtctccatagttagatgcactttggtaatgaagaatatgtttacatgaactgctttttatattggtttttaaaaatctttaaatttgtattttaaaggcttgcagaaggggaacaaatcttatctggtggagtgtttaataagcagaaaagccatgatgatattgttactgagtttggtgattcagcttgctttactctttcattgttgggacatgtatattggtaagtaagaatgattcaaactgtcagaaaagcatttccatacaagtatgttttatagtttaaaaaacctatgttgatcagtgtttatcaaatattacttggctgagtagtacatagtctgattctatgaccttattaaaatagcagagatgctaatctaagtttgaactctccacttatccttactgataatagctacagctgccctgcctaacaattgatcatacatgttaggtttttttgtttgtttctattttttttttttttttttgagatggagtttcactcttgtcacccaggctggagtgcaatggtgtgatctcagttcactgcaacctccacctccagggttcaagcaattctcctgcctcagcctcccaagtagctgggatttcaggtgcccgacaccacgcccagctaatttttgtatttttggtagacagggttttaccatgttggccaggctggtctcaaactcctgacctcaaggtgattcacctgcctcagcctcccaaagtgctgggattacaggtgtgagccaccgtacccggccccatgttagtttattttacctt

SEQ ID NO: 10787 - DNA, 1182 bp, Homo sapiens
gaaaaaagaggaagataaaaggatctataagacttcaagttccatgagaagagggacatgtctattttgttcaatactctatgcccactgcctggcacataggcagcaaaacaaatatctgtggaatgctatgtaaaggcatctatagatgatgtgcctccctttaagaaacccaatatttgaatatttgcactcattcatacaagatcctcaagtgctccgtttggataatctggagggtatgaaaacatagccaagatcatgaattctttgggcatttgggccgctgcactgttgcaccatttagacctgtgatctgagagtgtgaaaaactcaagggatcctctgtaaagtgtctgcctttttttccctcctgggaggagccgttagaagggcaacattctcctttctcccccttggacgtgtgggtgttggggcaagggtgaggagtgacagaggtctcctgggaagaccataagatggggcaagcacaccacagtgaggagggggagtctggctatgactttagaatttcctgatcgaaatttctcctctaaagctccccaccctacttgggatctgaggttatcatcccctcccagtcccaagaacccttcttcccttgttggcagaaatctccaggaagcatgcccacaggaaccacaactcatgaatcagaagacagataattaaccgagggagtgactgagcagcttcagggatgaaccgcttcgttttacccagccctctctgctgcccacagagtgggctgctccaccccatcgcctctgctccctcttcctgaaccttggcccttcctgagtgggaccttcattgtgcctgatggagctcaggccactagtggaaatgaaggtgggagcagggaaatgactctgtttaggggaactgcctattccccgtgtgggaactgctggcatttattgaaacgtgagactctccagcaaaaaagtgatagcatctgcctttctgtccacacacacagtctcaccaaaaacactctttttttttttttgttagataattcaggtataatttatgtacagtaaaattcaccctttttagtgcatacagttctatgaattttgacaaatgcatatagtcaagtaaccattgccatcatcaagatacagaatttttccatcatcccctaaaattccccca

SEQ ID NO: 10788 - DNA, 1135 bp, Homo sapiens
ctgatgtagcacttaagcttcatttagttattatttctttcttcactttgcacacatttgcatccacatattagggaagaggaatccataagtagctgaaatatctattctgtattattgtgttaacattgagaataagccttggaattagatatggggcaatgactgagccctgtctcacccatggattactccttactgtagggaatggcagtatggtagagggataaatagggggcggggagggatagtcatggatccaagaagtccttagaaatagtggcagggaacaggtgtggaagctcatgcctgtaattataaccttcagctactaagacaggtgtggtggctcacgcctgtgattataatcttcagttactaagacagagtccatgagagtgttaatgggacattttctttagataagatgttttatatgaagaaactgtatcaaagggggaagaaaatgtatttaacaggtgaatcaaatcaggaatcttgtctgagctactggaatgaagttcacaggtcttgaagaccaatattatttgtcaatatgtggggataacctgtagctgcattcatgaggtagcaaatagcagttttggcctgtggggtgaacagctaaacagtgttctggcatcagataacacggcacaaagggattgtgtctagctcttttggagaaaatttatgtccagtctcaggatctgtggacaataacggaaaactttgaatattcctgacaagttgccatattaggagtcagttctttacttctctgagattcccaggtcatccatgattttttttttaatttgagacaaagcctcactcttgttgcccaagctggaatgcaatggcaagatctcagttcactgcaatctctgcctctcaggttcaagccattctcctgcctcagcctccccagtagccgggattacaggcacccgccaccacacccggctaatttttgtatttttagtagagacggggtttcaccatgttggccaggctggtctcgaactcctgaccttaggcgatccaccttcctcggcctcccacagtgctgggattacaagtgtgaagcactgtgcccggccagtcatccatgattttaatggggtccaaaggc

SEQ ID NO: 10789 - DNA, 1160 bp, Homo sapiens
tacaaaaattagctgggtgtggtggcacatgcctgtaatcccagctactcaggcacctgaagcaggagaattgcttgaacctgggaggcagaagttgcagtgatcttagatcatggcactgcactccagcctgggcaacagagcaagactccatctcaaaaaaaaaaaaaaaaaaaaaaaaagccaggtgttgtggtgtgcacctgtagtcccagctactcaggaggctgaggagggaagatcacctgagtctgggaggtcgaggctgcagtgagctgtgattatgccactgcactctagcctgggtgatgaagtaagaccgtatctcaaaaaataccagtttttatgatagaatttacttagttgcagaagaggggtggcaaggggaatgttaatttggctcactgtttcctgaacctgaaagaaccaaagaattagcagtgtagtgtcaaaagttaaataaaatttcttttttgtttaggaaaataaaaatataaacattttagattatcattgtttatcttctagaggatctctgggaaagtttagaaaatgctagtggtaaacctatagcagctgtgatgaatacctggaccaaacaaatgggatttcccctcatttatgtggaagctgaacaggtaaacatataaagtctttccatttgtctgatattgtattaaatgaagttcagtacagtgtatcaagtttgcttttctgtactttaagttttctagtgacatttaaaccagccctgttactcttttatcagtaattttacagcttgcatcattaaaattatacatgcttaagagagaaaacaaaatgttacttgcttgtctagtctccagggaaaatactgtaaaatttgatataattctaaaaccaccaaatatggtttattctacaaatgcaaggttggtttaacattttttaaaaaattaggccgggcgtggtggctcacgcctgtaatcccaacactctgggaggccgtggcgggtggatcacttgaggtcgggagtttgaggccagcccggccaatgtagtaaaaccctgtctctactaaaaatacagaaattagctgagcatggtggcacacacctgtaatcccagctactctggagacttaggcaggagaattgcttgaactcgagaggtggaag

SEQ ID NO: 10790 - DNA, 1184 bp, Homo sapiens
ttgtagtgccttctagtttatgttcttttagaaatgagtaaaggagaggcttaagttgacacagtttgcaggtccggctttgaaagaatgtttgtcaaaaaccaaagctcaaactatttttgcagtttttctgaaagtatgaaaaatttcaaaacagtaacaaagccaagtccccagaaactgagtagaaatagaagttaagtggtttgttgttgttctcaaattgttgggactcttagtgtaatttttaaaagtagttcttgtataaatagcaaatgattcattctaatttttctgtaaaaagaaaaagaaaaaaataacaaaggattaaagaaggaatgttgtctgaataggatttttatgctaacagtgttctgagcttatacagtcccatttccttaaaccaaagaaattgctagcagtagataatgccaaaaatgcatgcttatgttttttggttttgtttgaagactaggttaatttatgttttttcctatcccaggctcgagctggaatcattagcactgtagaggttctaaaagtcatggaggcttttgtgaatgagcccaattatactgtatggagcgacctgagctgtaacctggggattctctcaactctcttgtcccacacagacttctatgaggaaatccaggagtttgtgaaagatgtcttttcacctataggggagagactgggctgggaccccaaacctggagaaggtaatggatatactaaatggagaaagaattacgcagaagttggtacttttttatgtggttaacaatataattaatatcatctttgtatctactggatgttactatatattcagcaagccagaaattaagacgtgagtcttttaagtctgctggtgaagttacatgggtcaacaacatagaaacagtagtggttatgtgtgttcgatgctaaatataatttgtgcacatggtggaaataaaagtcttttgcagaattccaaaggcctatttttagtcaagaaaagctaaagggaattttaggttgttttgttttatttatttatttatttattttatttttttgagacggagtttcattcttgttgcctaggctggagtgcaatggcgcgatctcggctcaccgcaacctccgcttcccaggttcaagtgattctcctgccttagcctcccgagtagctggga

SEQ ID NO: 10791 - DNA, 2184 bp, Homo sapiens
tgagggtggcagtggtaaattctcatgcctgaagattatgcatccttcatatagaccagtgggtattttttcataacctgtaatattaacttcttattgctagtaatgatcctgcattctgggttgttttataccaggctttcttcgagagtcacccagctccttcagctgagcgtaccatccagcagtgttgtgaaaatattctgctgaatgctgcctggctaaagcgagatgctgagagcatccaccagtacctccttcagcggaaggcctcaccacccacagtgtgaatcctgaggtgccgccattggcggttctgctgcttcgctgcagggataaggtggagctaccgaacagctgattcatatgccaagaatttggagtcttctttcaaaccagtgggggttggacaatgaatgtagttaactggttcctgctcacactccagaattaaattctattgaaaaaggaaaatcagcaattcagcaaaaaataaataaaaaataaaaatgtaaatatgatagtaataaaatagagcataacgaaactgtgaaactttctgaagccttgtcagtggttaaaagtatttaacactctactgttaatgacagatgttctgtttttataacctaccaaaaggaaactagaggcttcttggtgaagagcatttttgtgaagtgggttctgcaaggagcctataaagccaagggtggtgtccatttctgggaatggttaaacacaaaaggctgatagctggtatcacatagttggagtcagtgcataattccaagtggctttttttttttttggcacggggactgatcaggaagatatattcctgcataactcaatctgaaccaaggattgtagtttagttttcctccttgccttcccttctgtgtgaccgaccccttggccaaaaaaaaacaaaaagcaaaaaacaaaaacctaccctgttctggtttttttcctccctttagttccacccccaacccccattccctggtgtccttcttagagatgaagaaataataaggaaacatctttcatagccacattaaataagagaaactgatatacattatttttttctttttaaagatgacttataagaaccctgaaatttatataggtgagacaatagaaataaaaagatcttcagccaggcctttctgaaggagttattctgctaaaaatggtcttagttgtctgaaaagccagctcttgaacctcttcacaacagtatcaacactggcttctcccggttcattttatgcgtgcgagaagtcagtggtaactgctgcagggcttaatacattagtggtaactggtttaaaaaacaaagactgtaagcctgtgtgtgccactgtttgcttcaacagtatatcctaataagcctcacctatttaatccaatgagttttaaatctaaatctcattcccttcttctttccctaccttttttttctttttttcttaaaaaaatattttgtgttattaacagaaattcatatttggtgtggcttaacggtatttcagaaggtcatcagattgtgagactgcttccttgaaacatttttgtgctattgttttaaaaaaataattaaaaaacagttggcgttaataaaaatgtcaatgtgaaactgatgtcctgattcactttattctctttctttgataagaaactaaaaactttcctatcattcagtaggcttatgcaaagttatactatcataggatttttcaaattcaaaaaaaatccagttccttaattcctaatttatagatcttaacagaaaaatcctgagattcattctaaatcagttctacattctcaaaactctctcagagactcttatagtcagcattcaggaatgaacttgagacttcctcagtccctagttttgaggcaccctagttcaggcaccatgctcagggctgcccttaggctctcaaatgttcttaaggcaccagtgaagcaggggcaccaaaaagactgagaaaaatgcaggtttaattgaagaactcagaattttgcaatcagaaattctggaaacaggttattttactttcagcatacatgtgatttttgtctgtaataatagttaagtagtttgaattacgttcagggagaggttatactagatgtcttccatttgcctttcagaacccctcttcatcccac

SEQ ID NO: 10792 - DNA, 1171 bp, Homo sapiens
catgagatggaaagttggatcattcttttgggaccaaggtttttgaaatttagataaacagttttattttctaccccccatcataacagccattcatttaacaaacattgagtaccagacattattaaaagttcttgggacacctcagtatacatagaagactgactactactaccatactctgaaaccttgcaattcgggggtctaacatgacaatttgggcactaagaatgatcttgatagggaaatctgtaattcctcattaagtgctaggctccacgagaaaagtggaagacttcctgttacactaagtaacatttttatagaagtcagtgaagtaaatattttgtggtttcctgaaatgcttatatcaaaaaaaaattagacattagttccccccctcgccgcccctctggtggttcagtgctctataaattatcctcagttgtggaaattcctaagatatttttatttacaaatttatcttcccttaacagcccactttccttgtggaactgtccagagtgctggcaaatccaggaaacagtcaggttgccagagttgcagctggtctacaaatcaagaactctttgacatctaaagatccagatatcaaggcacaatatcagcagaggtggcttgctattgatgctaatgctcgacgagaagtcaagaactatgtgagtaacgcttatctgtttggttatattgcccagagaacaagaaatcgctttctcagatcttttgctatttgcatgggatagagctaacagtgtgataggtttctgggacctcaactttacctaaagataaaaattgtctttgtcttaaatctttctcaacacagcttgtccattcccattgatggattggaattctttttagatgactgaggtaggctgcagcagtttgggaaactttaattacgtgccataattggtaaaatctgtttggcaaatgggagtagtgtacaaattggtgctacatttgtataaaaattagggaatttgttaataggtatttccaagctctccagaaattccgattcggtacttctggagtacagctcagggaatttttttttttttttttttttggagacagtcttgctctgttgcccaggctggagtgcaatggcatgatctcggctcactgcagcctccgcctccca

SEQ ID NO: 10793 - DNA, 1242 bp, Homo sapiens
cctgccttggcctcctgagtagctgggactacaggcacgtgccaccacacccagctaatttttgtatttttagtagagatggggtttcaccatgttgaccaggctggtctcaaactcctgacctcaggtgatccacccaccttagcctcccaaagtgctgggattacaggcatgagccaccgcgcctggccgattttggactttacataactggaatcatacagcatacattctagttctgtattttgttctaaatgtttggaattcattctttttggatgtagttgaaattttttcattcttgttgtgtagtactaaatggaatcttcttccatctgaatcttgtttaacaaaggctatgctgtgatgaatgtttgtggaagagacaaaatataaaggtcttatattttatttccctggagtttaagttctaaagacattcaagagtagtcagaggacctttagagttaaaatgattctttggacaaaatcttaactagtgccatattctttcaccaggacgaaaatgatgatgacgatgactggaacccctgcaaagcagcaggggtgtgcctcatgcttctggccacctgctgtgaagatgacattgtcccacatgtcctccccttcattaaagaacacatcaagaacccagattggcggtaccgggatgcagcagtgatggcttttggttgtatcttggaaggaccagagcccagtcagctcaaaccactagttatacaggtgaaactgagggatttttggagtagaaagtaggatatttattgtttaaacttaaagcatatctttatttttcaaaacaaaactgtaaattgtcatctacaaagattatctctagatacttgtttacttttaatgagggtaaaatatatttcttaggtttttaattacataagtcagcatgatccagagacatgtgaaagaagccaaaagagaaaagtcatctttaatttcattgcccagaaataccactcttaactctgtatttatccttgaagctttttcctatgtgcatgtgtgtgcaacaggctcttcctgtgcagattgttttataacttgtttcttcatttaatactatgttgtaaacatttcccaataatttttttttgcacctagcactgattccccataatttttaataatggcattattattctattctttggacaaaatgtcctttatgtaatgaaaatgttcttatggaaatgttgtgcttgtttt

SEQ ID NO: 10794 - DNA, 1099 bp, Homo sapiens
cagcttaagcaattctcgtgcctcagccccctgagtaggtgggactatgtgccaccatgcccagctaatttttgtattcttagtagagagaccgggtttcatcatgttggtcaggctggtcttgaactcctgacctcaagcaactcctgacctcaagtgatctgcctgcctcagcctcccagagtgctgggattacaggcatgagccatcatcatgcccggcctctatctgagtaatttattgcagactactaaaagcatttacaccaaattcttaatataaaactctaaactggagttttgaaagatattttcaaatattttgaaagatgtttcacaccatgtcctgtaaaattacagaagtatcttggtgacttttttgagttaagccatccatcagtatttctttctctggggtagtagttaacatgaattttaatctttgttttgctttgctaataactgttatattttcaggctatgcccaccctaatagaattaatgaaagaccccagtgtagttgttcgagatacagctgcatggactgtaggcagaatttgtgagctgcttcctgaagctgccatcaatgatgtctacttggctcccctgctacagtgtctgattgagggtctcagtgctgaacccagagtggcttcaaatgtgtgctgggtaagggattttcttgctggtgagaaaaggagcttgcctgcgccactggcaagaaagtagaaggtgtgggagagaaatcaatctgcctcactggaatgctttttctgattttctttctaatttattcaattaaaatgtgggggagattccaactgcaagagccagtgggaacacttgacttatggttactggttcctgaaccacttagaacagtcatggtaacccagtggggaaactatctggacttgggttgctttcttgaattgcttggggacaagaagttttgattaaggtagagagtttttggctgtaagaagtatcattgctgagtagagggcaagagggaaggaaggtaggcagcctaaatgctgagtcagtataggctaatgtaattggttaaggggaggaagttcaaataaggaaggaatggg

SEQ ID NO: 10795 - DNA, 1289 bp, Homo sapiens
ttcaaggaattctcgtgcctcagcctcctgagtagctaggattacaggcacaagccactacacctggctaatttttatatttttagtagaggtggggtttcaccatgttgaccaggctggtctcaaactgacctcaagtgatccgcctgcctcagcctcctaaattgctgggattataggcatgagccatcacgtctagccaggaaaattggggtattttcttcatagcacttcagacaacctgttaaattgttcacatgattttttaccatttcaaaccattttttcctctataattttagcccatttccaaaagggccattctaaattttaactgtctggagaccataatgaacatagccattggctcaaaggacttgaagatttcattcttggatattgtgttttcaaactcaaaccaggtctgcagacataccggttcctgagttcttatttttggcaagacattgtctatgttcttccctgtccttttcatttgaggctttaagattttcgctgtgttctttacagacctgatggacaccagaacaacctgaggagttctgcatatgaatctctgatggaaattgtgaaaaacagtgccaaggattgttatcctgctgtccagaaaacgactttggtcatcatggaacgactgcaacaggttcttcagatggaggtgagacctaagagtgcccctgactatgggtgggaattgggtagtacttttgacacctaggtctgttttccagactgttctgtctttttagtgtttaagtatatattttctcagaaagataataaagcttatacaaaaaacattgcaccttaacgttagcattgtttgtcatggtttactcatatatgtgttacactatatgtattatgggttttttgttgctgttgtttactttcctatgttagtattagggaagattattaaatggtcccagcaaaagtggaaggttttcatgtagagtatgttttcttattttctttgtagtcacatatccagagcacatccgatagaatccagttcaatgaccttcagtctttactctgtgcaactcttcaggtatggtggtgccttatgacttaataactccaggttggagaattattagtatctcagtataacaagttcgtgtacacacagaactcgaaaatggtatagatgatgcggatcagaagctgttctcagaaggctttggtctgtgattggttgattgggagaggaattccccacctgccttacctgtctgtctagaaagattcaaatcctacttatt

SEQ ID NO: 10796 - DNA, 1090 bp, Homo sapiens
gtagtagcttgtgctgctggactaatagggtaagttataccctgcttctaagagctgaatagaacttctcacagaaaatgagaaaacatggagtaaggagttttgagagtatcgcggatggcaacagttcacttttttggcacagagatttctttgcagaacgcttcatgtcctgttttgagtgttcacatgatagtttattccagaccctcaaggtgtctgtattacaccccattaaactctgatgttggtcaacaattgcctctgtctagtgacctctactgagggttttatttatctttgaaatttgctaagaaacccatagcactggtttggaaggctcaaaacattatactggtatggggctaggagctcattctcagctgtgtttgttttgcacagggacttatgtacagcatttgggaaggatgtactgaaattagtagaagctaggccaatgatccatgaattgttaactgaagggcggagatcgaagactaacaaagcaaaaacccttgctacatgggcaacaaaagaactgaggaaactgaagaaccaagcttggtaagatcttgcctccactgtcctctttcttctacttcctggaggaggggggtatgttttctttaggccattctggcaagcactgccttctggcattttttttgtttgtactttttcccatgtaggtgcttctgagtcaggcagcctcagtttttccttgagccaaatgtttgactcctcatagtgatggagagcagaacttttaaaactggaattcactgaaattccctgagtattttgggtcctaataaaatcatcagtaatgccatttccccctaattctcttctgttttctattcctttcctcatgccctattctttctttacagcagtgcttttagacgttgcctagctctagagaagatttccaaagtcaaatgtttttttgtgtgtgtgtgtgtgtgtgtgtgttttctttttgagacagagtctcactgtcgcccaggctggagtgcaatggcacaatctcggttcactgcaactgctgcctcctgggtttgagcaattctcctgtctcagcctcccg

SEQ ID NO: 10797 - DNA, 3915 bp, Homo sapiens
gcagtggtacaatcacacctcatagaagcctccagctcctgggcttaagtggccctcctgcctcagcctcccaggtggttgggactgcaggcaagcacctccatgactggctaatttttttttatttttagagacaagatctcctgttgcccaggctgggtttgaactcctgacctcaagaagttctccctccttggcctcccaaagtgctgagattaaaggcttgagccactgcacccagactgaaatacagttttaatttctttcactcttaattagttatcttactccacagatctcagtaaaattggctctttgagtttccctcgcaccctctgatgtaggtgttaataagagcaggtcaatggcacataggacaagaagaaagagtgtcaatccttgaaatgttgacaaattccattcaggcctaggagcatgtaattgtaggagtcagcattattggctctgttgggtatatgtgatctcaaagattgacctttttttccatctgttttcagatctgttaccattgggatgataacctgaggacccccactggaaatctcccatcttttgaaaaacctggaagtgaggagtgtgcacggatgctgaatgtttgggaatgagaggatgagtgagtgaggcttgaaaacacaccacattgaaaatcctgccacagcagcagccgcagccgccaacagcagcgctgttagtgagctaagtaagcactgacttcgtagaaaaccataacatcggccatcttggaaaagagaaaaacaatggagttacttatttaaaaaaaaagaaagaaagttatctcttcccaggagaggctagaagtagcttttctgtcttttggccagtgccgagtggaatgcctggtttgggggaggaggagggactgggttcagctgtggtgctttgttgtaaaaggcagcctggcctttgctactgaggagaaagatggagcctgggtctcaagcccaccttcgctgtacctttgccacatggtactgtatgcttgccagctagaaggagggtcagggattttttacagtctgagaatgagtgtgtgtgagtgaggcggtatccacattttcaacttcaagtcattgcagtttctttttcccagaaaacaaggggttagatgttgcatttcataaaactaaccgaagttttgtttactgatgcagcacaagagatgtaaaaaaaaaaaaaaaaaaaaaaaaaaaaacacacacacagaggaaagacgctctttaggttttgttttgttttttttttttggttttgttttttgttttttttactctagggaaaacactgacgaatggtcagagctcctatcctgatcttttcatcaaggcgcctttcctaataatatggttcaactgtgaatgtagaagtgggggggaggggggagaaaaagaaaactctggcgttagaggatatagaaaaatataagtacaattgttacaaataacgcagacttcaaaaacaaaaaaatcacaacccaaacaaaccaaaatttaaatgatcagaattggcagcacaaagaaaacgccctctcctgacttgtattgtggcagtctgaacgcccccagaaaattgtgccaaagagtttagaaaaataaatatacaataaaagtaaacacatacacacaaaacagcaaacttcaggtaactattttggattgcaaacaggataaattaaatgttcaaacaatctgataaaataaccatttggaaactgcttggccttctgttcttttatttgattgactacaatgcggtattggtctcttgctgcacttcaaaagcaaccaacaaaacaaaaacaaaaaaaagtgtgtgttgtgtgaatacacacacacactaactagaagtcttgtgatgaaaatggcacttggaaaaggttttatttttccactgaagttgaaggttaataaaatggtgtcaaacgtcccctggtcacacacttgaatatttttttagaagtgtgatgtggtatgattaccataaatcagacttaattattttcccttttacaagggaacagggcatcctgaattttagagcctttcagcaataagaagggatgttggtgagctttgatcctcttttggttttgcagttgttaggagtttttgctggcattttgaatatgctgctttcagaaaaaccaaggaagttttaaaattgcttcctggtccttagaggactaaaaacaagaccctcattcccactttcatttccactctagcaaaaactgggcttgcgtttttctccaactcctcgtttatatcctcccttccatgtccaagccttccattcctaagtgggattggctcagttttgcccatccatatggcagcatctctaatagctcttgtacagggtatcagatattgtgccttttggtgccaggttcaaagtcaagtgccgatctatgaaccagtgtacaaaaaaaaaaaaatccaggtatttgaaggagagacgctccattgtgaataaagagctcataccagctcctaagccctattaagaagaggcctggtcctctaatgccttgtttccatttcagttgttctttgagagacagaatgatgtactaaccattcgtgattattaagatagggttgggtcagggcttagggagggggcagaaatattggggatagaaaaaaaatctgatcattcctcagtgctacccatttctgtcctgtgtgggctgcttagctagacagcaggagaataaagtacaccgagaaccataatgaaaaaaccttccgtgtgttttgtcatgttttgttccagggaagcagttgatgagtgctgttactaatgctttctcccagatccattcagtggtggagaggaggaaaatgggctggttggatgtggtcttggtgccttgcagttactctgcactggttatgcatttaattctcctcttttctagttaaccttttgccagtgggttttccatagtctgggtatttgtccttatatcagttataccacctaaggcaactgggtgcaaaatgcattctgttcactcactgtctgggccttccccaccctagtcttggcacattccttcaagaatgtagttaccgtctgcttgggaagatgtcagtgcaaatgtgaagataatgggcatcggactaggctttggtttgccacaagtggcagctgcctgtatcaattacatttattaattttgcttttcatttttcccagttctcctcaccccccctttgttgaaatgttggacttgctgtcagaggcaactgtaatattgccttagggacttgtggagaaggggaattgctcagtgtagtgttttaactttcagaaccaagcaatctatttactcttacaaatatttaagaagtgtgttagtccaactttaagaaaaatccaaactcatcagcttttgatagcatcttggtttttgaaacaacttcaatctgtaattggcattcagaatgcccttggcatgccagtctgtgatggcatttaagacctgtaaaacacttgagcccaactcgattaaccaaaaccgataaccaccacctttatcttctaaataaagtccgctttatttttattttcaacatcttgctgctttttttttttttttttgtcccaaatggtgtcacctccatggaggtgaaatggtttgaaagtcagaatgtgtggtgagaggtgtttgtgtatgtatgtgtgtggggaaaaggagggacacacatcttgaaatggatattacatagtgtaatgtgatatagatgaaacagtgtcctacaaatgaggtaaggaaaaagtatgcatggaggatgtttcgtgtttggagagtttgaagcattcctcatcagtaaaacaggaatactgactaaggttgttctgcaaatt

SEQ ID NO: 10798 - DNA, 1448 bp, Homo sapiens
ggaaggtgttagaggactccaggagctcctgcacccctccccaaatgtccatctttctcagacggggctctgtctggggagcacccacaggctgcctttggggtcccagagcctgctctgtgcactgaccccagttcctccatcctgtggccagcctagggctcatggcatgggcccccactgggggagggaggcatcttgtttcttgtggttccctgcaggccagtcctgtcctcctttccctgttctgcccactctggggaatagggaggggaggagaggagaggagagggaggatcctggaggactgggaagatctagcctaaagaggcttctctgagggccagggccctacagcatgcccctacggccaggggactgtctgccagcctcccaggcccatgccctcctggtgcccctggcactgaggcacagatcgtcaaggcaggtaccccctcaacccttcttccactggagcccctgacaccacaggtgccctggagcccttgtgtgactcagcctctgttagctgggtgggtgtcatcagcccctgcctcccaggccagaacctgagaacgggcccagggtgctgtggagatcaacttcaaaagagctaaccccttcccacactccacccacccacctacatttcctctgtgaaatctacctcagagttgtaccctcagaaggacgggtaagcaggaggccagggggtccccagggctgaggtggggagccttctacggcgaaagcctgccaccccacaatgaatccaccctgctccactgcgcgcctctcccaggtctcagctctgggtggggagcagtggccgctaccgacagcgcatgtcccgctcttatccaactcttccaggccccacctccctgcacccctcccctctatagagcaggggagtgaaggggtatgtcaggcggggaaggggccaaggacacgtcattgtaccctgagcgtccccagggagtggaaatggggaagggggcctggagaggggaggcaggggcccctgtgctctctgaacaagttgaaagtccaaataaaacttacctgttccatctgtgctcaatctgtgccctctgtggctgggggcagggcgggggacgggtagagcccttggtagcaggaggtcttggaaagtgtgtctcaagggactgtgaccatgggaggtagacactgggcaagtaggggatgcatggggcacccacattcagagcggttctggaggttcagatgtgtaagtggttgcagatgacttgtggcacggcagtcattagaacagatagatacaaagcagtcacccagccctgagcaggcctcttgaatttcccacccagtaggtctggccagtcaaggttctaaagccttggggtttatcagtaacagttatgtattcatcaaatgatttctgcttgtcaggaaccaggctgggg

SEQ ID NO: 10799 - DNA, 1389 bp, Homo sapiens
actactccaagctccccagcctgcccctggtgcagggggagcttgtaggaggcctcacctgcctcacagcccagacccactccctgctccagcaccagcccctccagctgaccaccctgttggaccagtacatcagagagcaacgcgagaaggattctgtcatgtcggccaatgggaagccagatcctgacactgttccggactcgtagccagcctgtttagccagccctgcgcataaatacactctgcgttattggctgtgctctcctcaatgggacatgtggaagaacttggggtcggggagtgtgtttgtcacttggttttcactagtaatgatattgtcaggtatagggccacttggagatgcagaggattccatttcagatgtcagtcaccggcttcgtccttagttttcccaacttgggacgtgataggagcaaagtctctccattctccaggtccaaggcagagatcctgaaaagatagggctattgtcccctgcctccttggtcactgcctcttgctgcacgggctcctgagcccacccccttggggcacaacctgccactgccacagtagctcaaccaagcagttgtgctgagaatggcacctggtgagagcctgctgtgtgccaggctttgtgctgagtgctgtacatgtattagttcctttactgctgaccacattgtacccatttcacagagaaggagcagagaaattaagtggcttgctcaaggtcatgcagttagtaagtggcagaacagggacttgaaccaagccctctgctctgaagaccgcgtcctgaatttcttcactagagcttcctcatcaggttacccagaagtgggtcccatccaccatccaggtgtgcttggatgttagttctccaccctcgaggtgtacgctgtgaaaagtttgggagcactgctttataataaaatgaaatatattctacttcctttattttgtggtttacacggttgtcctccctctaaacttactctcaggggcttctctgtcatctgactttcctcactcttgcttcccttcctaggaaaatcctcttcccctatacctgttcccacaaatggcatcccgcgcatgcttgccctattaaaggcagctgacagctgtacccactagctaacgtgtctctggtggttctggacaaaaggcctgcgggaaaactaggattctctattaatggggaattctgagagctctagggtaggaggcctcatgcaagtcttcatgaaccagaaattcctaataaaggagacgggatgcttaactcagagtccaccatcatccttgactggagcacattctgggtggatgcaggggtgacccggggaaggtggctgttcaacattccttctcggacttgaa

SEQ ID NO: 10800 - DNA, 1106 bp, Homo sapiens
acatctggtagtcctctagaaagggacaccaggcccctgtgtttacttgaagccacctgcctggggaatcacagatctcctcctccctggccacccttgtcagatgcatcccagcaacttccttcaagaggccctgggatgaggggtgagggtgggagagtgacctggctagaaaactccacagagcactgaaacctctgcttctccttataggggtggctatgtcctgtaccctcaggtgatggagttctggcaaggtcaaaccaaccgcctgcatgaccggatagtctttcggcggggcctacccacaggagattcccctttggggcccatgacccaccgcggggaggaagactggctctatgagagacttgcaccttaactctgggacctgctggcccagagtggagctagggctaggtgtcaagagagggtgtgggattgggacccaggcccttctttctaaactcaacccatttccctccctaccccttatcttcaggactcttcagagctaatcctctaagttctctgtactcagttggttctcagttagctggtcaagtggagtgtaatggtggcgtagagaatcacaaatggaaaataattccataattatttttttgaccttgcctatgattgattaggatagctccctctaggggtagcagccggtgtgactccctttctggtgacagacagggccccagcagccctgtctgttaccatgtgagtcatactggccaaagcttagtcctagcatatgcacctgagccaacctggccaatcagattgttttgtcaataatttgaaatttgaactggagagatccagaaccttgggagtcattaaagccaagtcattcatagcagccaggaaacaataggaaccaaaagcctctgcctgctgctattgcaattcccaggatctctccttccctggatccctccctcccaggtctgggctgtgcagttcctccccctgccttaaaacaccccactatctctgtaaagtctctctctctcttttttttttttttacttaatctagctagaatctatttctgttgattacaacttaactaactcatttacggataggacttt

SEQ ID NO: 10801 - DNA, 1181 bp, Homo sapiens
ccacccctttatgcaaatgaaatggtaccacaggctgatgcaagcctggccactgctaagtaattctgcatgacaattcgctcttgcttgccatggccagcttcctccaaaccaagttttaaggggtccaatccccaaagctagaggtgtctcctgatgttccccttctttcttatgtaggggggaggcggccctgccttttgtctgggtgtgtcttggtccagatcctaatcctttgcacccttatggtgatagtcacactaatggttttgctagtggctctttttttttgtgggaaggggatagtgtctggaagtagatgaatgaacacttgctggtgcagggaccagggggtaaaggctggcaggtgaagagctgggaggggccccacccaggactaactggggtgacactaggagggaactctgaggggcaggacaaggaagggaccttgggatcttagagctaaagtcatgtgatctgtctttcaggacatagatctgattgacatcctttggcgacaggatattgatctgggggctgggcgtgaggtttttgactatagtcaccgccagaaggagcaggatgtggagaaggagctgcgagatggaggcgagcaggacacctgggcaggcgagggcgcggaagctctggcacggaacctgctagtggatggagagactggggagagcttccctgcacaggtaccatcgcccctgctcactgggctctcttcttgtccctactaccctgacacaaaccaggctggagttcttccagaaacttcctttagagaagacaggtggtgtgtggggtggacctgaatttctgttttgggttggggtctgtaagtcacagtggctgagccttggaaggggggagtggaaagcagcagatgcagaatggccaggccgtggcaacagacagtgcaagggaggcagagcatgtagcatcttcctgcttgcttcaggactctttcactctcttctgttgtttctgggagtttgggactcggggccagccattagcctgggaatgggagggagactgcagggcttcagccattctgggaaagaagcttcagccccaggcagccaaggcccaggtcaatcagacttacagttcctgttgccacaggtgcctagtggggaggaccagacggccctgtccctggaagagtg

SEQ ID NO: 10802 - DNA, 2138 bp, Homo sapiens
cctgcagcgtgacaaagcccggctgctgcgggagaaagtggagttcctgcgctccctgcgacagatgaagcagaaggtccagagcctgtaccaggaggtgtttgggcggctgcgagatgagaacggacgaccctactcgcccagtcagtatgcgctccagtacgccggggacggcagtgtcctcctcatcccccgcacgatggccgaccagcaggcccggcggcaggagaggaagccaaaggaccggagaaagtgagcctggggaagaagggggtttgaagcccaccaagaccgaaactggagaagggctggacctggacctggacctggacctacagcggggacttaaatgccttcttatccaatatatcttctcagatgggatgactgcgggtcagtgtacaggaagaggcaggcactggctggctcagctccactcgggtggagtggaagtggccagaccatttagacggacagggtcctcaccctacccctttcctgtgaggcaggggtggtggtggagttgctggaggtagaggagctatgtggagcaaaggccgacagaggggaaggaatggacctgtgagaggaagggaaggtggcagaaagtctcatttcaggaaggagggatagaaggaaggaaggaaggaacccccccccccccgaaaaaaaaatcaaagcgggaagaaaatcagagggaaggttaaggttggctctggccaggattccaggcagcaggttggagtgactggtgggcctagatcactggtgtgataaaccccaattttcaccccggggggggtggggtacacagacacagggtgggggtggggagggacggtgttaactctttctgctccttgcattttgacatccctgaaggggagctcttggatatcattggccatgtttcaatcgaatggagccactgggccccaacactggctttgagatttagagtcaaagggtagagtgaacaggaaagggtcacgtggtcccatgttgcaacagccccaacatcacgcatgtcattcactgccttgccactccatctccctccgtgctccagccacccctgagctgaggctcccattgtctccatcagagcctgcatgtgtatgccgtcctcccctggtccggtgtttgtgttccccacccctcacagactgcctgagctcttctgtaagctggggtagggtgatggcagtgctccgggaactgggcctgcagccttcctcttctgggactgctgtgaggcagaggaatgatggagaatctagtgtagcagcctccaggcaggattcagcacaacactggggagtcacccttccctcgggcctctgcctaccaacaactgggcttatcactgggaaaacacaaaaaattacacaacccagcaacaacaaaagaactagtcctcttagaatttcttgcgctttgatttttttagggcttgtgccctgtttcacttatagggtctagaatgcttgtgttgagtaaaaaggagatgcccaatattcaaagctgctaaatgttctctttgccataaagactccgtgtaactgtgtgaacacttgggatttttctcctctgtcccgaggtcgtcgtctgctttcttttttgggtttctttctagaagattgagaagtgcatatgacaggctgagagcacctccccaaacacacaagctctcagccacaggcagcttctccacagccccagcttcgcacaggctcctggagggctgcctgggggaggcagacatgggagtgccaaggtggccagatggttccaggactacaatgtctttatttttaactgtttgccactgctgccctcacccctgcccggctctggagtaccgtctgccccagacaagtgggagtgaaatgggggtggggggaagcactgattcccagttagggggtgcctaactgagcagtagggatagaaggtgtgaacctgggagtgcttttataaattattttccttgtagattttatttttaatttatctctgtgacctgccagggagaggggagagagagagagatgctgttgagcacatgacaaaataaaataaaatggatgattcattcttaagtgcactttttccccactttgaatttaaattgagaa

SEQ ID NO: 10803 - DNA, 1778 bp, Homo sapiens
tgttcagatgtgattggttaagtccattgacctggcttttgacatacacgaatccccagagggaattttcaacaggagagttaactctgaggatgtcacttgacatacaattgccagtaaatgctgcttgggccacgttttcattgttccctagcctatttttctaaaattaccatttttaaagcactgtcccctgggttatccaacttaggatagaccaccagcacctggtctcaaagtctctctttgctttattctgcaggaaaaactctgatgaggctgacctggtccctgccaaggaagccaatgtcaagtgcccacaggttgtcatatccttctatgaggaaaggctgacgtggcattcctacccctcggaggatgatgacaaaaaagatgacaagaactaacgctcctgagtaccagcccctgtcacatctgactgtgggtttcaagtgggaagggaaggagttctacttgtcttgacaccatagaggtggcttgagaagatgtcctttgaagagccagtatagtttctgtgccctgcagcagcccaagtgctttaaagccgtttcaagctgtatagtttgcacacccatcccagtggaggggaaaggggataagtgtttcaaggcaaccttttctgcactttgctgcgaaaagcaaagggccttctatgaaggacaaaacttgcagaattgggtgtgtgggagagcaaaaaaatactgtagatcttcaaagagcatctccacaacccacagccttcttcccaatagtgttaactctgcatttttacagcgtagcatgtgtgtagtttttggctattactggtgtattatttgggggagggagggatggggaggggagaaagggagatgggtagcatcattttgattaacatttggggcctgataggggaaatggtgaagcaatggaaaagaacagacaactaatgatttgcttctatgtccagaatattttacctttaaaaaaatgtcattggcaccataaataaggactgtgagagactgtttaaaagctgtgaaagtctgaaacctataagccaaggtgttccctgcctaaacttattgctgttcccacaaaggactaagcctgttcataagttaccaaagttgccattttggagatggaaattgacgaggagggaaggtcttttattggagagtatacagtacaagcagatcattctgccttagaggtgctaattcccgaaattagaagaccctttcttttccagtaacgaagttataaatatcagcttgttcatccaagccactggctgaggtgttaggaagaggaagagggtggtagaggaggtaagacagtagggaaagacaagggcccatgctcttagtggggaaaactcttggagccgtttactttgagctttgaacactgaaaccattgttggcagggttcagtcactgacagcacaagtttcactgaattgatccaagagtttagtgatttcaaaagccttggtctcaggagaagattaaactttcatattgggcagtggttcactttaaaacacacacatacacacacaaaacaattttttaagaaatcctaataagtaacatacccaaaatgctctgtcttgagtcatgagaaccatcagttcttgatattgtctagacttgcatctagagctacgttgtaaaattcttttaggcatgtgttagatttctgtgtaaactttgtttaaatgtaaacttcatactacattgtcagtttttgtcttaataaaactatagatt

SEQ ID NO: 10804 - DNA, 1195 bp, Homo sapiens
ctacaaggtgtaactagaaattgttttcaagattggtgcttttgcaccattgattagacgaggcaaccaagtgcatttattttgatgcatgcctgtcttgttcctctaatcaactcccaagaacagggacagactgggcatggtggctcatgcctgtaatcccagcactttgggaggccgaggcgggcagatcacctgaggtcaagggatcgagaccagcctgaccaacatggtgaaatcccgtttctattaaaaatacaaaaattagctgggcgtggtcgtgggtgcctgtaatcccagctacttgggaggctgaggcacgagaatcacttgaacccgggaagtggaggttacagtgaaccgagattgcaccactgcgctccagcctgggatacagagcaagactcgtctaaaaaaaaaaaagaagaagaagaagaacagggacagatttctgttcattctcctcagtgcaaatctctggccccagctttcctcatcattattcaaacccaacatatattcggcatttactataagcaagtgctgttattaagcccatttatagatgagggagccaaggcttagcaaggataaagacttgaaggccgcacagctgcagaaggtcaggctggaccagggtttatgttgttaacactaaattgtttggagaaacagcaaacccagctgtgggggaatgggaggggtgggtgtggagcctgaggctaacttcctcccacccagccattctgtcctctctgcaataaaattcatagtccaggaaattccctgcaagtgacaatgactcttaaactttcctgaagataagaattgctgggccagagcctccttcactgcttgccatcccttcagctgatggtcagtaactctttctttgccagtagcctgcctggccttccagtttaccagagaggccctggtgatgaaccaggcccacctcccatcttccggaacccatccctgccacctcacccaaccccaccctccttccctctttcactctgggagtttttgcagttcatctgctcagccaaagagaagtaactgctaatgttaagccgaaatttgggtcaggccaggaggcacctttaaaataaaaaatttactcgggtacaggaaacagctataaatgatcttggaaatgcaggcactccatctggttacacactccaggcaa

SEQ ID NO: 10805 - DNA, 1376 bp, Homo sapiens
tatctgtcataactttgtttttattgtggtaagaacacaatgtgagatctagcttctttttttttttttcattttaaacaagaagtttatttaaacaacaagacgcttgacttgaagggaaaactatgtaggattcttttttgttttagagtaatttatccttacttaaagacagattaccctacatgtaacagctacgtacaaaaaagttataaaattgtccttggttttacaatgataaatgaaaaacattaaaattctccaattgaacaaggtatgcaaggatttttatgttgttgttgttgttttgttgttgttgttaaaacagtgagagcaaaataacttactggaatataaagataggagctgaatgagcatgccactaatggagaaagggggtattttcacagaatcagtatttttccccatcccgtctccccttgatgtcagtcaaaacataccattggctgtttagttaaaaaaaaaaaatgcaatatgcttgtgcacatataccagttactttacgtacaataaaggaatggggaagggggaaatgaaagaacagagaaaactatacggtagtagtcaggatgtggtggaaccaaattgcagttttctaattgagaatgtaatcttggtctttaaagaacagagttctggagtaaagaagcaggttcccttttcagtagacacctcccgtctgctgttggaacacatcaattgtatcttcatcctccatttccaactgtgcaggtgtgtctgtttcattgactggttgcccgtcgaatgggaatctgatctacctcattgacaatccctgttgttcacaataggctttcattagtttactgagtggtgtatgcctcttaatcttaaactgcaccatagaaccatcctgccccgccaccttcaaattaatatgatcgttgttctgtcttgactccttccttgggcttttcgtcggccatggcgagcactgaagtctcctcagctgccgcttcacaaaagaggtaccaggtccgcaccaaatgagcacacaagcagcaccagaagcggcagaagaaggcgagatctagcttcttaacaaaattttaagtgtaacatctccttttaatttggataaaatagtaggtattgggccgggcgcggtggctcatgcctgtaatcccagcactttgggaggctgagatgggtggatcacctgtggtcagaattcgagaccagtctggccaacctggtgaaaccccgtctctactaaaaatacaaaattagccgggtgcggtggcgcgcacctgtaattccagctactcgggaggctgaggcaggagaatcgcttgaacccaggaggcagaggttgcagtgagccaagatcgcac

SEQ ID NO: 10806 - DNA, 2655 bp, Homo sapiens
atcttccatccccttgtctcctttccccacaggacccttttggagagaagcggggccactttgactaccagtccctcttgatgcgcctgggactgatacgtcagaaagtgctggagaggctccataatgagaatgcagaaatggactctgatagcagttcatctgggacagagacagaccttcatgggagcctgagggtttagaccctgctcccatctccccttcccccactcaagagtcccagcagaatcccttccccccaccccagggatggagaggcactgtgtatctccctccagactcgaagtcatcctgcaagatggcaagaaccaagcaagctccgatcccagggtgtgggagtgggggcctgttcccggtctgacctccttggcactggagcatctggggcttcgttcatccattcatcccgtatcaggggccaaggtacctttacaggagcacctagagcgagggcctttggcaaaaacaaaacaaccaacacacctctccacagggccagctccttagggataagtggaagatggaaattgcaattccaagagggagtgtgcccaaatgatttatggggatacctggaagggagcttggggtgggggctgtctgtgacacttaagcagtctgggtggttgtctatttgtctgtcttcagtcttgaagcagggcttcccaatgcccttttcctccctgccttccttcccccattatttcccacaggccagcataattttgtttttcctaatttatagtcactgttctagacagaccaaagagaaggaacagtggtggagtctaggctgctgatcagtaagctttacctagcacctgagcacctttctcccctcccctctttcctcacccttttctagatgtaagacagaaagtaaatgtgactgggacttaaccaaggtcttggtaaagcctgcatggcaccgtaagaagctgaaaatactgtttgttcccgcaatcactgatttgaaaagttcccaacacaggcagctgctgtgtatatgggattagagccactacatagaatagtctcttacagattttcataaatactagtcacaataagggtatttttcttgggggtggagtaagggggagactgatgctagtccttgttgtattttgttgggctgtccttgtgtattttcaccccagcctgtagtcctcctcacttcaaccccagggatttttggggagcaagggtagccaatggcagagggggttggggctgggactctggaggctcctccccttctttctcttccttccgcctcccccgtgcccccagctgctcttgtcactgtctctgatgggtatttgcctggctttgttgcttctctatctgtatttagctgcagtgatcctttagctggttggctcagaaaaaaaaaaatgtgctttaggtgccctgtaatcctgggcatcaagggaatccatccttcccctttttgatatgttctccccgtacttccagatttattgttatggctcccagtgggtattggcgattcttgtgatgcagggcctcagtcagtgtccagccatgcataagggagaggatagtgtgtacctgccctgccctctgctatgaaggtctctgccttgtggatcatgggactccccttggaggatctgtgcaaaggggggctgggcacaaaggagaatgtcctatttgggagggcaggaagcaaaggaactggacagggattggtgggcttggggaacggaagtttatcttggatacccttgaagaggctgggtctcttcacatgaagatcgaaaagggaccctgcttccaatttccctcttccattcctcgagctactccagggcttagaagaatgctcttggtctgtgggtccagtgttgtctgtcatccatttaagtgttcccactttcaagtgacaatcctctccttggccctgccatagggcagagcatgtctggcatagcagcctgacttttatgccctaatcttgagttgaggaaatatatgcacaggagtcaaagagatgtctttatatctgactgtatataaatgaagtttttttgttttttttgttttcctttttggtgcaataaagtttgttttggcagaaggaggaagtgcctgtgggtgtgggagggcttgtgtaaaggacgaatgggatcatcttgtcaaccacacctcacctaggcctggaactgttagggagaaggaaagtgccatgaattgtctggaaaccgaagacttgcataacatggtggaagggcagggctgggtggggagagcaggacaagttttctcattggaaatggggtccatgctctggcagtcagtgacatcttagtttgagtggtttccaaagacagacctattccagagcttggagtgagcatgtcctacaaggataggcagaggaagagatgggcccaggctatatcctgctaaaggaagggtctcagtatggaaaaaccattgagttttcagatttccagtactaaactagcacttttaggatcttagcctttagaccataaggactttgggagccttaaacaactctggcctcttccctcatcaccacttctacttgctataggagattcttgctttctgatgcagaggcttttactcttggctgaccac

SEQ ID NO: 10807 - DNA, 1686 bp, Homo sapiens
tcggctcactgcaacctccgcctcctgggttcaaatgattcttctgcctcagcctcctgagtagctgggattacaggtacctgccactggcgccctgctagttcttgtatttttagtggagatggggtttcaccatgttggctaggctggtctcgaactctcggcctcccaaaatgctgggattacaggcgtgagccaccgcgcccagccaagacctcatctcctaaaaaaaaaaaaaaggaaagtgataacaaaagattactagccatactcattgcagatttcatgaagagagggtgagcatttgaagcatttcagtttgctattctttgggggttggagaatgcattccaatctacctaaaagtgccctttccctggctgtttgggtgataacattttttgagctttggcagaggttttaaactctgtatgtgggctggatatgtgatctacacactgttttgtaggttttctttttctctgatttcaattagaatcagaaaacttggcagtattgggtttgaattgccacttggcaataatagtcagctgggttgccccctttaaaatagataagcattctctagtttgccacaggtgacactacccccattgcctcttcagctcactcattcacatttcctgatgggcatctgcaggtgtatctttgaccgctgtctggatgttggaatgagtggttcgctgagcagacagcctgactcctgtgtatctcccatgattgtccaagcatcacttattgctccttgaccctgtctttttactgacgtagttgagtgttgtgcagccttttattttagaggcagggtctcgctctgtcacccaggctggagtacagtggtgcacaatcacagctcactgcagccttgaactcctgggctcaagtgatcctcctgcctcagcctcccaaggattataggcgattgccaccatgccctgctaattttttatttttagtaaagataaggtcttgctgtgttgcccaggctggtctctaacccctgggctcaagcagtcttctcaatgtgggcatcccaaaagtgttgcgattatgggtatgagccattgcgcctggcagttgtgcagtcttctaaattttctgtcagtatcctgcccagggcagagctgaaactgtgttgttaggtctgattctgccaagggtcgttaagcaactcttccttacctcagagatgacctgatcagagccatcaagaaactaaaggcacttggcactggcttcggcatcatccctgtgggcggcacttacctcattcagtctgttccagctgagctcaatatggatcacaccgtggtgctgcagctggcagaggtactggtgcaccttcgagtgtgtgtgtgtgcaagggacagtctgtgaggcaagtctggagcagttctcagctcgtgctccccattatgcaggtcttttgctgagactatccagtggatgaactactcaggcctgtgcttgttcagcagacatttattgagcagctacagtgcaaagcactgggccaggctgtggggcatataaagatgataaaattcctgctctcaaggagcttacagtctagtcaggtagacagacatgcagacaactaactagatttctttgggtagccagactctttgatgtcttttgaaactactttatggattcttcaaa

SEQ ID NO: 10808 - DNA, 6791 bp, Homo sapiens
atggttcatttcttgaccttaatgtttttccaatcttcttccccctacttgggtaattgattaaaatacctccatttacggcctctttctatatttacactaatttttttatctttattgctaccagaaaaaaatgcgaacgaatgcattgctttgcttacagtattgactcaagggaaaagaactgtcagtatctgtagattaattccaatcactccctaaccaataggtacaatacggaatgaagaagaggggaaaatggggagaaagatggttaaaatacataataatccacgtttaaaaggagcgcacttgtggctgatctatgccagatcaccatcttcaaattggcacaactgaaatttccccactctgttggggcttccccaccacattcatgtccctctcccgtgtaggtttcacattatgtccaggtgcacataggtggtattgaatgctcagcagggtaggggctgaccactgtccctgattcccatcgttctcaggcggattttatatttttttaaagtctattttaatgattggatatgagcactgggaaggggacgctaactccccttgataaagtctcggttccatggaggacttgagtggccccaaaggctgccacggtgccctcaccccagcccatgtgctcccataagggctggttcctagaggcaggggttgtggggcactcccagccacggcactgttaccttggtggtgggacttggaacccaaccctgagctcccgataaagctaaagtccatcatctggcaaattcagtaaattggagagtacttgcttctgtttgtatctgagaggaatttttaactgacggcttctgtctccatgaatcattatcagcatgatgaaaggtgtgtctaaaaaacaattcagaataccagcagcattgtacagcaaggggtaaataagcttaatttattaatttaccaggcttaattaagatcccatggagtgtttagcccttgtgggagacagaagccatcagttaaatgaggttaggcctctcctcctaatatactgattgacaatgcatattagccaggtaatgcactttagctaccctggacaatgctatcaagtgtgctgggaagggaggaaggcctctctacatatggaaaagcccatgcgtggagttcccctcctttcaacattgcaacaacagtaacaacaagacaaccgcaacatgtgggcgtagtcaggcaatgctgtgtgcgaagtaaactacctcaaggtatgaagttacctcagcaattattttcctttttgttccccccaaccccattaaaaaaatttttttttgatttttgtttttttgcagcttgctgatattttatataaaaaagaaaagcaaagcaaaagagaagctgatagtcttgaatattttatttttttaatgaaaagaaaaaacaagaaagttatgtttcataatttcttacaacatgagccagtaaccctttaggaactctctatggagaacaggcctggtgggaaaggctttgggggctgcccccttaggaggaggctagtgctaagagggaaggcccaggtttgagagagcccagaggggcagagcccagagccttgtttggccctgatctctgacttctagagccccagctgctggcggctgctggaatatcctacctgataggattaaaaggcctagtggagctgggggctctcagtggttaaacaatgcccaacaaccaaccagctggcccttggtctcctctctttcctcctttggttaaagagcatctcagccagcttttcccaccagtggtgctgttgagatattttaaaatattgcctccgttttatcgaggagagaaataataactaaaaaatataccctttaaaaaaacctatatttctctgtctaaaaatatgggagctgagattccgttcgtggaaaaaagacaaggccaccctctcgccctcagagaggtccacctggtttgtcattgcaatgcttttcattttttttttttgttattgtttcatttcagttccgtcttgctattcttcctaatctatatccatagatctaaggggcaaacagatactagttaactgcccccacctctgtctccctgtcttctttagatcggtctgattgattttaaaagtggacccaaacttagggaattcttgatttagggtggctggtggcaaggaggggcaggggatatggggacgtgactgggacaggttcctgccttatcattttctccctaggacattcccttgtagcccccagaattgtctggcccaaattgaatagaagcagaaaaacatttagggataacatcaggccagtagaattaagcctctccacctgtcccaaccataaaaagggtctcccagctttccatctctggctctatatgctttatcccaaaacaaagcagataacgttcagacgtcggccatttagtaatttaaagcgaatttccagcagcaagcatgctttgatatctggttcagactatcatcaggaagaaaaaaaaatcccacagtacctgaaatgtgattgttgcagtgttcagtttccttgggggcctgctcccttcacaccttgagcccaagtccttttccgttggctgattcagctcccagaagagacgaggaagtgtgtggcaagggactggaaaacttcacttgcttggattaggcaaggctccactcattgttgatatttgcccagcaggaaaatcatgtaagttataccaccagaaagcaaaaggagcatggtttggtggttaaggtttagtgggatgaaggacctgtcttggtgggccgggccctcttgtgccccgtaggctaggtcttagggcaactccttgccctcctgctcagcacctccatttccccatccttggtgagataacaagctatcgcgaaaagcacttgggagatttggatgatttgagaagagtgacttaaaaaaaatgcttctgtgctctaagatatatatgtgtgtgtgtgtgctacatatatatttttaagaaaggaccatctctttaggatatatttttaaattctttgaaacacataaccaaaatggtttgattcactgactgactttgaagctgcatctgccagttacaccccaaatggctttaatcccctctcgggtctggttgccttttgcagtttgggttgtggactcagctcctgtgaggggtctggttaggagagagccatttttaaggacagggagttttatagcccttttctactttcctcccctcctcccagtccttatcaatcttttttcctttttcctgaccccctccttctggaggcagttgggagctatccttgtttatgcctcactattggcagaaaagaccccatttaaaacccagagaacactggagggggatgctctagttggttctgtgtccattttcctctgtgccaaagacagacagacagaggctgagagaggctgttcctgaatcaaagcaatagccagctttcgacacatacctggctgtctgaggaggaaggcctcctggaaactgggagctaagggcgaggcccttcccttcagaggctcctgggggattagggtgtggtgtttgccaagccaaggggtagggagccgagaaattggtctgtcggctcctggttgcactttggggaaggagaggaagtttggggctccaggtagctccctgttgtgggactgctctgtcccctgcccctactgcagagatagcactgccgagttcccttcaggcctggcagacgggcagtgaggaggggcctcagttagctctcaagggtgccttcccctcctcccaacccagacataccctctgccaaactgggaaccagcagtgctagtaactacctcacagagccccagagggcctgcttgagccttcttgctccacaggagaagctggtgcctctaggcaaccccttcctcccacctctcatcaggggtgggggttctcctttctttcccctgaagtgtttatggggagatcctagtggctttgccattcaaaccactcgactgtttgcctgtttcttgaaaaccagtagaagggaaacagcacagcctgtcacagtaattgcaggaagattgaagaaaaatcctcatcaatgccaggggacataaaagccatttcccttccaaatactcgacaatttagatgcagaacatttctctgtattcagacttagagtaacaccagctgaaaactgcagtttctttcctttggatacataaggcttctctatcggggtacgggacagggaggaggcctcatgtctgaagggggatttaggggcgagagccccagccctgaccctcggtcctgtgcaccgctttggggcacagtctgatggcgcctttgctggcgccttagtatggttgactccggatggacaaaagaaaaaaaattttttttcttgaatgaaatagcaggaagctcctcgggagcatgtgttttgattaaccgcaggtgatggatgctacgagtataaatggattaactacctcaatccttacagtaagattggaactaagggcagggactcatgcataagggtatgaatcccagccaggacaagtgagttgaggcttgtgccacaaaaggtttgtccttggggaacaggcaggcctgccaggatcccccccatatcgattgggctgggagggctggccatgaggtccccactttctgctttccttgcccatgtgtcacccctttggcctccagcttgtccctctctcactttctatagctttgttggaccagatggtgaggaaaggaatggcctcttcccttctagagggggctggctggagtgagacctggggcttggcctggaacccaccacacagccccaaagtcaggaagcctggggaaaccagagctgagacctcttcaacagggtttctttgagatcctacacctccattgggccctttttcagtcttcaatgggggcccagttggctctagaaggagaagaggtgaagcaggatcctttgccctgggggagtctgagggcgcggtccttggactcattcaggccgtctttgtagttgggggagttccactgggcgatcccagcccctccccacccaccctctaatggacctcctcatagaagccccatttcacttttgttttatctacctcttagcaaaacaatagataaattaggtagtggcagctccacttgcttaggttagggggggaaaaagatttctttttccaaaggaaaaaaatattaccttgagaatactttccaaaaaataaaattaaaaaaaaaaaaaccaaaaaaaaaaatttttttttaaaagggagacattttccagtgaccactggattgttttaatttcccaagcttttttttcccccataaataagtttcactctttggcgattttcttcacttgtttaagataacgtgctagctattccaacaggtaacagctttcacagtctgcccctggcctgtctcaccccatcccccaccctattcctgccagtgagtccttcctgtgcttctctcccttctcccctcccagccagctgacttcagtcacccctgtcccccctcccctgccaataagctcccccaggaataaaggctttgttttggggatgcttaaatcttgactggcacttcccggctgtgggggctggggagccacttgtaacatttctgtgcagattttatgttagccactgctatgtaaaagcacgttcaaaatgaatttcagcagattatgtgttaccataatgaataaacgtcctctatcaccatttggagtctcccttttctccaggatcttgatcctggtccccaaaaccagagtgaatcaaaagagcttcctcccctgaggcaaagtggatttgtaagcagttctgaaacatcacttactcagaagagggaacgatgtattttgatgagtgcaaattgggaagagctggaggcctactgcttgggacagttttttttttttttttttttttaaatatgagtgctagcttattctgtaattgcggcaactttgaaaattgtattttactggaaatctgccagccatcaccacccgattttgattgtatccttcctcccatcctttaatctgttcattgctttgggggaggtggggcagctggctcacacgttggagtttgttctttgatggatgaacgaacactccagttttctttcccgtgaaggttgtttcagccacaaaccacttcattttgctgtttcaatttcaaaataaaaggaaacttatattgaaagacaagtatgtctgtgtctcagggtttttgggtctgggagctgagatgctcagcctcagcatgggagccctggttctcagggacctgagtcatccaaatgcaaagtaggcatttttcttaaatgtacagaggagtggtttttaaatggtgccctgctcttaattagctttgcatattgggaggggggcaggtcaggtgtttggaatgaggactccagcattaaagaagatgttgggacatcactgcagagaagtagctgtccaagaagtgacgagggtgtgtcactcttcctaacacctaccctaagaaaaaaacatgtaagtgacttgtgtttctgggtttcctgtaaagggaaaggtctattctgaccctgccctctccatttttttttcccccaatttggggttttttgtttgtttgttttttgagggtatcactctgtcacccaggctggagtgcactggtgtgattttg

SEQ ID NO: 10809 - DNA, 1699 bp, Homo sapiens
caagtcctctaggtcaggcacttcctcctgaccagtgcaacgggcactccaggttagaaactgtgtgtgctccctctctgtcagttacttgtctaagggctcctatccgtggtcatcagctctctggccatgagttctgtttgtgcttattgcagcagcatcttcacaacaaacaggtcagtaatcaacctgggaagggaaaagacgacagtaaatattaccccctgtagagccgggaggcatttacacctggaatggccttcttaactgatttctgcctggccacctcacccccagccaagtctgaacctgagcaataccaggcacagagaggtgtctacttgtaactccaacacttgacaaaaaacaaaactgaagctgtgattggtttaggcagcaagtggccaggtgcaacttgtttgtttttatttttgttttccccaacagtactgagatcacttgcacttttcctcatttcttaagaaaatccagtttgcttgccatgacttgtttagcgttaggtttacaaagcttgttgttgaatgttgaatatttgtccaaaggagtttgacaaaatagaagctgcttggtccctgttctgcctgctaggtcataaggatgaaggccatgtggctggggtacttatgtcaagtccagaatggggcagtgtccctctcctacctctctgcggagacgcaattgaaggtcaagtagactcagtgtagggcaggcagctgtcatgctgcaaagaagtttagaggagtctttgggttggggaggtgacaggtaggtaggacaggatctcttaagatgggaaagatactggggagaggagggctgcttggccccagggaactgcagtgaggtggaactgagctccgctcctgaatctccaaaggagcccatgctgcccggcttccctgagtcattttttccagcatcctgtcagatccctcaatgtactgatttcccccttgtgttaactataccgatattatttttttagcaattgaaatgcacttttttatttcaactcaatcatgattttaagtataaaaaatttatagattgttaaaactacttttttgtgtatttttaaccactcaatgtagcattgtatattttattcttgtgagactctggtacaggtgtgccgcctaatgatttttctgagatgctgggcctttggatgtgtacggtaaccaacttaatgctaatgttcaaagtaaaaaaaaaaaaaaaaagcagccatatcccctgtgtgtctttcttcatttcttccttaccctcaggtgacaacattttgaggtccccctggctaacaaattgccctttttgagaaaaatgaacaatcctgcagtcctcttctgctgttatttgttgtttctagtgatggtaataggctgacctacctcaaaccctgcctgatctcttcatgaataacatgttttcaaggctgttaaccaaaggcagagtgattagttctctctttgcagcgctgtttggtttcagtaacactagtttgttcagccgagcaataatctgaaagtatccttgagaacagtgtttggaaaaaggatcaggattgggttctgaaccaatttgaagaaaaatcaacacagatggaaacagcttacaaagtacagtcagtgaaaagcaataattataaaatatggtacttgggatgaggcatctttcc

SEQ ID NO: 10810 - DNA, 2926 bp, Homo sapiens
aaattacttaagagttttttttttttttttttttttttttttttaggaatgaaaggtcataagccattagaaatagtggcattattatgcaataacaacaccctagctaacctgcttttgtcatctgtagcacttacaataaagaatgatgaccttccaaccctggacactacctcgataaagcaaaccagagatcctctctacactttctatggaagccataaaagttgccatcaatatatccactttcatagttctatacttttatactttctagacttttttatagactttatgatcagatctttttgtctcagaggataggttttgcaagattcaaaggaaaatcaaactccttggttgttccagctttgaagcttttgcttcagtaaatttgtttaaagaaccagatcacataccatttatcaaattctttacttaagtcagaatactttgcagacatacatatttggaaaacaaactgtttcttgttcactagatagaatctgtattgtagtaagaaactacttacaaggtggctttctttctgctttgttactctatgtattactcaataatatatgtatggtcacaggttcctggagttgttttatttctttatgacagacacatgagtatgcacctctctctaatcctctgatgtcactgcagcttcagtctctctcactctgtttttgagtgccttcaaaatgccagcatcctggaacattcttttcctgatctaaatcctacctctgactatttcattatccatgaatattggaattcacccatattccaatgggcttaactctacaaactagctaaaaccttggacaagaattttgaccgtatttctgttttgttcctccatgtcatttttaggttatatttttaacttttatttatatcttatttcttcacatatttcgtctctctgttgaaagattttatccttatttgactcttcactttttttactttcaccagaaatttgacgttcctttaaaattaaaggtcattgaatgtcttttgaacacctttttctcaactgaagtcttcctgaatgcctcccctttctgatgaaaggatcctgagtgctgctgttgctctgccctgttcccatgtgcccactcccttccgtacacattttgcaagactatactctttattttagtcaaattaatttaaaattgctccctgggtttctgctctctcatggccctgtccctcaaaaacttctgtttactttttctagctgttttcatctaatttgtttaaaatgtatgatggatccataatatatgaaggatgtaatgaaaaggaggttgcagtgttttatataatatgatcgagcacctccgtgatgaaacatttagcaattggctagtccttcacagccagagtggaagtttgtgctgtggacaggtctttttactcccttccagttctcctccaaaactggagaaaaaggaaaaaaaaaaagaactctttcaaatgaggagatttgattgcatttttttaggtgaatgaaagcttggagttgagcatttgggccttagtcagcatttttcctttctgacttaaaatctcatgtccttttccttaaagttaatagtactcaggtttttaagactaataaccacacaaggtgggtatctaagaaggcagctgttaatacattctccatctttcctgtctggcaacaggaaagatattattggtgagatagtgcaaaattgtgagaattggttatgtttgatgatgaataaattcaagatttttgaaggcttcactgctatttgggatgggaaggtgagtttacaaaatgaaaaaggtagatttttatgttacagaaatcagtaacgggtttcttgttgtgttaattacctttcacttgatttgccatgatgtttcttcctcattattgatctagaagtttgcctcttggatagtaactagtaacttagtatctactttaaaatttgtggcttttctcttcagggtcccaggccataaaacaacggagagctgtacttgcttgtcacttggaggaaccacatccttgagacagcctgctgtcttgtatgtcttcagtaggaaacttctgacacacacattcaagggagttcctgcccctgagaagtgttcccatagctttccagtcgcaggttactttcacactacgtcagcttctctggtgagatcagggatgttacatattacttgaaaatgatttcataggaagtgaggatggggcaagaaaggaggtagaagctgaattttgcttaacttcagaaggaaatctgatacttgccttggctagttctgatcaactaaagagcctgtgtctgtactggatgtgccaaagagtcaagttgtttctggaatatccagctcctctgaatgaacacagcttcctccctacctgtcttttatgggtgaaaagggaccgtctgatgagcatgatagacatcctgtacaggactcaagactgtttcattgcatttgaaagttggtgggaagtattttattctgctagagctcctaaccctcctagaaatatcttttcatgctctattaattcaattcattagtttaaaaagaaacagtgtgacataattttggtgtttacttcttaagttgtctccccaagggcatatatgtagcctctgaaaatgggatgatttcttctcaatcttccataaatttgaatatgcattttattcatttcttgacatgggctgtgtgactgttttccatcagcagttctggctttgtccacaagggagcaataaagtacgttagctttattctcaaccttctaaagaaagatcccacttttaaatctcttctggaatagcctcttagctcaaagcttattcatgtattttgattatttaagaaattttcccttattacaaag

SEQ ID NO: 10811 - DNA, 3251 bp, Homo sapiens
cttctttggtagtctgtttctaaaatgaaatgtatttcaataagcagtgtaattttttcagtgtagctgaacctatgttgtaaaatagaaaaaaatttttataatcatcaaaatgtgattcttaaagatgcatataacttctataattcaaagctattcttacatccgtacaactcaaaaggtgcttcagagactagatgtatctgagagggtctccagaccaggttactgcaaaaatgaggttttgctttcaggatttggcgtaaatacttggtagttttgacatctctgcttaacactcaagagaggctccctaatgtgctcctgtcctccatgttctgcttggcttcgttagtgcattacatgaaatgatttgcaggggatggggccttttccagggaagtcacctaaagcttgcatgttttgaaaatttgaataaggctgtttgctgacaggaggaggaagtagtggagatcatttcatctcagtcacgtctgtttctcacttcccttaggaattgtgttgatgtttaacttttatgggatgacaaattgaaatcgctcattttgaggttgctttatttttctagaattgttataagaagctaaaatagtaaacttaaaatcacaaacatgacattgctgatagtggctgagaaattcagatgagaagacaaattggttatgaattttgaaatatctattatatgtaaaatgtggatatgttcacaaccttgagctattttaacacagtttaaatatagtgagggaaaactcctaagttttactgccctgtcctctgcaaattatgtaataccagcattcttaggcgataaagagagcagcacctctagtacctttaggcagattactttttcaagtttggggaacttcaaaagaccataatcaaccaggagcttattataggaaaggctgaacagaagggctagtgtattgattacacttaacagatcatatttatccagactcagtatagcttaaaattttgtatttctttatctgagagaactgagttcccaggctaaatcacttacctcccaccccctctccaattttttttttaagagacaaggtcttgctatgttgcccaggctagagtgcagtggctattcacaggtgcagttatagcacactacagcctccaactcttgggttcaagcaaccctgcctcagctaaccaagtagctgggactacaggtgcatgctaccatgcccagtccattttttaatcttgaaatttcttcatttttctttcttcggtttcttaaaatctttgcctgaatcagaacgctggcttttatttatttttttatttttaatattaaatgtgcagatatgcttcgagcacttttctaactaatgagctctgtggtaagaaaaaatgaactctttcaattgagattaagtccatatttttcaaacatcacgttctctattggctttttggtttagtgtttctaaattttctccttctgattttgcctgtcttatataatgagcataggaaaattttggaatgaggcagaaaagtatatcaagacatacttcctggttttggatgtaagttttaaagaatggtatttttaatatttgtacacattctttgagcacccaggtacccaagccaataaggaaagttaattccttgcatatgactgttatatctttagtggttgtctccctctccctccacagtctccttggcattccatgacaagtttgtcaacctacacttttatatagacatatcattatttcatggtcaagcctgtagtattaaaatgatttttttaaaagatgtaaactgtgcttagttaattggttatattttgttctgttttttttttttttttttttttttttttgaggcagagtcttgttctgttgcctgggctggagtgcagtggcgtgatcttggctcactgcaacccccgccccccgggttcaagtgattctcctgcctcagcctcccgagtagctggaattacaggcatgcgccagcacgcccggctaagttttgtatttttggcagagatggggtttcaccatattggccaggctggtctcaaactcctgaccttgtgatccgcccacctcagcctccgaaagtgctgggattacaggcgtgagccaccacgtccaactgccttattttgttctgaataaatttacagtattgggcagcaattctggattctagacttgagaccacagaatcaaccatttcatgaggttgtactgtaattatacactggaatattcaggtagtcatctttgatttttcattcaagtaaatatagccataagaaaatatctgctatacaggaaaaccagtattaagcaaataccaccatccttaacagaaacaaaaatatatatatatattatttttaaaaattagcattgtcatacagtacaattcttagtgaagtgtattgtggaacaatttagaaacttcctttttttcccctagattaaggatactttccttgacttgagacttgtggtcttcaggaaaactactcagaatataatgactcctcatcagtatcatattgtatataaataatgaaatgcattaagaatattcacaacattgaacccaggaggcggagcttgcagtgagccgagattgcgccactgcgctccagcctgggcaacagagcgagactccatctcaaaaaaaaaaaaaaaaagaatattcacaacattaatgcttctgaatagaagaactgcaggattaagccttaaacatatatgtgcaacacgtttaacatgcttaagactcaaactcagggttgaaaatttggttggggtcctctttgtaagataaaagttgcattatgtggtatgttctcttccatatatgctacagcaccccatgaattcttcaaaactttttacctacttgttatctgtttatgaaaaaaagaattatggagaagtttgagttctcagcccttatctgtacatgtctgttaaagacaacaaaggctgcatttaagcattatatagataacaaattgaggctgtctctcgttacttagttttactgtcttcaaaggcttgtatcattgctagggttaagacttatttgaggatgagttggcattgtattttttgtgtgtgtgggttggtttgtatttgtttcgtttttatttttctattttctctcatagatttatcagtaaaatataaactcttccttagccttaataaaggctgctgctt

SEQ ID NO: 10812 - DNA, 1549 bp, Homo sapiens
gtagcaggaatggcacaagaagatagccgtcgtggtcaagtgccatcttccttttatcatggtgccaaccaagaacttgacctgtccaccaaagtgtacaaaagggaatcaggaagtccttattctgtgttagtggacaccaagatgagcaaaccgcatctccatgaaacagaagaacagccatatttcagggagacaagagcagtgtctgacgtgcatgctgttaaggaagaccgggagaattctgatgacacagaggaggaagaggaagaagtctcttacaaaagggagcagatcatagtggaggtaaaccttaataatcaaacattaaatgtatctaaaggggaaaagggtgtctcttctcagtccaaagagactcctgttcttaagacaagcagtgaggaggaagaggaagagagtgaggaagaggccacagatgacagcaatgactatggagagaatgaaaagcagaagaaaaaggagaagatagtagagaaagtcagcgttacacaaaggagaaccaggagagctgcctctgttgccgcagctaccacttcccctactcccagaactacaagaggtcgtaggaagagtgtagagccacctaagcgtaagaagcgggccacaaaggagcccaaagcaccagtccagaaagctaagtgtgaagagaaagagactctgacctgtgagaagtgccccagggtatttaacactcgctggtacctggagaagcacatgaacgttactcataggcgcatgcagatttgtgataaatgtggcaagaagtttgtcctggaaagtgagctgtcccttcaccagcaaacagactgtgaaaaaaacattcaggtaggtttcatcaccgagagggaaaacttttcaggatagaacctggctgttcagattcatctggtatccgcccaagagaataaatgcaatagaggctgaagggacagttttcaccaatttatcatttgaaaagctcctgctttggtcttttctaaaccaaggcttttatttcaaaagcattaaatttgacgctggactagtgggaacccaggcacactggaagggggatctgttatagttgattgaccaggaggttaaaatcaacaccaactttgcactgagattcactgttgtaggacgtgtaatagaattcattctggcatcttctctgtggaggtaggagttactgattaaaggttaggagtagagaaaggtccctttctgggtttacaaggatgccagattctagtacagctgatggggacaaaaaccataatgactcagaccggtggaaatggaagatcttcagcagtgagtttgcttttaccattggagagatgacaacactaaatttgccaagaggctgagcccatgggaatatgcaaactttaagcagaggctgagctggtcgaaaatgttgcccacctggcagtagggttacataatgccactgtacagtattgttaaggtaacaaaataacggtattcaaaccaggctgttgtcgtgaaaggactatattgtgataggttaaagaggtatgct

SEQ ID NO: 10813 - DNA, 2058 bp, Homo sapiens
cccggccctgtcctggctttgatgaagtcctttagacttaaggctggaggaaaagatgagccttgaggattgattccacctttcttttgcttctgttttccttggccttggcttctcctggctcagagtagggttgttaaactagattgcaattaatattaatgaggactttgaaataagacaaatattcctgcagccaacagagatgtatccctcccgtgacaaggagtgagcatgaaaggataggggaggactggtgggcaatgtgctctgcttccccccgcttcccccgctagccatcaggaggaagtaaactccccgagttccttcaggagcctgggaaggtggctttctggtgaagggcctttggttgtagcctgacatgcggtgccctgaggtttgatctttgtctccacctccattcttttaggctgagcaacagaaaaaggcggccatcatctctgctgagggcgactccaaggcagctgagctgattgccaactcactggccactgcaggggatggcctgatcgagctgcgcaagctggaagctgcagaggacatcgcgtaccagctctcacgctctcggaacatcacctacctgccagcggggcagtccgtgctcctccagctgccccagtgagggcccaccctgcctgcacctccgcgggctgactgggccacagccccgatgattcttaacacagccttccttctgctcccaccccagaaatcactgtgaaatttcatgattggcttaaagtgaaggaaataaaggtaaaatcacttcagatctctaattagtctatcaaatgaaactctttcattcttctcacatccatctacttttttatccacctccctaccaaaaattgccaagtgcctatgcaaaccagctttaggtcccaattcggggcctgctggagttccggcctgggcaccagcatttggcagcacgcaggcggggcagtatgtgatggactggggagcacaggtgtctgcctagatccacgtgtggcctccgtcctgtcactgatggaaggtttgcggatgagggcatgtgcggctgaactgagaaggcaggcctccgtcttcccagcggttcctgtgcagatgctgctgaagagaggtgccggggaggggcagagaggaagtggtctgtctgttaccataagtctgattctctttaactgtgtgaccagcggaaacaggtgtgtgtgaactgggcacagattgaagaatctgcccctgttgaggtgggtgggcctgactgttgccccccagggtcctaaaacttggatggacttgtatagtgagagaggaggcctggaccgagatgtgagtcctgttgaagacttcctctctaccccccaccttggtccctctcagatacccagtggaattccaacttgaaggattgcatcctgctggggctgaacatgcctgccaaagacgtgtccgacctacgttcctggccccctcattcagagactgcccttctcacgggctctatgcctgcactgggaaggaaacaaatgtgtataaactgctgtcaataaatgacacccagaccttccggctcagccatgggttggttttttgtttgtgggagccgtgggatcagaacagagtgttctagcagtttttgtgtgtacatgtttgcattgccagctgggacagagtctccagtaaggcagaaaatgctttgttttcagaaaacactttgtgttgtgttccagatccatccccaacccgaagggaatctctgtggtagcaggtgaggtttgtcatgggataggcagtgaaggtaggtggagggcagttaacttgttctgtgtgttttggtgccactactcactgggagttacaggcctgcccgccaactgccagcaacaccttcccccaatgctagggaagtggttgacgtaaataatgtgtccggtagccctcagttagatggcttggggcactctgcagtaggtttttttttttctcttgttttcttttcctttctttctttttttcttttctttttttttttttttttttttttttttt

SEQ ID NO: 10814 - DNA, 1957 bp, Homo sapiens
gcgcatcctcttccggcctgtcgccagccagcttcctcgcatcttcaccagcatcggagaggactatgatgagcgtgtgctgccgtccatcacaactgagatcctcaagtcagtggtggtgagtgaacaggggcctttagcctcgagcccagagcaccaccctgggagggtgccaggtggcaggaagcgcttggcagtgggttggttgggatgtggctgctagtttcctggttccttttctgcttcctcattaacctgacctgcccttctgctcctccctttgaaaccaggctcgctttgatgctggagaactaatcacccagagagagctggtctccaggcaggtgagcgacgaccttacagagcgagccgccacctttgggctcatcctggatgacgtgtccttggtaagatccttcgggagaccgaggaggggaaggggctgcagttctcgtttaggtgcctggctccatttctgggtagacgctattaggtcctcccttctgctttgctagatgtgagacttgaaaacacggaaacatgctgaggtgaggcagtctccgtgggtttttcagttgagggttcttttaccttccccctgccacacacatttttcttatgacctctggttgtatccagatagtctctaaccactaaatgttttaccttctccaaactgttacccagagagtgatgccttgttaaccctgtttgacacaggcagaaactgcctggtagagaccagagaacagctcgggtagtccttctccctagcacagacctcccagcctgactcctgggagcttcctaacactttacagtccgaagctcagtgaagtaagctctgggaaccccagtgaaaggtgatagagtgtaaacgaacggttggattcccccaggcctggtatagggggcaagggacatctctgaggcgtaagctatcctcttgagacactatagcttgtgtgtttatatgacattggatgtcataactcagaaagcaatgcaggcaggatagcgtttcaggttgaggagggtgaggggaaggggtcgtgtttctagattctctgggaaaaaccatttggagtgatttgttcgggcagtgaggtaaagtgtttcctgttcagttctcccgtgcattgctagggaaaggcactgcctcccccggcatctgtgcagctgtttaaacagccacttgacaacacccagtgctaacccctgggcactgctccaccttgctccgcctgctggaagtcctgggggcttggggctccctctgctggcaagaggccaggctgcagccattctgtgggcccttccctcgtaattaccgttaacctgaacaccttggctgtgagaaaacgctgagtaaaaacctaagggaaaagttggcattttactagactttaaccacatactccattctggggaaatgtgggctgaccacaagaaaccctatctaaggtgtgagaagaaaattaggtttcatggggaatttgctgccctcagctggcccttgtagaaataaattttattccttaattatacatttcatttttcatgtctcaggatcagattttcttacccaaactttgactaagaaactagaaatggatcaggcgaagtacaacagctgcagttagagttaggaggttaaaaattctggaagagaatgagaccaggatttactcttcaggagaagtttggagctgcttttttaaaaagcagaggttgggagagtggaggaaatgaaacaactagaatttgatggcaaaaccaatgctcttctcttgattctttttcaataaaaattaggatgaataagtaaattgctctaggctgggcattaggaattctgaggtcccttcccattgtttgtgctatctttagggacagtcccgtcagacctgacatgattagggaaggtctatggatcatcagacttctaaaccctcat

SEQ ID NO: 10815 - DNA, 1199 bp, Homo sapiens
gaagaagaagaaaaagaaagacatgggacaccataaggcaaccaaatattaaaactggggcattccagaaggcaaagagagaggcaaagtcatagaaaacctatttaacaaaataatagctggaacattcccccaagtcttacaaaagatatagacatccagatataagaagctcaaagatcctcaaatagattccacccaaaaggtcttctccaaggcacattacagtcaaaagttaaagacagagaattctacaaacagcaagagcaggccaggcatggtaagtcatacctataatcccagcactgtgggaggccaaggaagggggatcccttgagctcaagagtttaagaccgagatcgatctaagatggcgaccgtcgaaccggaaaccacccctactcctaatcccccgactacagaaaaggagaaaacggaatctaatcaggaggttgctaacccagaacactatattaaacatcccctacagaacagatgggcactctggttttttaaaaatgataaaagcaaaacttggcaagcaaacttgtggctgatctccaagtttgatactgttgaagacttttgggctctgtacaaccatatccagttgtctagtaatttaatgcctggctgtgactactcactttttaaggatggtattgagcctatgtgggaagatgagaaaaacaaacggggaggacgatggctaattacattgaacaaacagcagagacgaagtgacctcgatcgcttttggctagagacacttctgtgccttattggagaatcttttgatgactacagtgatgatgtatgtggcgctgttgttaatgttagagctaaaggtgataagatagcaatatggactactgaatgtgaaaacagagaagctgttacacatatagggagggtatacaaggaaaggttaggacttcctccaaagatagtgattggttatcagtcccacgcagacacagctactaagagcggctccaccactaaaaataggtttgttgtttaagaagacaccttctgagtattctcataggagactgcgtcaagcaatcgagatttgggagctgaaccaaagcctcttcaaaaagcagagtggactgcatttaaatttgatttccatctaaatgttactcagatataagagaagtctcattcgcctttgtcttgtacttctgtgttctt

SEQ ID NO: 10816 - DNA, 2448 bp, Homo sapiens
cactgcctcggcccttcttgggtctcaccccagtgcccactgttggggaaaggagttcaggggtaggacctgactctcctctggtttctctgcagccctcaagggtgacggaggcctctacagcagcctgcccccagccaagcgggaggaggtggagaagcttctcaacggctctgcgggggacacctggcggcacctggcgggcgagctgggctaccagcccgagcacatagactcctttacccatgaggcctgccccgttcgcgccctgcttgcaagctgggccacccaggacagcgccacactggacgccctcctggccgccctgcgccgcatccagcgagccgacctcgtggagagtctgtgcagtgagtccactgccacatccccggtgtgagcccaaccggggagcccccgccccgccccacattccgacaaccgatgctccagccaacccctgtggagcccgcacccccaccctttggggggggcccgcctggcagaactgagctcctctgggcaggacctcagagtccaggccccaaaaccacagccctgtcagtgcagcccgtgtggccccttcacttctgaccacacttcctgtccagagagagaagtgcccctgctgcctccccaaccctgcccctgccccgtcaccatctcaggccacctgcccccttctcccacactgctaggtgggccagcccctcccaccacagcaggtgtcatatatggggggccaacaccagggatggtactagggggaagtgacaaggccccagagactcagagggaggaatcgaggaaccagagccatggactctacactgtgaacttggggaacaagggtggcatcccagtggcctcaaccctccctcagcccctcttgccccccaccccagcctaagatgaagaggatcggaggcttgtcagagctgggaggggttttcgaagctcagcccacccccctcattttggatataggtcagtgaggcccagggagaggccatgattcgcccaaagccagacagcaacggggaggccaagtgcaggctggcaccgccttctctaaatgaggggcctcaggtttgcctgagggcgaggggagggtggcaggtgaccttctgggaaatggcttgaagccaagtcagctttgccttccacgctgtctccagacccccaccccttccccactgcctgcccacccgtggagatgggatgcttgcctagggcctggtccatgatggagtcaggtttggggttcgtggaaagggtgctgcttccctctgcctgtccctctcaggcatgcctgtgtgacatcagtggcatggctccagtctgctgccctccatcccgacatggacccggagctaacactggcccctagaatcagcctaggggtcagggaccaaggacccctcaccttgcaacacacagacacacgcacacacacacacaggaggagaaatctcacttttctccatgagttttttctcttgggctgagactggatactgcccggggcagctgccagagaagcatcggagggaattgaggtctgctcggccgtcttcactcgcccccgggtttggcgggccaaggactgccgaccgaggctggagctggcgtctgtcttcaagggcttacacgtggaggaatgctcccccatcctccccttccctgcaaacatggggttggctgggcccagaaggttgtgatgaagaaaagtgggccagtgtgggaatgcggcaagaaggaattgacttcgactgtgacctgtggggatttctcccagctctagacaaccctgcaaaggactgttttttcctgagcttggccagaagggggccatgaggcctcagtggactttccaccccctccctggcctgttctgttttgcctgaagttggagtgagtgtggctcccctctatttagcatgacaagccccaggcaggctgtgcgctgacaaccaccgctccccagcccagggttcccccagccctgtggaagggactaggagcactgtagtaaatggcaattctttgacctcaacctgtgatgaggggaggaaactcacctgctggcccctcacctgggcacctggggagtgggacagagtctgggtgtatttattttcctccccagcaggtggggagggggtttgggggcttgcaagtatgttttagcatgtgtttggttctggggcccctttttactccccttgagctgagatggaacccttttggcccccgagctgggggccatgagctccagacccccagcaaccctcctatcacctcccctccttgcctcctgtgtaatcatttcttgggccctcctgaaacttacacacaaaacgttaagtgatgaacattaaatagcaaagaaagaaaaatagtacaaagagattttctggaaatacacatggtttgaattgtttgggattg

SEQ ID NO: 10817 - DNA, 1266 bp, Homo sapiens
gacattgagttttaacagaagggaaaaggaaagaagaaaagatttttgcagaatttctcaaaaatcagtttgtggattccagtagtatttatattgagagaaacaaattttagtccttctaactgtgctaaaacttggatatttgtgaaaactccttaccaccatacaagcatcagaagagctctcttgttgttagcacttattgtttgcaagaacagaatacatccttttatccttttatgaaaaatgacaagtgaaggcaaaaggggaaggttatttgatctggaagatgagtgttctgatgtggtggcttttgcaaaaatctttattggtgttgaaaactggaaaaaataactcatccagaattcatattgtcttgacaagaactatggttctctgtttttagatattgtggaaaatgtttttgggcatttttctctgattttatttcttctcccccacccctttttctaaaaaacaaacaaaaaaaaaaacacacaaaacaaaaacagaacaaaagaagagagaaggaaattttatcaattaaaaatgctgtgtgataaaatcccagcccagattgctcagctgtttgtacctgacttgccgcctgcataggagccagttctgttccttctgactagcccctcttcctccaggggagaacttccaaatgttaatttttttttttttgaaaatataaataattactattttgtactgtgtggtatctctggtcttttgtttcactcacctgccttgtctcttgggtctgagtcccttgcttaagggattttgaagtcctagttttcagcttgcagagattatgtctgaaatgcctaatgagtcgcagggatttgttgagactccgtaatctcaagttctctttgtgagctatcagcatctgccagtctcttgtcctccctgagtatctcacagtccatatcctgatgagggatcaggcccctacctctgccaaggcaagtaatggtagtgggcttttaaactgccccccgtatgttttaagacctaatccccacctcccttcttctaactaaatataaaaagatccaggggacataaatgtggagattaaataaagggaaattattgtctctaactggttctgtcattgacttgatgtgtttccagaaaagctaatactggagctcacaagaatgttctggggctccctgtctgccttttttgtggctctgttaggacagtgggatatattgaagaatgcatcagctatttggccagcctgtg

SEQ ID NO: 10818 - DNA, 1169 bp, Homo sapiens
ctggactccatcctgggtgacatagtgagactctgtctcaaaaaaaaaaaaaagtgatcagattcttgtctctagagtttaatttaaatggtagtatttataggagttctttgtattgaacttaaggcagaataaggtaaatacttgaggtttaacatttgtttctgttagttttgtctctctggcacctttgcccaggtttgtagtccaagggaggtgaagcttattagaaactgggggaaaaagagatttgtggggctctcttcctattgtcctgagatggtatagaataagtctgattgtgacagaaaaggagttacttgatccggggctaaagccttgatttgtggaggtggtttcaagataatatgattaatattagtatctgaatgtactacagcagttaggtaaaagtcgtctatctgctggcaaaaaaattcctggtaacaaaagcttggcttgtgtttccttgtctttcacaggtgagtgttgtgcaagattctgtcaacatttctggccagaataccatgaacatggtaaaggttcctgagtgccggctggcagatgagttaggaggactgtgggagaattcccggttcacagactgctgcttgtgtgttgccggccaggaattccaggctcacaaggctatcttagcaggttggtatttattcatgaggaattttatagttttggtgaaataaggaaaaacaagtgattgcataatcaccttttgaacaacttcaactttttgaactcaactacaaaacaaactgcagctaaatatatctttgtattccggtaacaatgctcagaaccaaaaaagctgctctctaaaatgacatttctgtttttcctctctgtagtggacctaggccatcattttcaaggcatggatgatgatgtacaaaggtattgaatgcctttgcccctagagagtagatgtcagagcaccagttaagagcaggtatcaacccctagataagggtttaggatgtaatggagaggattctatactcaggactaaatgccatctagctagtcctcagccctggaggggttagccctcttttcaatttaaacatactagaagaatgaaactcttgcccctgacatggaggatcaggtcttgctttaataggcccatggttttcaagaccagggagatt

SEQ ID NO: 10819 - DNA, 1225 bp, Homo sapiens
ttttggaggcctcgttaccttccaggtgaggggcacaacaaagcagaagactgggtggtgggaagccagcgcccactcgcaggggatccctctcaggccagttgcctctttccttatttgctagttcgacagcgcctagaaaatgcagttggtaaaaactaaaaacttctagaattagaaggcacttagaagatcacccaggaatggccccgtcgtttcttcttacagctgaactaacggaggcccatggagtgccgcaagccactcaggcagtggcagatccagaatatagaacaaatctaactcaattcaacaaatgtctattgactactttctgcgcggtggttgctgtggattcagaaattaattagatgtgatccctggcttaagggtgtcacagcccgataggagaaaacagacatgaataatcttagaaggatctagtaagttctcagcttggaggtgtatacaaggtgttgctggaaggaagtgaaggagcagttaagtctgccctggagtacaatgggagatatattggtaaaagccacagagaagagctgagttccaggatcaagccaggaaggaataagtctcacgtcaaggctttaaatatctcggtaattagactataatggtgacttttaagattcccccttcatttcagccgttttctgtgattcttgctcatttcctggcaggttacccttaagatacttggaaaactgggtggtattcttgctcatatcaatagaaatctttctcttcacagcggcttttcaggttgaaaatgtacactttttaatgtctcctaaaatgacctcagctggtgggtggtatgtatgtgtttttttgtttgtttgtttttgagacgaggttttgctcttgttgcccaggtcggagtgcgatggcgtgatgttggctcactgcaacctccgcctcccgggttcaagcgattctcctgcctcagtctctctagtagctgggattacaggcggattccatgacgcccagctaatttttgtatgtttaatagagacgggatttcaccatgttggtcagggtggtttcgaactcctgacctcaggtgatccacccgcctcggcctcccaaagtactgggattacaggcatgagccaccacgcccggccggtggtatgtatgtaaaggctcaccaaatgcaggaataatattggtgccttgaaatagggccacagtcctctttctt

SEQ ID NO: 10820 - DNA, 1194 bp, Homo sapiens
tagtaagttttctgtacacctgtgtgatttttcatgtagctctctttagtgtaaattctcatggatagaagccaaatctgtctgatttttttcatagcctagcgtggtggcatgcacacacacttttaaaaacaaagataatatttatttttttaaaaaggagtttcgctctgtctcccaggctggagtgcagtagtgcgatctcggttcaccgcagcctctgcctcttgggcgattcttctgccttagcctcccaagtagctgggattacaattgtttgccaccacaccttgctaattgttgtatttttagtagagatggggttttgccatttcggccaggctggtctcgaactcctggccttaagtgacctgcctgcctcagcctcccaaagtgttgggattacaggagccactgtgccctgtctaaaagcaaagataataaattctgatcctcctttgacttttgatttcttggcaataggagaagttaaggctgcaaggccaaatcacagagggaagcaacatgattaaaacaattgcttttggccgctatgagcttgatacctggtatcattctccatatcctgaagaatatgcacggctgggacgtctctatatgtgtgaattctgtttaaaatatatgaagagccaaacgatactccgccggcacatggtgagttgtcttgggttcctctgccttgaccatgatggcaataagctgtaggatctctagattttgccatagcgatggcatctgttcaggcaccttctcagtggtcctcagcagtgggatgaaggcataggaaatgacaggccacagcttaaggcggggtatagagcctgaggtatggcttgtgctgggtgccacccaaagcagctgagggcccttacccacatcctgtcatgtacatcttcttgtcttttgttcttgctgcctactgctcttcatttcctccttggaatatgaattacctctgcccacaggttttgtgtgtcccaaactagatgaaaatacagacttcattaggcacagcagagacagcatggctcaccttcatatccctagcaactagtgtggacaactgatgcccaagaagtatatgttgaatgggtacttattaatatttaatagtgatcagcctgtgacagattatgaaagtagcagagtgggtcctttggtgccttcccctct

SEQ ID NO: 10821 - DNA, 2209 bp, Homo sapiens
ctcaaactcacatctaattttttaaattatttcatatatacaataaaggtcggtgagcgatgattttcatttctcactgagggtaaagtaggaagaatggattagataggaaagcagtttataagtcaaaatatagtattttttttgataccctaatatgttgttaaacctttggcaattccttcttggcggttagttattttggaatctatgtaaaggcacttgagttgaaagtatgtaatcctttttcccattgttctccctcaggacctgattgatgagtggatagccaaagaggccaaaaggtccaactccaataaaaccatggatcccagctgcttaaaatggacccctcccaagggcacttaaagtgacctgtcattccgagccagcgaaccccagcagtaggaatccgtaccctagggatctgtctgtcatttctctgttgctcttgtgattggcaagtacagtatcctttgggaaggccatccccctcaggactgtcctggctccgacctttgtgtacactgcagacgctggttctgaggaactgttgtttcggcctcagtgaggttgcctggatgggatctgtattagacttgagtgcaggtctctcagcactgacccaaggagttctgttatggtactgtacctgtccagtcactggttctctcctcatgtcctctcgccccatgaggttgtgttgtgtcttctaagcgtggtactagtgcttgccacctggtcaccagacctccaaatatggctgccaccaccaggacctttccagttactccttatatgtgtgttctatggaggggcagggaaaaggtggcacttgtgagtgtgtgtggattggcagggggtccattcactttgggttccatcttgctttaaatttcttcattttgattaagagacctctttttgatctgtattgggctaaccagagccaaatacttttgaagagtttcccagggactagtcatggtaatagcatataattgatctgaatgagatggagagaagaatgaaggggtggtggttctgggtttgatttgagttcacctgtgggcagtgggcagtgggcagtgtcttggtgaaagggaacggatactactttttgcctcaccgtaaagtactcactagtaaatatttccttctctctttactcccactttttacgtttgcaggtgccaaagtaatgtccacttttccctttcatgctgcatattaactggttaattatactgcagaaaccttttcacctccactagtctgatacagtacatctgtacttccatataccttgcactgattttgtctgagtgccctgggagaagtagaaaatgattgaaagtgacttccgtatctcagcccatgactcagcaaggcagaatggccacccctgccaaagtttgcttctcttttcaacagtgcctcaccctccctctaggattaaagtgcttctgcccttccacgaactcctcctccatttcctttttgggatttgtcaccatccttctattctctggtcttctatttttggtgttgttcaagtgaaggaagagatgttccctctaatttctctctagcccattataacctgctatcttggggcaacttttgatgtatgacatgtcacccttcccaacttggtctcctccaacatgctgtcttcatgtggagccctcaccacaatccctgactccggtcatttgtgcctttctcttgtcatctctgtacactacttatattcactgtgggttgggggagctaattttaagcatgttcagtggcagctcccctccagtttcagtgtcactgttaaaatttatcaaaaagcaacttcactaggggttttcttaagggataaaggccttttacagaagctaaacccttccccacatgtggtagaatgtgctcttctatatctactcctcaataaagcatgttctctgctcaagtctgtttcatctgggggctctcatttatatatgaaaatgatgcacacgatctgctactaatagtaaatgcacttgggatttgctttccctagcagtaaactgttgagggatgtggtttgtggctatggaatgtttttccctgtgatacaggctgtctgtaaagatcaagggagtgctcactctgaacttctctagatggtggcacaaatttgatctgcctcactttggttccagctaatcagtat

SEQ ID NO: 10822 - DNA, 1171 bp, Homo sapiens
gctctaagcagttttcttatatcaaacacacttaattctccccagcaacctatgagagaggtaatattcccattttacagatgaacaacagagaggttaagtaacttgccaaggccaaacagctcgtgaatagcaaacctgggctagaacccaggtaatgtggctccagaacccctgcttttggtcgttctgctattctatgaggtagtcattatgatccccctcatcagaaagcagaaagcatgagattcagaggggtgcaattacttgtccaaggtcacacagctcatcagggaaggagctggtacccaggcccagatgtgtgggtcacacacccagactccaggccacctcccagatctgaggccgctcctctggagtcaagtctgtgcctgggagaagcaggaaggaccactggacctgctgtcagtggggcaggcacaggctttttccagtcccaggctgccccctactggcagcaggacaaacagcaggtgcctgggcccagctaggataggaagggtgaggatgggcctaagcaggctgacacagggctgagtcctcctctccccgctccagttctctgtggacattgactcggagctggtggaggagctgccggccgaaatcgagctgtggctggtgctggtggccgtgggtgcagggctgctgctgctggggctgatcatcctcctgctgtggaaggttagtagcccagcccactcctgctccgggacctccaccagcacactcaccagcccttcctccaacccacgtctccccatcctggtcctcccttccatctcacccccacccttcctccctgtcctctccaccttctaccaccagcttacagtctcacccctggcctgggttagtggggggagctgcaagctggaaagggggacccaggagctctggcttctgaccacaccaccaagctgggactgagccccagcccccaggctccccagccctaaagccctggtccacgagtgctgctggtgaggatagcccagcgcccccctgatggcccgtccccacctcctcccctccgcagtgcggcttcttcaagcgagcccgcactcgcgccctgtatgaagctaagaggcagaaggcggagatgaagagccagccgtcagagacagagaggctgaccgacgactactga

SEQ ID NO: 10823 - DNA, 1725 bp, Homo sapiens
tctccctccaactccagtgtgacttctttaagcggacccgctattatcagatcatgcccaagtaccacgcagtgcggatccgggaggaggagcgctacccacctccagggagcaccctgcccaccaagaagcactgggtgaccagctggcagactcgggaccaatactactgacgtcctccctgatcccaccccctcctcccccagtgtcccctttcttcctatttatcataagttatgcctctgacagtccacaggggccaccacctttggctggtagcagcaggctcaggcacatacacctcgtcaagagcatgcacatgctgtctggccctggggatcttcccacaggagggccagcgctgtggaccttacaacgccgagtgcactgcattcctgtgccctagatgcacgtggggcccactgctcgtggactgtgctggtgcatcacggatggtgcatgggctcgccgtgtctcagcctctgccagcgccaaaacaagccaaagagcctcccaccagagccgggaggaaaaggcccctgcaatgtggtgacacctccccctttcacactggatccatcttgagccacagtcactggattgactttgctgtcaaaactactgacagggagcagcccccgggccgctggctggtgggcccccaatgacacccatgccagagaggtggggatcctgcctaaggttgtctacgggggcacttggaggacctggcgtgctcagacccaacagcaaaggaactagaaagaaggacccagaacggcttgctttcctgcatctctgtgaagcctctctccttggccacagactgaactcgcagggaatgcagcaggaaggaacaaagacaggcaaacggcaacgtagcctgggctcactgtgctggggcacggcgggatcctccacagagaggaggggaccaattctggacagacagatgttgggaggatacagaggagatgccacttctcactcaccactaccagccagcctcagaaggccccagagagaccctgcaagaccacggagggagcgacacttgaatgtagaataggcagggggccctgccccaccccatccagccagaccccacgctgaccatgcgtcaggggcctagaggtggagttcttagctatccttggctttcagagccagcctggctctgccccctcccccatgggctgtgtcctaaggcccatttgagaagctgaggctagttccagaaaacctctcctgacccctgcctgttggcaggcccactccccagccccagccccttccatggtactgtagcaggggaattccctccccctccttgtgccttctttgtatataggcttctcacggcgaccaataaacagctcccagtttgtatgcagctgcatctgcttccacccactccccagcctttaccaaccccaggtcaatggatgatgatatcatccagccaacacctaggtaggatgaagccaggtctggggacttgcgggtttgagggtaaagattgatggaggtggccaggtgcagtggctcacacctgtaatcccagcactttgggaggccaaggcatgcagatcacctgaggtcaggagttcaagaccagcctggccaacatggtgaaaccctgtgtctactaaaaatacaaaagttagctgggcgcagtggcgcatgcctataatcccagctacttgggaggctgaagtaggagaa

SEQ ID NO: 10824 - DNA, 2280 bp, Homo sapiens
cctgtgggtcctggagggaggggatgccatgtcctcaccggggggcggaaggggctgggatcatgcctggtgtccagacctgaccccctaccctcctttgttttccagatctcagaactggaaggaaacttgcaaacactgaggaattccaattctacttaacaggaatcattccatgactggacaataattaacccccctcccattgttcctccctcccctgtcctcaacaccccacccctcccccttccagcctggggacaggtgccccgactccccccacccctccaccccacctcccccagcttcagggaccagagggctcatatcacaggcccccttaagatggcctgggcagacagaggtggctagaagggcagcctctttcttgccccatggggctgaggcacagaggccgagggctgccgagggctggcctggtggtcgacggacacaagcacctgcagatcaaactgccagactttacacactccagcttttgtctctggactggaacggggctggggctctcccagcatctgccaactgggggctgctccctgcccatggggcacctgggtggcccctgggcctcttgacttgagattctaccttctcggcccttccctctccccccatcattgtgccgtctctgttgcattctgaccctcccgcctggggggtgggggcgttgcctcaacacctcccccatccctgttccctgtcctgggagggatagagtccaccccagagcccggaggctgggcctggccctggccctgcactgatttctcatgtgtccttcgggaaaagggggagtgagagtgggaaaaagggagagttcaggacacctggtccccagctccccattgcctggggcagcagccctcaatttctccttgtgcctcccctcttccaggtgccaaatagccataacctcgtcttggaactgttatgtggcctctctggggtccaggtttcctggtcaagcctgggaatgccagggaggaaagggggtctggctacagcgaccctggtcttaggcaaggggaacatttctccctggagagtcaggtcctatcctgtgctgccctgtctgcccagcccagggcgatgcctggaagcctactgacattgcagggagtcagcctcgcccccaccccctactggttttccaatgttttgactggagggcaaaattttactactactcatctttttggagaccagggctgccctgctggcagcctgccttctaagtgaaatcgactctgtttccccactttaaccccaaattggggcttggaccaagggaggtgagaccacctcccccaggtcccctcccctttcaaaatccatctcattttgccacttcatgcccctgccctaactgggtttttgttcattttttaaaaacagaccacccatcccatccgttttggcttcttgtcccctgtaaatagaccatgacttcgatcagtatttcttgtccccaccccttcctatccccagatgtgcccccatcccctgaaggagctggctgtctcagtcctgggctcgcgcacttcaccccggcagatggagggggcggaaccgggtgggcggggccgcttcgggctgcttgggccagcggccacccctgcccagccgtcgggagggccgcatctctgtatataatatatatatgtatgtattgttcccggttttgtacggaccatgccctctgtcaggtcgtccccataaaagcagcccccagagccttgctgcctggtttcttgattcactgaggtggggagtgggcagggatcaaggatgccaggctgccccagtggtcccctcccaccagtgctgcctctaaccctgaggaacttcctacagtgtccccccgtttccggttccagcaaactgcttttctgcccccattccagccatcagcacccatgctttttgtccagtcctcctgggcagggctgagggtttctagagagtttgtttagtctgcattcgtttttcagggcctctaagaagttcaaaggatgggctaaatacagcaaggtgaaccccaagtccctcccccagaaggcctttaaactgtggggacactctcaagaggcacccggtgtgaggcaggtaaaggatcaaaggattgctgggggtgggaggtgactgcctggcagtttagtacccagggtcctagaggatctgtttgccctttggggcgggccaagtggcctgaaatagccccagcccctgtgctgggccagcaggcctgtgtgctga

SEQ ID NO: 10825 - DNA, 1205 bp, Homo sapiens
cctgtctgtgccttcaccccttgcctctcccctcaccgcatccccgccttccctcctgtcagcgcatctctccaatctgactccttttcttctagggagaccgtggtgagcctggtccccccggccctgctggctttgctggcccccctgtgagtaccaagacccccatcatttttcatcaccgactgggacctgggacctcgagggacggaatgaggacaaaggcgtcagccatcctcaggggagaagggtggagacgggattgtttcccacccaagcatcttcctgcctccattactgctcctcccccaggtagtggaaactcctgcctccttccctccattcaccgccctgcttcctcccccagggtgctgacggccaacctggtgctaaaggcgaacctggtgatgctggtgctaaaggcgatgctggtccccctggccctgccggacccgctggaccccctggccccattgtgagtggcttggccctctgtgcccacgaggctggtgggctgggacccaggacgggtccaggcttgatgcctctgtgctctcctacagggtaatgttggtgctcctggagccaaaggtgctcgcggcagcgctggtccccctgtgagtatcacccgcctctctgttgagcctctcccctctccccaggcagcggtggcaggtgagggcagctgggtcggatgagttggctgttctccctctgactgttcctatgttctctccttccagggtgctactggtttccctggtgctgctggccgagtcggtcctcctggcccctctgtaagtctctgcagcagagtccactgctctaggttgggggtgctgggtgggggctgccagaaggatggtggggctgactgaggacccaatgatgcaccagagccccctggagtctgacagcccctcctatcctcatccagggaaatgctggaccccctggccctcctggtcctgctggcaaagaaggcggcaaaggtccccgtggtgagactggccctgctggacgtcctggtgaagttggtccccctggtccccctggccctgctggcgagaaaggatcccctggtgctgatggtcctgctgtaagtgccagctcagatctctgcagctccggaggtgtgcagagctggggaggggtccctgtgctgctctctggcacctcacccctgtttgcctcccaaagggtgc

SEQ ID NO: 10826 - DNA, 1156 bp, Homo sapiens
ccggatctgcgtctgcgacaacggcaaggtgttgtgcgatgacgtgatctgtgacgagaccaagaactgccccggcgccgaagtccccgagggcgagtgctgtcccgtctgccccgacggctcaggtgcggctgcgctcggggcctggggcctggggcctggggcctggggcctggggctggggctgggggtggtcggcgctcgctggccctccgtgctggaggcctctgccgacgggagcagcattagcaaaccttggctctaacgcgcgtctcttcgtcccctagagtcacccaccgaccaagaaaccaccggcgtcgaggtaatctcctgccctcgaattttgcccctgcgcggcccgtgactcctcacagtcctcccttctctaacctggcctcttgtttcttctcccccaatcccacagggacccaagggagacactggcccccgaggcccaagggtaagcgttgcactctgggctgtggggggctgcaggtgggcatggctctcggccccacgctcaccccggccccgccctctccccctgcagggacccgcaggcccccctggccgagatggcatccctggacagcctggacttcccggaccccccggaccccccggacctcccggaccccctggcctcggaggagtaagtggagaggccttgtgtgtccactctcccctgttttgtttttgttttttggcagatgacataattttatactttgaaataatttcaaacttacagaaaagttgcaagaatcctacaggaaactctcacatacccttcacagtttgtgacatgtgctttattagtctctgtttatgtatatgtatctttttttttctgaactgtttgagcaagttgctaacatcaggctcttttgcgcctaaatacttaggtgtgtttttcctaaaaacaagagcattctcttaactgacctacacaatgattaaattcactctctaatgtgcagtccgtattcaaagttcaccgatgtcccgataatgtcctttatagattccaccccccaccaccccaatctgggatccagtccaggattatgtattgcgtttaatcatcatgtctctagtttccacaaatgtagaacgttcctcagactttctttgtctttagtggcactgggagttt

SEQ ID NO: 10827 - DNA, 1225 bp, Homo sapiens
atgatggagggaggcccagtgcgccctcagtggctggccagggaggtgctcccatggtggtactgattgtgcggagtccttaggtgaaaagcgcttctctgggtaaaaggtgggcaggaacatctaggtctgagggtgcccccaaccaagatggaactcaaggaacaggaggaggtgagggtctgccccagtgatgtgtctgcatctctcttacagaaaggaaggcagaggaagccacggccactggaccctggcgagggttccaaggacacagacagttcagcagggcgacggggcagcacaggcagaaggcatgggcgctggcggggccgtgctgagagcccaggagtgcccgtggccaaggtggtacgggcagtaaccagccggcagagagccagccggcgggtcccacctgccccacccccggaagccccaggccgccagaacctgagtggggcagcagctggggaggcgctggtaggggcagctggcttcccaccacacggagatacagggagcgtggagggcgccccccagcccacggacaatggcttcacccccaagtgcgagatcgtgggcaaggacgcactgtctgcactggcccgggccagcaccaagcagtgccagcaggagatcgccaatgtggtgtgcctgcaccaggctgggagcctcatgcccaaggctgtgccccggcactgtcagctgactggtgagggacaggggtgctccagcccttcccaggcgggggcaggggggtggcatggcccggatcctcacccctatctctctgaggaagaaagagccaaggggatcctacctccctgcctaagtcttcatccagtgtacttactaagtggcagaggcagagtggggacccacgagcatggagctccaagtctaggtttcttcggaaggcaggcagctccctcttcccatctcacccccaccctgtgacctagggtgggcctcgccaacgcctgtcctctgctctcagggaagatgagccccggcatccagtgggatgagagccaagcccagcagcccatggatggccccccggtgcgaatcgcctacatgctggtggttcacggccgcgccatccgccagctgaagcgtctcctcaaggccgtttatcacgagcagcacttcttttacatccatgtggacaaggtactgtggtggggagaggccaaggggtctgggatgagcagagcagaaacagaag

SEQ ID NO: 10828 - DNA, 1222 bp, Homo sapiens
acatggggcaccttcaacagaggcaatcccagccatggcctggtcgttatgattggagctttttcttttcggggcaggagcagcagcagcctaggtccctcgtcactgtcctaggactcatgttgaaaagggttgtccatcctccctccctttcccaagcctcctctccccctcccactctcctaccattgacagccggagctcggtatcagtccttcacagcttgcttaatgtgggagcaagggtgaaggtttctagacctctaaagtcaccctatcagccagccacactgagctcagcttggggaacaaattcctgcccaggctgccacatgtcaagttctcctagttgccaggagggggcactcctgacaaccaaccgataacagcactggggtttttgtcagctgccgtggtgctaaccatgcctgtagtatctcaatccttacaactcttggagggaggcatttttattatcatcatttagcagatcagaaaactgaggcttagagctgtgaaatgacgagcccaaagtcacagctaactatttgatggtggcagcagccttcagaaagaggcaggaagcctccagagccactcagtcactacactctccggctcgcataagagcctggctgggcaggtaagcaggaaggagctaatggcaagaattcgaaggaaaaggtacttaggttcagaggctaagataattcgttttttctggctcctgttttagtgaacatctgaagctgtaccctggttctccagaatgttgtggtttttgtttcccaatatcaactctcaggtcaataaggaggaaaaattaacaactaggttcagcatattaggcacaggcagtaaatattagaacacttagactctgctggccaagagctcacaaactagcctgtgggtttaacctgggctatggctgtgctgtgttaggctagcacaacggttttcaaagtagtagtagtatttttagagacagggtctggctctgttgtccaggcacgatcacgatcatagctcactgcagccttgacctcctgagcgcaagtgatcctcctaagtagctagggtcacagatgtgcacgaccatgcctggcatgcatgcattctttatttatttatttatttatttatttattttatttatttatttattggcagaacaggggtctctccatgttgcccaggctggtctcaaactcctggcctca

SEQ ID NO: 10829 - DNA, 2485 bp, Homo sapiens
gccagttgcaaatctacccccttcagatccaagggaaaagttgtttctgtttcggtctgtggagacattttttctcttcagggcctggggagtttttgcttgaggaaggaatgtaggtagatctgcacggaggagactagcagagattagtatagagcaggtctcctctgactgaacttgctttgtctactgttacttttcctccagaatctaagtctggctcccgtccccgcaagccaccaccccggaagcacactcgttcctgggctgtgctgaagctgctgctgctgctgctgctatttggtgtggcgggagggctggttgcttgtcgggtgacagagctgcagcagcagcccctctgcaccagcgtgaacaccatctatgacaatgcggtccagggtctacgccgccatgagatcctccagtgggtcctccagaccgactctcagcagtgagcttgtccccagcacctgctgcctcccagccttggagtttggattcctatggaattgggttctgctggacacaacctctttttagcatcagacctacctgccatcatcaaatggctgcagattggtacatgagacctcctctttgtaggacttcttcattccttagtcagggttccctgaaggaatgaggagaaatgggaggtggcgggggggcgtggggggcagttacctgcatgcctaaaggagtaggcttgggggtggggagagagaaaacatagccttttctagttgttatataaagctgtgtaaaggcaaggctcgtttctactaaatggtcagctgtcactacatttatacttttgtatgccacaaaccctttcattcctccctgggaatcagggtagatcaggaggaactgggggggactagaacaccacgctcagtaaatccagtctaaactgggaggtaggggtattcctgttttctttaggacctcagagatgtaagcattttagcagccacacaaaatctctggctatgaaagggacttcatgaccatccagtccaatataacacttgcagacagagaaactgaggtcttccatgacttgcctagtctcccagctagtttgaggcaaaactggattcccactctggtattctttcttccctttacatcattttccctcctttataatgtcctgagagaccagaactcacaccagaatcgattattcctcaggtgaagcatagactctttcatggtagacagatttcacgactcagagatagaaatctcttgctatcatcaggtcacgggcagctcctgtggagtcctgcccaacttatgtggcttccataaaatggcaacagtccaggctccttgcctaattttagagcattaactccctaattgccagtaagcaaggaggtggatctctgcaaacctacactgtctatgacagctctagttgtacttggtgtgactaaatacctcaaaggcaacctgcttctgcaggttttgaagtgtcagcttcataagacactgaggtttagaattgtttgattctagaccataactgaagggcataaatggaaacaggatatgaagggaaacaagtagcatcatggagctgaaaagtggtgcatcacccaatggctagcacaaacaaggatcacactgtccattctcttgtctgctaaattaagcattttcttgcctcctttgcttcatcttttcacaacagctggatagagggatcagaaatgactgtgtcatggtgctcattcactgcaaactcccagttgcaagctccttggctcccccggagggagcaagaatctcatagttcagagacacagagggccttttagccctaatgaccttttggatgggactgcaactcatgactatcctgatattggaagaaaggactttgttaatcttctcccccatagctctgctgcgtaggtctacatcttactcagaatcactacacattcctttagtcttcctccaagctccagagccattggtacaaatgctttattgaaactaaatacataatacacacaatgagatgaagacaatatagaagtccgcatagtcatcataatcccgttccttggccggttgaggcagctcagtggctgagcccagtcaagccaacccgcagcttcactcacgacttcaagatttgatgctaattcttttggatttctacagttattaaataagtgtctgagtggactgtctttgttcctttgtgttttgagggctggctgggtaggagtgggggtggtttgtctgtggcagtgaatttttgccaggagaggaacattaaatgccaaaggtaggtggcagtatttcagtctctgccccagccgacaggcagagagaccttcacaaataataagacccaagaaagactgggcctcacctaggcttgtgttccaggaggtgctgccagtctcttcattacagtcaggctctgaggttggggaagtggaagtttccagcttttcatcct

SEQ ID NO: 10830 - DNA, 1027 bp, Homo sapiens
ttctcttctcacttgtccccccataccacattcatttctgaagcttgggaagataggagtcccatagaaaactgccatggttttttctcttcatagctgagttctagaaggcaatcagttgctatgccttctgagttagtacctaattctagaggagcaccacttatccctcatgcctttcttaggtcctccttgttattttaccctaatttctctgctgcttgaggataggaacctcgtaatcagaaaccattcagcaaaccctgagagcagctgcttttggggagggctacttccaggagcagaaggatggctgtttcctttgaatatttcttatgtgaaccatggcaccagggtaaaggtggcagaatctgtacttttaatcacttgggaaagcaaactgctggagtgtttgtgagagagaagtcaaattttggtatgttttgttgtagaggcagagaagaagcgtgaggctaagcagcgagctaaggaagctcaggagcgggaactgcggaagcgggagaaggcggaagagaaggagcgccggagaaaggagtatgatgccctcaaagcagccaagcgggagcaggagaagaaacctaagaaggaagcaaatcaggccccgagtaagttttctgcctgttgtaagattccagcaggggtacagtggagacactcatgtttccaggcatagacaactggggtgagcaggcctgcaaaccttagataaagtacactctaaagcttgggagtggatgagaaggtttggttacggggaatgggggactctcctagggaggcagtgcccagcttgtttgtttctccagtgcccacatacttctgtgcaggtgtttgggtcagatgtatcttgaagcattcccagaacagagtctcacttttttttagaggtgagggtctaaaatcattgagatatgcaaaaatcacacacatggtcaagtttcctttttttttttttttgagacagagtttcactcttgttgcccaggctggagtgcaatggcgtgat

SEQ ID NO: 10831 - DNA, 2525 bp, Homo sapiens
tggggaaagcacagatactggacagatggattctagtgtgacttgtgactgtgaggtttcctataacatatttataaatgttactcaggttaaaagtatttaagaatacagttaactaattgtaaatatgctgttaaccaaaagagctttccctccctcactttttcctttgtaaacactcatgactgcttctctgtctcgagtcatctctgcattaactccccttcgtggtcactagagggctctctgatgccttctaaaagaacaactgcttttttacaatgccccccacccccaccccgcccatagagacagggtctcactatgtggcccaggctggtctcaaacttctggccttaagtgatgctcctgtccttggcctcccaaagtgctgggattacaggtgtgagccactgcacccagcccactttttttttactctgaagtgattccagtcatatgtgtgtgtaactgcatcctatgagaagagcacaaatattgctgttccatgttctccactttcattttccactacaaatgaaaagcaatttttgagactgaatctgttgctattttaaaggttattgtgggaaactgagctaaaggagttagcatctttatttttgtatcaaaaataaaggttattttgaaattattaggatttttacacaattctgaaatctgttgcttttgtaaacaaattgtttgatcttagtgatccccctactactaccaccaattcacttcacaaagtcagttatgagtctaccagactttgttctgaaaaatagaaacaaaacacctgattaagctcttgagtatggcataggaattttttagaagaatgcattcaaggattcttttcctttccttcagtgtcattaatgttaaaagagcagccactgttttgttgaaacaaacagcttaacttcagaaataagaactagcacacttagacaaacaggagagcaggggtttgaagccagctgtcgaagagcatccctgctgtcttaagaagctttttccccatagtgcctatagtttccaaagaaactcaacttcctaactgtgttaacttaattttattagaacactacagttgagtgagaacgtgcagaagatgtcaacagaagagaatgttgtgctaagataatggcctcctgctgctgcctaaatgctgaaatgaggttgagatgtttttcaaggctaacttcatggactcactctgtttagtgacttaattgtatcccaccaattactgctggtgacttactcacccttgtacagtgtttgcatagcagagtgaaggttacttattaccctctttctctcaagtgctttaaagaagaaacctccctggtgtttcttttctttttttttttgagacggagtcttgctttgttgcccaggctgaagtgcagtggcataatctcagctcactgaaacctctgcctcccgggttcaaacgattctcctgcctcagcctcccaagtagctgggattacaagcatgtgccaccatgcccagctaatttctgtattttagtagagacaaggtttcaccatgttggccaggctggtctcgaactcctggcctcaagtgatccacctgccttggcctcccaaagtgctccgattacaggtgtgagccacccggcccagcccctcccttgtgtttcaaccaatcggaagtgaatttaactagatgtagtaaccttttttttctttacttctaaaacagttacagtttactaataaagttaagtctggttctgtcctagaggaaataaattcactattaattcatgtcttaagttacttgggttaaaacactttcagccacccagattaattaaagtggagcagtggagcccctggctgggagatggcctccagaggagcagctgcagggcatgttctgggcttagcgacagaggcaagcaagggactggtgtctctggtgagaggtgggtttgatgtatctctgtcctatgctggtctctcttctcctttataaaatcctctgtggtcaactgactactgcgtatcgcagtggaataagactgcacagttgctggtaggtgagtttaaagtcttaatctatgcattcagagaaatatttttatatgctttgtgtaatttataacaaggattttttttttagctttgttaactgtgaattcacccctcctcctccactgcatatttaaagcatgtgttcacactgtgtgtaaacattcactgaagattttttctttgtgcattgctgactgttcaaacataacaagtattattaaaattaaatattaactgaccgatcctatatgccttcattttggcttcctaaacagcactacagttctaatcatagggggttcaaattgttggacagtcccagagaccagaagctctgcaggaaaattagaagggccctctctccacctgagcctcctccacatcccgttcataccctgtcagtagcacctggggacggatattttgtgcggcgtctttccttccagttca

SEQ ID NO: 10832 - DNA, 1195 bp, Homo sapiens
tagcttttattagtagcttgtcatttggctcttttactgtcttttttgcaaggagtttcatattttacagatacctttaggtccataattgttaaatctttttagggtaactcacatcctgcccatgccttctttccaaccttcttccctcttcccctgttcatgtatagtttgatacccaaacctgttcttaagactttgcctccttagctccaatggcagaagtaaattatccttctacatagctggaatggtttcccctgccttgctcttactttgtgaaccatagccttagaagtacggacgacagtgcaggaaactgccccagcagaggcagagctgggcctgagcaaaccctgctggctgcacttggttttcccaccaaacaggtctgttaatcatgcacagacctttggcatgattaagtataaccatcttctggaaaagatcttaaacaacatgggctgtgctgtgccagaactattcattaacatttctccttttttttctagagctggtactcaaggtgagaattcagaacccatctcttcgagaaaatgatttcattgaaattgaactggaccgacaggagctcacctaccaagagttgctcagagtgtgttgctgtgagctgggtgttaatccagatcaagtggagaagatcagaaagttacccaatactctgttaaggaaggtaagaaaagtctaagcatgaatggctgctttttgcatttgaaaaatacctagccccctccttggttatatgaggtagttgagggaataaacaaagaatagaaaaggagcaaagagtgattttccaaatgtaatcatttccttctactgagtctatagggacactggctttttttttttttttggcaagtcaagtgaagcagtggagtggagaaggaacaaagacatctgtaactggtgtttggccagttacagtcttacaaactagttgtaaacaccattgcattcagaccagccacactggcatttttggaagttgataccagagagaagtttctgaattatcattcacgtgttcctattttcggtttctgtagtgagctgtgaggattaacttagtgcactactagatgtgccttctgttttacaagtgaaggaccaagttcagttacagagcaaatcacatagatgcatgtgtggtccttcatacatctctgggttt

SEQ ID NO: 10833 - DNA, 1109 bp, Homo sapiens
ctttaagtgataggatgggttgcgagagcggaatcagtgaataaaatagttccatcttcggggcaacttctgtgccatttcccacctgtctaggaaatttcacccaacctttttacaaagttagagtacctgatggtctcttaagtgcttgtctcactgattccgagaaataaaatatgaaatcagccatactgttttaattataattacaaattgaagaagagtcttaaagagcacaacgataaccatcttagcactattggagatgaatttagaaagattttcaataatttttagttcttaagatttctaatgtaaatatgttttagagggtaagttttgcctagtcttgttaattaatagcatctactccaaggcctttacttattgtaatactggctgaagttgccttttggttttaaattattaagaagtagagatcgacgaagaagcagaagccatgatcgatcagaaagaaaacacagatctcgaagtcgggatcgaagaagatcaaaaagccgggatcgaaagtcatataagcacaggagcaaaagtcgggacagagaacaagatagaaaatccaaggagaaaggttagtttatatgagaattcagttcattaagaaacttttcacaccctaatcgccccactcacttttctccagacacaggcaaagatccatttcatacatactccttttcactttgaggaatgccattcagtaggagacaggcattctttccccctctcctacttagatttgtgaaaatgacagtttatctggtgttttcttagatgttaaaaacatctttcagttgataaacctgaaggtttttaatgtagcttcttttaagtgttatattacctttcggggttattaggtgtaggatttattatattaccttggttattggctccttttttttttacacactgcagtgtttcataatacgtcttataaagtgagtgtacattgttgcattaatcttcatttgtagcattcatttaagttagtaattaacatctaagtacctagaagttgaattgcttacatgtgtcttacccacgttttcaatgggatcaacatgctctttcccctttactttttc

SEQ ID NO: 10834 - DNA, 1908 bp, Homo sapiens
agcggcccatgaaaagccaaattaaaaatcaaggattcagtcaaactaagcaggtactcatgccaggtactcctttctctacccacatccatgtttgaatgctattgcctgtgatctttacgcttaactgttgtgtatcttttttgttctttacaagaagtgcagaggggttttttgtgtattgcgtgaaaacttataaaacaaatgttaacagaatggaattttttttcaactgtatgtagggctgcagtggtggccagaattagatatctttaaagaattttaaatacaataaacacttcatattattcgccttgttacactcaatgcaattctcaagtctataagaggtatgtgcttaatatttcctactgtgtaggagaatttgcagtcagccataggtatgtaggaatagtcactcactggctgatacatttaaagcagcagtgtgaatagcaaggacagacaccttcaatttgtgaaatcaaagaactgatgcactatatagaacgaatttgggtttttaaagaaatattaaaagttaggtactgtaagtgttcttaaaacctgtaaacttcattctgtgggctagtggtgtgggacaaaatattcctaatgaaaggaagtaccaattagttgatttgttggtggcattccccttttgggaaagcaatgtaaggttatgtctgtgtatgtcattcacacttaggcaagcatacacaggcacatggctttaagaaccacactgatgccttgataattaaaaagaatacaagcattccatgtacacatgttaattagcagttagtgactgggccaacactttctcataaaaattggccttttacatgttgtctaattatcatttttccccaaattttgcgttgtaggactactgttcgaagatttttggaagaatactgagaacggcataaagtgaagatcgacatttaaaaaatgaggtgaaagaaagctatagtggcatagaaaaagtataaagctcagttagtttttttattattattattattaaaagttaattcaggactgatgtgacctaccagatttcagaacatgtgttaatagtatatatgccactgaaaacttaggtcctgtatcatacttttttctttaagactttttaagaaatattacttaaacatgtggcttgctcagtgtttaattgcaagttttcaatcttggactttgaaaacaggattaaacgttagtattcgtgtgaatcagactaagtgggatttcatttttacaactctgctctacttagcctttggatttagaagtaaaaataaagtatctctgactttctgttacaaagttgattgtctctgtcattgaaaagttttagtattaatctttttctaataaagttattgactctgaactagtcccctgttttaaatacaagagttacactattactagaggtgttggtgtacagttttatctgatttgttctgtttaagactaatttttatagactttctaatgttttaaataatggtgcttcaattttaggtggttatgaataaatttgaattttgcttttaatagcaaagatgtgcagtgaactagaatatatttttacatccctgagagattcatttagtagaaaattccaagtatcctgacaagcactctttagctggctagctatgggatgatgtagaaaagcattcaagagctagtttttgttaagtcctgtatcaagattaacccagctgtgtcagtttataaatgtatttgtgtatagggtgtgtagtatatatggcaagggttttttccccccacttaagtgattatttttgtgtcacatctaggaaaaccggcagcatgtttctatctatagccagcttcttcgactgtataaaagtattctctccagctacg

SEQ ID NO: 10835 - DNA, 1719 bp, Homo sapiens
tttttttttttttgagacggagtctggctctgttgcccaggctggaatgcagtggtgcgatctcagctcactgcaacctccacctctcaggttcaagtagttctcctgcctcagcctcccaagtagctgggattacaggtgtgtgccaccctgcccagctaatttttgtatttttagtagagacagggtttcaccacattggccaggctggtctcaaactcctgacctcagatgatctacccgccttggcctcccgaagtgcttgaattacaggcgtgagcccccgcgccggtccgaagcaaagctaaatgtaattttatgtactgttttaacagtataaacctatgggataaaggcccccaatcatcagaaggactactgaaaagaaaagaaagcaaacgtagatgtcaaattgtctaaacattcttaagtaccactgattttttttttctggactattatacaaagatgtctgtaaaaagtataccagtggcttttatgcatatacacgattaggctagattgtgaagtacatgggatttcatgagccagaggaggcatttggatccattgggccacatgtgactataagcacattgtgtacacaataaaattgtagccactcatgtattaaaactgttttggtaaaagctgtattaaaagaataattttttgcttgagctacttagtcacttttttgcagggcaccaaaatgtaggctacttttccatagcttgtttgctatgtttttatttcatcttaaatctgagccatttttggcaatatcttttaaaaaatcattattaaacatttattggaaatgttgtatagattcacaagaaagagacaccaaagtgtttgggaattttaatcccaagaagtaaacatcccagagtcagatcccatttgctgttgttcagccatgtttgtatgactgaatgtaatttaggaaatcaggagttagagatgaaaaatacaaacatgtcaaatggttgtaattgctttttttgaacttactggctttaacttaagtaatataggtgtgtagttgttttatctaaagatgtcagattatctgtggccctgttaattaactgcagggaccagagagaggacaaaaatgcctgtataatttgctttaaaggcttgtccttatgtttgtaatttcagttaaatattttctacagattgcttcacttcccctttcccccaataacaagttcatattcttgtaatgtttactttggtcaacgtggtaatttttggaagaaaatgccaaaatgtaagcttctcacaagcagcaaaggaatgtaactgcctgtagctaccacatcaagggagagaagaggcttgcgtactttgggttgatctcactgtacaaaaaaagtgtacccctattggaagaaataaggaatacttgaaggtttctcctttttttacacttgagtcatgtgcaaggttgaaccatatgaaattgccagtgttcaaccattgctgatctgcaaaagcgacaatatcatatgcctcaacctaacacttactcttaaatgcaggttaaaatctctgtgaggcaaagggataatattctctaggaactcacttttgagagtatttttctctaacccatgtggatctaaattttaaaaataggaatgaatctcttaattgcagcttgtggagagtataaaacattttgagcacaatatgcagcacataact

SEQ ID NO: 10836 - DNA, 1328 bp, Homo sapiens
tgagtgagcccatgggaaacaggtggagatggggaagccgtctcttctgcatggtttattttccctctatccttttatttaatgctcttttgtgagataagtttcaccacataatgtgtgagcattttttcctgttaactttatattacaaaatccgttctaccataacaatacagaggaactagctgtgttactgcaccagtgttataggtaacttcagtatattatgaacaaatcaaagaatgtttacttcctgcaaactggtgaattatagaaagcaatccagatgtggtttactctgccacagtctaatgtcattcacttcatttgatggggtcacttgttagctgtcactaataatggaattaatgggaaacacttgataaatgaaactgtaccgttaaatacaatagctgagttttccccagtgtattgtaaaattgacacacactaatacaagatggattatcaggatgtatctaaatgtcccgagagggttaaaagctaactgtaaattactttaactttcactttcaaatctgacaaatcttgtttatatggtatataaaactttgttttcatcagatttgggggggttttatattaaagaaattaagactacactatttaaataaacgtttcctgtttctgacttattagagctctaaagtttatgaggcctacttctctgaatattctgatgggttttttttgagaccagtctcattttcatactgacatgtctgaaagatttattatttataaagcttaggacatactctgggaagcttagaagatacttcagcactgggaggattttttaaaggaaatgtgttttgtatttcttgtaccagagaatggtgatgttgattgagttttttccatgtaaaaaatgtacttgtttgccaaatgttcctagattgctcttaacctgttaatacaagtaaaactgtagtggggatggagtctggcctaagtacagaatgagggatttaattagaaaagttattttcttttgttctgtatcaaactgcagaacagctatatacttggtattttgtacgtgaataacgttttagcttttgtgcccttttgagcttgaagggttatcctcaaaggggaaaactatgaaggggaagaagacaaacctaagataccataaagtaaaggttgacattacatattttcattcacaatgcccattaaaaaaaaaaaataggttgggcatggtggctcacgcctgtaatcccaacactttaggaggctgaggcagatggattgcttgagcccaggagttcaagaccagcctgggcaacatggcgaaaccc

SEQ ID NO: 10837 - DNA, 1341 bp, Homo sapiens
gcagactccaagcctgggaccatccgtggagacttctgcatacaagttggcaggtgagattttggtatttttcccccttttccaaaatctgatttagttgccacaaggatttgggtttccgaggctggaggtagacatgataccatatgcaggttgattttatcggagtttattgttttcctccctcttaagttggcgtttggctttggttgttaacatcacttagtcgtacctctgttacacgaagtgtagaacctggtacaacacactttgctggccagtctttcctgaaggctctcactgtttgcaccagcgtggccgggagggctggatgtggggagggcatttttcagccttaagtgaatggccattgtaggctttttcttttaacatggtctaatgtccatggagcttcagcttttatgctgctgtggctgtagatttctggcaatgggcgcattttaatccttctggtcttggtcatgtgactatctctttctccacccaggaacattatacatggcagtgattctgtggagagtgcagagaaggagatcggcttgtggtttcaccctgaggaactggtagattacacgagctgtgctcagaactggatctatgaatgacaggagggcagaccacattgcttttcacatccatttcccctccttcccatgggcagaggaccaggctgtaggaaatctagttatttacaggaacttcatcataatttggagggaagctcttggagctgtgagttctccctgtacagtgttaccatccccgaccatctgattaaaatgcttcctcccagcataggattcattgagttggttacttcatattgttgcattgcttttttttccttcttttcatgtacactgaataacctgacctaatagagagtgtaaatactataaaaatgatttattttgaggtctcacatacacacaggcattctttgcctgcccttcttaacccccgcatcccttccactcttggcactgagctattcaacaggcatctatggagcatgtgctacgtggccaagactggactaggtgcagaggattcatcagaaatgaaagaaaacatgagggctgggtgtgctggcttgtgcttgtgataccagctacttgggaggctgagatgggagaccagcctgggtaacatagcaagaccctgtctcactaaaaaaaaaaaaagaaaaattaggctgggtacgatggctcatgcctttaatcccagctattcaggaggctgaggaggagaatcgctagaggccagaagttcaagtccagggtgggcaacatagcaagacgctgtctttacaaaaaaaaa

SEQ ID NO: 10838 - DNA, 1341 bp, Homo sapiens; identical to SEQ ID NO: 10837

SEQ ID NO: 10839 - DNA, 3231 bp, Homo sapiens
cttttttggtaacattaaagtttaggtagcaggattgaaggaaatgatttaagaaggatatagctgttaaatgcaaatgaactgtcattacaaatgaacctttttggtacctgttgggagattttgggatttttagaagttaggccagtcacatctccagcttcttttgctgcagaaatatgcaactgaactcctcatggaggggtcatcaccacaaaggtcatggaagggtcattatttctcttgttggcattttattgcagcccattttaaatgtttgtacagaaatatttttcattctgtgaaaatttatttggagttctgtatgaaactggaagaactctggatacttttatatgttctcttttaattaaaaaaatgattagaattatcctaacactaaagtgttaaactggaatggttgacaagatattcaggatctcagtctacacattgaggggttggggaaaatgtaatgttgtccttagtttattttcctttctaaaaaaaataccccacgaaagggattctgatcagttctctgccatttccctctatctgtgaaataacagcttcgtataaccacaaccaaaaacagatgttctgtattaggagaatcgaattgaaagttattcaaagccaaaataagtttagatttcaaaatcattccagctctgcttttatctatcctggatttggtagaaaactaatttgaaagagaatttaattttcttaaaattccatatatatatatatatatatatatatatatatatatatatatatatatatataaaattgtctttaattgtattcaggatttattttaataataaccgatttggaccattttgaacattccctgttttaaaattcatatgacttccttttaaaaaaaaaaaaaggatacaagggtaaactggtgaaaggtttgctctctgcattttctaactttctactgagttgtgactgaatgagagcgctctagcgtttaccagtgaggttcataaactaaactctcaggaattaattgcatctgttctagaagtgcttctgggtcttagcctggcctcttcagagtggtaatattgaccatctcctctggaatataggtagggctaattagaaattaatcaaaatgattaacctctacagtccttcagcctatggaatgctttaaaaaatgttaatggaaagccccaggagaccattttaggtaagacttttgtttgaattttaaaatgcatagaacgttaaaaaaaaccagcaatttattttctaaaatattgctctacttttgggaataatagcattggtaatacgcacaggtttacctcattctatgcaagaggggttaataacataaggttttataatagctactggaagtaaaatttgttactttatagtgtaagaatgtatggaatcgcatgtcaccatttcttaatactgactctttaggggcataaatgcagatcacatcaacgcaagttgattctcatgtgtcaaatatatgtgaattcagctgttaaattactggatatttatcttaacattgctgagagggacctactgtaaatgtgacatcctcacacttcccatatctttaactttgaaaaatcttcttgtaaacttaaagcctagaagtattccaaagcaagggttagagcagtctttattctcaggctcactgaattaaacccaggactaattccacagcacaggcacaagaagcctgttgtgtagtgtactctgccagtaccttggatttaggagctccatggggaactgactaaaccaggagagagaggatttggagctagtcagtcctggtaatctatgaaatgctcatttatacccaggtttcataagcttccaattctatagcaaacccaggctctgagtgttttagaatttcctaattcatgaagtgtttcttgtcttgatcccgtgaccaacagttgaaggttggtaaggacttttctacagtctgaacacaacctaaagccctctttcattgttcacacactaactcctactgccgacgaaccgaaaaataattaatgcagaggagatttatgtcttagccataactccagttgtacaactcaatcgccccattctcttttacggttcaaaatgtactgctgaccttgggtttgtttttgttttgttttgtttttcctgttaggatttatttggggacttttggtagtttaaactctttaaccttttccttgccgtgtatgaggaaagctaaagctgttatcaacttcttattctacgatactaacacgggttttcagtgtttgtttgtttttattattattattaattttgcgtgatgtgaataccctctcccatcaatatttgtattatggtgctatatattggtaatgatcctttaatattgggaagggattttaaaaatactgtgattaaactgggtttcttcctttgattttcatattttaaataaagccacagtcatttatacaaaagaaaagcatctgtccctgggcaaatcttttgaggacagaggtcaaagtaaactgcataaggtttttacatcatttctgtatgtatttgatatatagatcaatatctgtacaaatttaatcttttattttcttggtaactcgtgatcattgagaaagtgtttgaaactttctcatgaagtgtatatataatggcgtgaaaaattcctttggaaaaatttatgttcctttcatttttaccaaattgcaaattttcagcatggatgtgaaaagcattaaaattataactttgtgtacaagatgaaaataattcactaaatttgcccttttttacacaaaataaaatgttaaagttaagctggatttgagcagttctttaatatgctttggtttggggggttgcttttctattgcgtgccctctataagcagtcagagacccctatgaaagttggatcagccccttcctcttacaaggggtagcaggcacatgagtgctgtaaggaagaattttccactagctgccaagggagccaagagtagtatggttagacatatggatgaggttgcattggaggtgggatttcatgggcagggagggaaagggcaaaaaccacagcaggagccaaggtgaatagggacctttatggggaaattaaatcatcttagctagaacatcgtgttttggggttggcatgcttagtaggagacttttttttttttttttttttttg

SEQ ID NO: 10840 - DNA, 2204 bp, Homo sapiens
ataatcccagctacttaggaggctgaggtaggagaatcgcttgaacccaggaggccaaggttgtagtaaggcaagattgcaccactgcactccagcctaggcaacagagcaagactccatctcaaaaaagaaaagaaaaagaaattatgggtacaattgaaatacatgtaaggatgccatgctctgaaaacagttgaactgtttgcactgaacagatggttctcaaagtttggttcatagaccagcagcaacagcatcacctgaggacttgttaaaaaggcatattctcagttcccacccaagatctacaaaatcagaatctctggagtgagacccagccatctgtctgttaacaaaccctgcaggtgattgtattgcagatagacactagtttgacaactgctatcagatgctgtattgttttatttaattttattttcttattatgtagtgatttatttctgggtttcaggttacaatgcccttttaagatatgaaggatttgaaaatgactctggtctggacttctggtgcaatatatgtggttctgatatccatccagttggttggtgtgcagccagcggaaaacctcttgttcctcctagaagtaagtagtttatttacccttaccgtaatttttttatatgtgtactttaatgctattttacacatagtaatgttagagtaatatggaaattaaaggccgggcatggccgctcacacctgtaatcccagcactttgggaggccaaggcagtcggatcacttgaggtcaggagtttgagaccagcctgaccaacatggcaaaaccccatctcaacttctccctagctgggcatggtggtgcatgcctgtactcaggaggctgaggcagaagaatcgcttgaaccggggagatggaggttgcagtgagccaagatcacgccactgcactccagcctgggcaacagagcgagactccatctcaaaaaaaaagaaagaaattaaaatagtttttttggtgttaagcagctttttgctggcaaggcatatacttgctttctctatatttgttacttttcagaatgttaatagcctgactttgcaaggaaatttgttacttttttaacaaataatttatgaagcagttcttttttgctaaagtataactgattatttcttctattttagctattcagcataaatatacaaactggaaagcttttctagtgaaacgacttactggtgccaaaacactgcctcctgatttctcccaaaaggtaaaaaacaggatcttataaagactgaagagctctaaaaaacaagggtaacagagaacatttttaaggaattggtttaattttgtgaaccagatgatctgtgttacatttcaagtgcattcagtattttttacagtataatacaaaaatttcttgtagacctttgtcatgaatttcgagcagttttttttgtatgcttttaaggtttcagagagtatgcagtatcctttcaaaccttgcatgagagtagaagtggttgacaagaggcatttgtgtcgaacacgagtagcagtggtggaaagtgtaattggaggaagattaagactagtgtatgaagaaagcgaagatagaacagatgacttctggtgccatatgcacagcccattaatacatcatattggttggtctcgaagcataggtcatcgattcaaaagatctggtaagcacctatcacaagaactcctgtcaaaagcatcattgaggctgattatactagttggttatttttctctgcagaattgcatagatgaaaaatagcattctagttgtttgggctgcttcttctaccttaattagtgaaggttcacaccatattagtgtcctaataaatttttttatattccttccacttgttctccaaaagaaggaacttcttctggtcacaactataattgtttctttcttttattattcagcccatttgaaagatctaaagatacctttccctttccattcaattttaatcaaaatagcaagattaaatgtggttagacttaatactaagcacatgaaaacatgcttctaaagttgtaattttctaactagggaattacattaaaattatgagcattaaaattggctgaatgtatttaaaagcatatatgcacatgtactctgaagagagaaaagactattaaagaatattcaccccaaatgtagaaggcat

SEQ ID NO: 10841 - DNA, 1208 bp, Homo sapiens
ccataattaaaaagaaaaaagaaatctgggcgaggcacactggctcacgcctgtcatcccagtgctttgggatgcagaggcaggacatcccttgaggcagggaggtggctcacatccataatccgagcactctgggaggcttgagtgggcagattgcttgagacgaggaattaaagaccagcctgggcaacatggcagaaccccatctctacaaaaaaaaaaacacaaaaatgtttatgggatggtggcacttgcctgtagtcccagctactcaggaggccaaggtgggaggatcatctgagtgcgggaggtggaggttgcagtgaccgaagattgtcactgcactccagcctgggtgacagagcgagactctgtctcaaagcattttttaaaaaaagaaaaaaaaaagaaagaaaatggttatttctcagggctgcgttttcatttatcaaatctcatttaccagaatttgtgctagggtcttttagggggtgtgtatgagtgttgtgtcatgtgtcactggtttctcttacttcaaagactgaacattcttcacgatctgaaaggaaaagaagagattctttcgggatgtttgacggttatgatagctgcagtgaggacacaagcagcagctccagctccgaagagagtgaggaagaagtcgctcctttaccttctaatctcccgattatcaaaaacaatgggcaagtctacacatacccagatggtaaatctggcatgggtgagtatttataaccttcacctgttctacagctttatgtttaagggtgtgttttcatttggtttcttctgtcatttccccttccttagaattattaaggggcagtttgaagagctgacgtttataattcgagataagatcactgagttggtgtttaactctttattttgcctacctcctggtggaaagcaaatacaacaacaacaaaaaaaggccagtgagaaacttcatgtggatataaatttagtaattagataagaaatgcctctgtaactgaaagtataagtgcataggatcatgggcttataaaattgaaagagacattcgaggttgggctccctcctctatattaatttcttataatttccgttttaacataactggtgcttggatattctctgactcagtaaggaatttctctctgcctaaaatctggcttgaaaaagaaaaaggaaatgaaaaagga

SEQ ID NO: 10842 - DNA, 1189 bp, Homo sapiens
atatttcttgtttattcgtttacatcaatatagactcatgacttcaaattttaatcaatttattactattattttttaattctgatttcaaattttcttagacttagccaatagaagcccctttatgacatgtttccatcattctttcatcacttccttattttctggcactacaatgtgccatgcttatcttgtattttcctgacctgccttggaatcagccttctctgccacgaattttggtttctttagtggaaagtggcatttagaaaaaactctgagcactagaagtgttcattactagcctctctcagcagagaccctagaaaatttttgtgtataaacaagtgtgcatatgtgtgttcaacagcaggaaatctggctacctttatcttcagtgtatgtacttacttgctcaattccccccatatgtaagcaaattactgtggctgaaagcttggccctagaaaagtgaattcatctctgcctggtatgtcagcccaaagctgagtattaaatatgctgcccactggacaccatccaaacactcagcaagacaaaagtgacgaggaagaaagaaagagaaaagtgtatttaggaagttcagctccagacattttagaaagggtaggaggaaggaggaaaggccagttaggaagtttggttctagacacataggccctttcacctacccttttcccaagctcagcgcatggataggggaagcaggcttagaatgatgagttaacttgtccaagcctaatcggttgggtagtggcagagctggagtttaagcctggattttttctgactccttacaacttgctatttttactgcgtcttgtagaaagcagctttgcaacggatgacaacaaaacaacaacaaaaacactgaagcctttcttttctatattaggaaatatttctttacttttgtctcaggtaaaaatcatcattaacgtggttagatgcctatttgtaagatggcatatttgaagttatttctaagctagaacaaacagcttagacagagttgagcatagtaggattggggtcagagaccgaggttataacctggatacaaggagttcttatgatgatgaaaggtctgtcaatatgcatagatacaataacaatacaacattgggagatgctgaaatgaatatttttttctctaaagctttaaatg

SEQ ID NO: 10843 - DNA, 1207 bp, Homo sapiens
tttttagtttactatttgtgtaagcctgcccctaacaagccaaaaattagaagattttatgttgaacctaattcctatcaacttcagttctgctctcaaaggcaagatgttaaccaaatataattcatgttttagagtgtcacttgtaaatctgatgtagtaggattcttttgccattttacatgtgccaaatcatataaactaagaaatagtttgatttttggttctaggacaatgtcataaatttggtattagctaaagtgctagtcttggggaaaaaatgaggtagtagtaaaatcaggaagctaatcttcaataggcacttaatccataaagagctgacttcccttgggtgtttaatcctggtcgactgtttctggtattgattattttccctgggttgtaaagtttgtaatgaaaagttttattctttggagatttgaaaaattgcttttcatgagtcctttatcttccaggctctaaattatcttggtattcagcccacaaaggaacaacaccaagccctgagacagcaagtacaagcagactcaaaagggacagtgtcttttggaggtaatattaggtttattgtgttgtattatcactgaatcatcattcaagagttatggtgacacattttcattaagagtgtttgttctttagaaggagagaatgaaaagtaaaactacatccatttcaaggtccttaatcagtacccaaagaactcagctagaattactgacctggcagggtcagcagaaagaagaatttcattaggacctttcagctctaaaatatcatcattctgtcatattctttttattttttatttattgcataaacattgctttagtaataacaaaagaaacagtacaaaatatggaagttctaatttcactactgtgagattaattcgaatcctttttcagctaatataatatagtaaatatttttatgatgctacctaattagagtcatcccttggtatgggaggggaattgtttcccggacccctgcatatacccaaatccagccatactcaatctcatagacagccttgcagaacccacatatagtaaaagtttaccctccacatatgtggcttttccaacctgcaaatactgtattttttatgcatttggttgaaaaaacttgatgtataagtgaacctgtgtagttcaagcctatgttgttcaggggtcaactc

SEQ ID NO: 10844 - DNA, 1133 bp, Homo sapiens
gggcttagcaagaatccttttccagtgcaaatacgaccctcatattatgttttggcgagtagccagtctttctttaacatcaatcaaccgtagcaatgtggtcatcacgaagtcttcattgactcactggcttggattttagggttagaaaatctgaatgttcttatgtccttccgtctcactttactagagtgcccaagttgactcatccttactcactcattccctcaaaatatttattgagcaccaacaatgtcacaagcactgtgctaaacactgtggtgaagtagaacaattgctaatcatttcctgggttccacttactcttgatttaaaaaaaaaaaaacaacaaaagagtttgtgtgtggccaggactaaacagctgcttcttaatttttgaattttaaaactaatctattttatttaaaaaaaatcaagtactttggaagtgaataaagtaagagatagcctgtctcactttccagaggtagcagtcactaatactgtggtgagtgattttactcaaaggaaatcacactattaagcagcttggttttgacatgttatgttgtggtcatcttttcatgtcaatacatagattaatcttttatttcaaatgtctacataaaatatcactacccacataacctataatttgtgtggccagcaatttattgaacactaaaatgttttaagttttcttattgctaacaatgtcacagtgaacatttatatattcattaaatccttttcctcatgtatctttgcactcttgtgctagtatgtctatagtgtgaatacattcataaatttcttgatcaaagctaggtcaaagttacattcattttaattttggtacatatccataaattctccataaaagtaggaccaacttacattaccaccaatagtgtatgtgagccttatttttatgtatgataggactttttttagtccaaatgttcctatagattttctgggttttttttttttttttgtccttggaagaataaccttccttccaccaagtccaagaacctgagatttttaatcattaggttttagatttcctttagcagcagagactgacttgctgtatagagggaagtcaagtagtgactaactcactatat

SEQ ID NO: 10845 - DNA, 1571 bp, Homo sapiens
gctaaacattgcacagggaaagaaaaaaaataactgcactgactttatatcttttgaatataattactgtgaaagtataaaggctgtgttctggaattttctgcctcacagcaaataaataaggtagtgaattaattattcattccattccactatcatgaaggactctgaatagacttggccaactgatgtttacaaaccagacttttatattttaattttacagattttactacatgatttttctaaattactatgtcaggttgtaaaagtcagtgcaataacaaaccttcctttttaagaagaaaattgtttctattactttcccattcactaggtaaagaatcatggacagaacttacactactttttaccatgtttcatcttggcataacatggttcttttttaaatagaaactttagttttttgtaaatttttaaaaaaatatttcattgatatgcatctctgcaggtcctcattcatgttgtaaatttttgcagcaagcagtcaacattccacaaacgaacaaacattatacctcttctgatagttttattaagcatggagaaattgccaatttttaaaaactgcagttttccaaacttttctgccaacctcttactctgaattcagtgctgctttgggacatatacttgacctagcttggtttaccagtgatggaaaagtattttgatatcattaactttttcaaaagatccaactttttctctatgcctttgccacattctcttcagggtctctttccacagtggataaatgttttttctgtattatgacagtattgttgtgatggccatctgctggaaactcctgaagagcattatgtattacagtgagcagttgtattgcctgtttggtgcccaatggttaagtcattgtcacttagctttatattgtcagtttgatatttattttaaattgtggaactagatgcataaattcacatttctgcctttcctttgcatcttctcatatattgtgtttttttttttttttcctagaaaaaatatttaaagcattgtttgacaggtagaaactcatgtatctgtagtccatgagttatatcctggctcagtggagtgatatttatgtattatttttacttttctctcagtgtcttatattaagattaacatgttgttaatagttgctttgttgattaatctctcttgttggtgttttaataaatgaaataggcttgcctttagatcgggtgctgatattgcctgtttcctagtaatgggctgatcaaatgatcagtggaattcttggtttgatgataaccttattaattgaaattttttactgatgtggctttaaaagaggtttattttgtatatgtttagaactctctgattttgatgaattatatgggaatgagaaacagaagaagtggtatttgctggcgagttaaataggcaaggtacccagtgataacaccaaccaaaccactcctatctgcatgattctgaacatctggatgcctgttgttttactgtgtatattttatttttaatatattaactttgtggattcatttaaggtctac

SEQ ID NO: 10846 - DNA, 1174 bp, Homo sapiens
cctctgcctcccaggttcaagtgattctcctacctcagcctcccgagtagctaggatcacaagcacacaacaccacactggctaatttttgtatttttagtaaagacaggatttcaccatgttggccaggctggtctcgaactcctgacgtcaagtgatccacccgccttggcctcccaaagtgctgggattataggcatgagttaccacacctagccttgtatttcagcacttaattacctggacaatcacaggcaagtgatttaaccttcctgcacctcagtttccagcccaatagaatgaggctaactcttgctttgtaaagtcagtgtggggatgagctacaatgaatataaagagtctggcagggtgcctggcatattgttaaatacatagtagccagtaatgttatttaactgtatctctactcatctagagggaaatcatcattacagatgaaggaaaatgttggataaaaataatttgtctttttcttttgtttctaggtttttgatgtaactaaaactcctcctatcaaagccctacaactctgtactcttctcccatattattcagctcgagtacttgtttgtggaggggatgggactgtagggtgggtcctggatgcagttgatgacatgaagattaaggtattagtctttaagaactactacagaaggacttctaagataaatatactatacatatatatatatatatgggttttgttgttgttttgttgttgttgttgttttttcttgagatacagtctcgcactgtcacccaggctggagtgcagcggcgcagacacagctaactgcaacctccatttctcaggttcaagccatcctcccacctcagcctacaaagttgctgagactataggtgtgcgctaccatgcctggctaatttttgtattttttgtagagacagggtttcaccatgttgcctgggctgctgtcaaactcctgggctcaagcgatcctcccaccttggcctcccaaagtgctgggattacatgggtgagccactatgcccaacctaatatagaatatttttgctttatattttttattatgcagatgaatattagacattgccagcttcaaatagttaaaaatgagatgttttgattaagcaattagcacaagctttagcaaaacaacatacagtt

SEQ ID NO: 10847 - DNA, 3068 bp, Homo sapiens
cccttctactgacttcctcatttaagccaattatataagctcacattgatcagggagggagggaaagagctaaagagggtcacacaagtggctattttccctgcagtgtttctgtgtggtgaaaataacccagtccactaaggggcgggagtgaatggatggctggattttccccaagctccttatagcctaatgttgtcaggatgtgagtatgaggaatttagcctcttatagtgaaatgagtccaactctgggctttgcttagaggagagctcctgtcaggcttcctataatatgaaaagaagtcaccattggggaactagagaccccagaccttttcatatggatatttgagaatgtaatgcatctcaggcctcgtgctggaactctagggcactctaggcaggctcagaacacttgatattcctgacagctacacacctgacatgcaggtacatacctgatcggtgtcatctcctaacaaggattttcagttcctcgggagagcaataatctttgtaggaaagacatccctgcaataggtgatatgtggtccttagaagttttattcctttactacttggaagaaaagttctttggtgattcttctctgcttttgaagatgatcaaaagcatcttcattgattttctgaaacgaaagccttgtctgaaaccaattaatacttgggaaacagctgggcttggaggagtagaatgccagagataaatccatggctcctgctctggctctcttctgcagaaatgagggcaacagtgaggccacttccctggcaaatgtgcagctcaggatagggaagcataagaccctctgtttaaaagagagtcaagtaggtaaccaaagccaagctctgtgcaaggtgctttggagttgtaaattgaggagtgcatccttgctgtcttgaaccattctgtttgcaatggtgagaccttacataacctagccttgcagggccgccacacaaccctggagtcctagagttggaggaacctttgtatccatctgacttctcattttgcagaatatgatgagaaagtagaggatcgctctgttcaccactcttgctattccattagtggggagatgcctgctagcatgtgtgaggggaacactctgatacactgggaagtatcggaaattcccagaaacacaaacataaaataactctcctagacccaggtactggggactgtctcagtccgtgtggcatgataaataaaaggttaggatcaagtctttgtatttttcaagatgtggtagctgattattcctgttttaagtactctgaaattgatctgtgatcaataatactaatatgttatcttttaccgtattctgcctctcactattgattttaattagttaggagtatttgagctgttatttcttgagcttaatatttttttagagttaactctttaaggagataatcatggctgtagacaaggccagggctggctgacgtgccttagaaggtttgaatgcaataaagcggtgtttggcgttctcctgcattgtagtgcgggtacaaaatgctatttgttcgtcatactgttgtcagcagatgagccgcccactacagacggctactgcccagggacctgcccaggccccacccaagggctcccaagggttgagatttctgcagacctatagccagcacacttagtcctgccctatatagagttcctcttcgggaagcttttgataaggaattctcagaccgataggatgtctgtctgggctttgctgcgggacagtctaactgtgggggctaggggaaagcaggagagtatcgatcaaagagtaagccacacacggataatcagttactagggatggaggtgtgagggttcattatattattcattttactgttgtatatgtttgaaaatgtctataataaaaagctttaaaaaaaaaaaagaaacaaaaatagttcaggccagcaatgggccctccatgttcagtggattttatccttgtttcaattggggtaggagttccaggaggtgtggattggaggttgtctaaagaattgaactggcctttgtccctgcttcctgggagggagactttcagtccttgacatttccagggtaataggagtgtctttgttatttgtgaggccatgggatcacacctgagcttatgctaaaaggtgggatgactcagagctggggctggtcaccagacagactgaccatgtgattagaggtttgaggctttgagtcagcctgacctatggggcgggggactggaggctgagtttaatcatctggccagtgctttaatcagtacatcatgaaaccctaataaaaactctggacactaaagctcagcatagcttcctgggtggtgaagctgtggctatgccggcagggcagtgtgccctaattccacgaagagggggcatgggagcactgtgctcaagacccttccagacctttccctgtgtcttccttggcttgtggagctgatttgtatcctttataataaaactaatcataagtatagtcctgagttctgtgatttttagtgaatcattgaacctgaggaagatcatggtaccctcctgggattgtaggcagttggtcacaagcgctgatggcctgggatccccacatggggctggtgtctgaggtgagggcagccctgttggggactatgtcccttcgctggtggcatctgatctaactctgctggtcgttgttagaattgtggtgcggtacaccaggtggtgtcagaacagaggcggtgggatctgcacaccttgagtaagcccttctcgaccagcctgttggaacaaaacacactactcttcatgggagcctcctgagtttcttctcacctgtgtgaagtcccctttgtttactgtcctgagttttgttctcgctcatctccaacccctcttgtagttttttcttcctcactgtcactgtaaccataaaaatactcagtatgtcagtgatagacttgtctttctattcagagatgactcttcaactgtccggggacacttttttccaataaaaagttcaggatggta

SEQ ID NO: 10848 - DNA, 1810 bp, Homo sapiens
caacctccacctactgggttcaagcgattctcctgactcagccttccgagtagctgggactacaggcatgcgtcaccatgcccggctaatttttgtatttttgcagagacacaggttggccaggctggtcttgaactcctgactttagatgatccgactgccttggcctcccagagtgctaggattataggcgtgagctaccatgcctggcctctttttttttgttttgttttttaattaaaaaaaataatagagatggggtctcactaggtttcccaggctgatcttgaactcctgggctcaagcatttctccccctcggccttccaaattgctgggattacaggtgtgagccacagcgcctggcctaaagagttactatactgcaattgaactcagtttattggaacccaaattattcccgttcttcaatcattctacacagacggaaaatttacgtggctgaattaaccggtatgacctcaaaatgaagtgcctaaactgggtattttgtctttttcctcagatcactgtattttggaaagagttgattgacccaagactgattattgaatctccaagtaacacatcaagtacagaacctgcctgagtatgacctctccaccttatagtttatgaatgtcttgtttgtgaaagtgactataacccaaacttttttttttttttaaagaggatttggaagttgtatggatttttttgttatcttcactttactgcataggaaacaatctacctcatcatttaaaatgacatgggtgtcggttttgtagatctttggtttttttgtcaggtttaatttcagttaacaaaatgtaaaacatgacattccctgcagatattgttgtataccagtatggtttcttctctttctttaaatgtttttggccatcaagtagcagtcgtcagtaggagtttataataccaagaatgtgctgcgtatcttgtctcaataagttttaagtaacatttaaaaatattaaagcatgttatttgacctaattttttagcatttgagttgttccattaaatggagcatcttgtaaatttcaagtattttatacttgcaattgttaagagttaacaggtagttggatttgtcgcagacaatgagttaaggaatcctttcacgtttttcccaactttaaaattaaggattctcaggtccctgtgtagagcagtgaaaataagatgtgcgtatgtgtgtgtatgcctggagaattggtgtttcacttcagtgagaggattggctgtgagcttcagaccaggaaatgtgtcatcttgccaggcacctggctgagtgtgctggagtgaggatcttgaacagaaacttccttttctgttattattcactacgaagctaaaatggccaaatatataccgtgaaaattggtttcatttaacaaaagatcagatccctccttcagctgtacacatttttaaataaaatcatattgaactaaacatctctaccgagttatcatgttgagtattgcaaattattgtcttattttacaataacgtgagagattacaattttctgtaataagaaggtttgctttgactgatgagtctgatgttgcaaagtttggttcagtggagttcatctgatctgggagccactgtgccagtggagatgctggccagttttactttgcatgacatgaatgtgtttcaaaatgtgcatttattgatttgtaatgagaagtattactcccgaaaggatgagagtaatgtgaacggtgggatcttggcactggggttctgtgtagcacagttgccttccagggttt

SEQ ID NO: 10849 - DNA, 1206 bp, Homo sapiens
aggtagtgtaagcgtttgctcaaaagagagtcccagttcctcctcggagtctgaatcttgtgatgaatctatcagtgatggtcccagcaaagtcactttggaggccagaaattcctcagagaaattaccaactgagttatcaaaggaagaaccctctaccaaaaatacaactgcagacaaactggctataaaacttggctttagccttacccccagcaagggcaagacctctggaacaacatcttccagttcagactctagtgcagagtcagacgaccaatgcttgatgtcatcgagcaccccggagtgtgctgcgggtttcttaaagacagtaggcctttttgcaggaagaggtcgtccaggcccagggctgtcatcacagactgcaggtgctgctggatggaggcgttctggctcaaatggtggtggacaggctcctggtgcttctcccagtgtgtctctccctgctagtttaggaagaggatggggtagagaagagaaccttttttcttggaagggagctaagggacggggcatgcgggggagaggtcgaggacgagggcatcctgtttcctgtgttgtaaatagaagcactgacaaccagaggcaacagcaattaaatgacgtggtaaaaaattcatctactattatccaggtaagtattattttttgtaagttatctcctccctttccccttagaatgtgtgtggagttcatgtcatggattcacattttctcaccagtgatgatgtcacatgactaacactgtttttcagaatccagtagagacacccaagaaggactatagtctgttaccactgttagcagctgcccctcaagttggagaaaagattgcatttaaggtatatttcaaaagaacagtcacagcaaaaaaggttcattccccttccaaataaacttacttagaaaatcaggttaaatgtgtttgtaaaagcccttcccactggaaccccagtgttgttacgggttcctggtagggctcccagactggtcggggtggacacgccaacatggcatgatggaggagctgtgggaatgggagaggataagagggcttatgtatttgtgggttttttcttcttttttagcttttggagctaacatccagttactctcctgatgtctctgactacaaggtaaggatgtttatttaaaagtaagttgtcagtgtattattaaaactaa

SEQ ID NO: 10850 - DNA, 1208 bp, Homo sapiens
tcactgcaagctccgcctcccaggttcatgccattctcctgcctcagcctcccaagtagctgggactacaggtgcccgccaccaagccccgctattttttttttttttgtatttttagtagaggcggggtttcactgtattagccaggatggtcttgatctgatctcgtgatctgcccgcctcggcctcccaaagtgctgggattacaggcgtgagccaccgcacctagcctagctgatttcttgactagtgggaagtgggggctggtagaggggcatctgtgaggtgtctcctggcaatgggtgcccttagtgagacccagccaaggcctgctgatcccagggtctcttggctctgttcttgttggaggatggttcacatctctaggcacaattccctggtaacaaggaaaaaaacacatcttccactctgctcttcggggatctggtaatctctgttctcaagtgctggtggagcgcttcaagccaggcagtttctgttcctggaagcaatggtgtgagaagggctttatcttgagccactcactgcatagaagcagtgacacctggttcctgattgctcagccttgggtctctggctctagtccagagtgcggggtgaaggctggggagagatgggcactgggaatttaggtgggacatcctggattctgtgggttgggtgaaatgggtagcagtattcagtgccttctaggaggccatccctggcttggaaatgttgtagaaaccatgttttccaggcagtaattcttcagtagctccagtgactataggggtgactctagaggtggtggtctgagggcttagagcctcagtctctggggaacaagctgggcagggagggctagtggtggtgtcctggtaaactacagagcagcaggcagagatgggtgttgtggcctgcagtggtgattctgtgcattctgtctgaggactgagaacagggcaggtgaagtgcagggagcctagtgacagaaggtgctggggactgggtatgggtggcccagggtacaggaccaaagccagggcagaggtgcgtgctttgagtgttgggtctctacctcactgtagtatagcccccttatgggatcttgggaggctgggtgtggtggtgtggtgtgggaccagcaactaactgctggagacaggcaggaccccttgggatcaacttttagttctaaaggggtg

SEQ ID NO: 10851 - DNA, 1100 bp, Homo sapiens
cggaggagatggctccagctctaccctgttgactgtcttgcatgtgcggttgccagtatcctcctacctggctctgtaacatccctcctccccgctctcctgctctccccaggtgtaattacttcaagcctccaggatggcaatccagttccgttcgctcttccccttggcattgcctgggatgctggcgctcctcggctggtggtggtttttctctcgtaaaaaaggccatgtcagcagccatgatgagcagcaggtggaggctggtgctgtgcagctgagggctgaccctgccatcaaggaacctctccccgtggaagacgtctgtcccaaagtagtgtccacaccccccagtgtcacagagcctccagaaaaggaactgtccaccgtgagcaagctgcctgcagagcccccagcattgctccagacacacccaccttgccgaagatcagagtcctcgggcattcttcctaacaccacagacatgagattgcgaccaggaacacgcagagatgacagtacaaagctggagctagccctgacaggtggtgaagccaaatcgattcctctagagtgccccctttcatccccaaagggtgtactattctccagcaaatcagctgaggtgtgtaagcaagattcccccttcagcagggtgccaaggaaggtccagccaggctaccccgtagtccccgcagagaagcgtagctctggggagagggcaagagagacaggtggggccgaagggactggtgatgccgtgttgggggaaaaggtgcttgaagaagctctgttgtctcgggagcatgtcttggaattggagaacagcaagggccccagcctggcctctttagagggggaagaagataaggggaagagcagctcatcccaggtggtggggccagtgcaggaggaagagtatgtagcagagaagttgccaagtaggttcatcgagtcggctcacacagagctggcaaaggacgatgcggcgccagcacccccagtcgcagacgccaaagcccaggatagaggtgtcgagggagaactgggcaatgaggagagcttggatagaaatgaggagggcttggatagaaatgagg

SEQ ID NO: 10852 - DNA, 1099 bp, Homo sapiens
aggtcgtgtgtgtcaggccagtcagctccaagggcagaaggaagagagctgtgtcccagttcaccagaaaactgtcttgggcccagacactgcggagcctgccacagcagaggcagctgttgccccgccggatgctggcctccccttgccaggcctaccagcagagggctcaccaccaccaaagacctacgtgagctgcctgaagagccttctgtccagccccaccaaggacagtaagccaaatatctctgcacaccacatctccctggcctcctgcctggcactgaccacccccagtgaagagttgccggaccgggcaggcatcctggtggaagatgccacctgtgtcacctgcatgtcagacagcagccaaagtgtccctttggtggcttctccaggacactgctcagattctttcagcacttcagggcttgaagactcttgcacagagaccagctcgagccccagggacaaggccatcaccccgccactgccagaaagtactgtgcccttcagcaatggggtgctgaagggggagttgtcagacttgggggctgaggatggatggaccatggatgcggaagcagatcattcaggaggtaggagggtctcgggttcgtttagaggatggggcgctcccagtatttcttggagaaaggctgccagtctgcctctcccttctgctacttgtgcagcaaagtcatagtgctcttcagctctttatcgcaacctgcagaggtctggacacggcgtagagctggtgggtaactgaggagttagattgccctgaaaccccaagtcatgggagctgtaacttggttcctcaaccggtgaccttccccagtgagcccttcccaaggaactagcgccaagttgggctcgctgattaacattagtgtgcctctttttctttgtttaaaaaaattattattattttggtgcagatggagtcttcctttgttgcccaggctggtctcgcactcctgggctcaagtgatccttccgccctcggcctcccagagtgctgggtttataggtgtgagtcactatgcccagcccatttttttttcttttttaaacactaacctctttgtgtgtg

SEQ ID NO: 10853 - DNA, 2759 bp, Homo sapiens
ggttcttgcatattctggggctcagatctatttggaaaaaaaacaccaaggccgtgggggccagccagaatcccttcactgagctctgctcaagtgctccaagtgtattttataattgagcaaagcataaatccatattttagagaacttgaaaagtatagaaatacatgcagaaaataaaaatcagctctaatcctacccttgagagtgactgtgaaagacttttatttccttctcatcttgcaccctgtggtttttaaacaaaactgagattatgtcgctttaattaatactttaaatatttaacaatttaattttcgtgtgttattctttgaaaatgtaactgtaactgcattattcactgtgtggatgtcagtttacttcatcagtcccccattcctgagtgcttaagtggtttcgagcttcttgctattagaacttacaacatattagcttgatcttgatgtttatctctggggctcagaaataatttgtcagaccgcattctcccagggccctgggctctgtgctcaggtggagacttggcttggtctgaactctgggtcagagtggctgttttgaccctgggttgcgaggtctcttggtggtttcctccctggggggccctgttatccgtcctgcctgcttttccttcagtggttacaaagggcatgaagagaaaggctgtgcctgaggatggaccatgtccccagtagctcctccgggagggggtcgttggcggttgtgtgggagcccatcttacgtaagggctaagtttggctgcttctatctgccttgaactctggcgcactgggcacttctgcatgcctcctgctctgcaggcttcagcctgctgtcacttggcagcgggagcccagggttcttagaccttcattttcaaatcgagcccctttatctttggatctgagtagacttgagggagaggggcacgagaaatcgagaaactgtgtgctggtgaaacttctcagcatggcttttagaggagaagatgctgctgcctttgcagctttccgggtctgggccacattgttgggatgaaatgggaactgcttggtcctggagccagactgcctggttcgacttcctggttagcagctgtgtgaccttaaggtagttacttagcctctctgggcttgtttccccatatacagaatggtgataaagttatctgtgtttcacaggtactatgagtaaatgtaagtgcttagaatagtcctggaaaataaatgctgacatggtaacagctaatatgtttgagcatgatcttgtgtaaaacagaagtaggtctttgggtgtccagggaattggtttccctttaaccctctcatctctttttgtctttctggaagcacttagtcggtcggctaattggcaagcaggggcgctatgtgagttttctgaagcaaacatctggtgccaagatctacatttcaaccctgccttacacccagagcgtccagatctgccacatagaaggtcagtaacatctgctgcttgtattgcctcttacctgaaatattaaatagaagtgaatagcatctgagtttcaattgctatctttttggaataggaaaccctgcttctcatcccagggaagggagcattaggtatcttccctgcagccttttccccatttcaggtgcctgcgggagactcaggtccctccctactctgatctttggccaggagaagtgtgggtgcttggttgggcggggcctgggtcctgggttcatagtgcccaccaccccataaaggcttctctcaaagcagaagtgccctgtgtgcaattcccccttggcattttcacagctgcctgcctcttctgttgcattgaaagcatggatcataatggcagaggtatcatttgaaaggcttagatgcctttcttcctaaagcagagcttaagtgttttgttacctcaaagatgcacttgaactctatgcaaagtccagtggagtggggtctgtggctgtgtttttgtgagtgtgggtgtgagtttcctcttacagtgattgtatgtcctgcccccatccgctatttaggctctcaacatcatgtagacaaagcgctgaacttgattgggaagaagttcaaagagctgaacctcaccaatatctacgctcccccattgccttcactggcactgccttctctgccgatgacatcctgggtgagcgtgctactgggtgatccggacttcttgccactttcccccaaacctaccccaaacaagaaactccccagacctcaggctaagaaggccaagtgcacatgagtgcctgcgccctctcttctctggcctctgctggtcggttctgctatgggactgtgttctggggacagggcttaggtggtgatagcgctggcaggaaaccagaggcctcttggtccccacatgggaggactacttttcctggctctccccctgggcaccttttaagttttctaggcgtttgcttagaaaggatggtgtagttcggacaggagattgggtgtgtccagggtcgccgttcaccacctgagacctgggtgggactagaatcatgggtttggatggcgcttgttctttcttctggttgagtcaggccttaacagtggccctggtgaaggatctccttccccttcccctccccaggaggtgcctaaattacaaagaagaatgaatactccccaccaggcccggaagtccagtgactcttgggaggttgccccaggagtttggcagagggaagagctgc

SEQ ID NO: 10854 - DNA, 1165 bp, Homo sapiens
cacaggagttggctaaagggcctggggcctgcctactgcttattttcaggagtcttgttctcagcggccacctcattcctgtgttgccctccctgggtcttatagattcatcaacagaagtgggagggagggcactgctggtaggtggaccctgcccaggcctgtgcaaggcccagcactacctccgcagttgcttcttggttgcccagtgtctgtgggaccctccctgcctggccctgaggtgagactgcccctaatggctgctcgtggtattgcaggacaacagccacaggggtgtcgaacactttctgttgttaaagtagtccttcaacctctaccttctgggtgccatgttgtcttgagttgcccttttcaaagatatgctagcccagagacttgcccttgggtctcgggacttattcaaagatgagataagaaggattgtttcagtgaccgctcccccttcccctctacagctcatgctgcctgatggcatcaccgtggaggtcattgtggtcaaccaggtcaatgccgggcacctgttcgtgcagcagcacacacaccctaccttccacgcgctgcgcagcctcgaccagcagatgtacctctgttactctcagcctggaatccccaccttgcccaccccagtggaaagtaagcagtgccctgaggggtcgggaagggggacccctggggttgcctgttctgccctggatcctgatcaggaggaggctgttctgcgatccttcatggaagcagcatccttcaattcttgccattgttatggagctggggtgggtttcctggcaaggcagagctggggtttccactggctggcagagtgatgggtgttggagtagagttttgacacagggattcagatcccagctctgccactaatttttttttttaattttttcttttttttttccctcaaagccagtgtcatagtatctgccacctatttattatctgttaaagggggtgatacccacttgttccaggaattagtgttgaatactgtatgtattacatataaagcacttatgcatataatggttaccacaaaaaaatccccaagtccaacaagcctgtgcagcgtgttgggtcatctccatttaacagatgagaaaactgggcctcaggtgacttgcccaagtgagca

SEQ ID NO: 10855 - DNA, 1180 bp, Homo sapiens
taacaaatcattataaaccctctgggactggtgggtgtgtgatgatgcggggttgtttttctttttccccctcctctttgataagcccatcttttcagcccaggtacatttttcccattgtaaacagaaaatggcatgggagggagtgtgtctcggaaacttgctgtattgttaatctgttattaggcaaaagtcttaacaccaggctgggtgctcagatgcctcattgtgagctggggatggaattatgcatcatgaataaaaaccgctgtcaacatgcattggtttcaaaacattagagcatatggtatgtgattatctgtattgtcaagtgcaataaagtgaatttggatataataaaggatgtaatattttagaaatttggtaataaactaaggaaaggatgacagctgaggttccttaaggccccagacacaaataaattgaagttactggtctctgtggccaagtggcagaatggccgtaacatggctatctgtgctcggtgattttcaagttggggaaagctctgctgtcgctcggttgccttctctggaggacgcagggatgatctggcccccatgctgggtggtgggagaggcggtggctcccgttggagacccaggtcttgcctccttgcctggcctcaaggtgtgccctgtggcctgctctgagtggcagacgcatctgcctccagtcaagggccgccttgtgccagccatcaggacatctgaggacccctctcccctagacagtcacctctcagttaatctccagccctctttgtccccatttggtcaatgggaagatgttgctgtaaacgcaaggaccctgagcagccgccccttggaggcagccgtcttctggaacccacatcctacagggccaaattattaagtcatgacagcaagtcaatataagtaatgagaatggtcctctagagaggcgtgagtgcttcagcatctgatgggggctaggaactgtgccaggcttcggtgtactctctccttaaatcctctataaccctataatgctgctgtccctatttgaaggatgagaaagctgagacacagccaatcagttgtggaacagagattacaacccatgtctgaacccaaagcccaggctccttccacttacaaccttttctacaaatccagaggctctttccattcatagt

SEQ ID NO: 10856 - DNA, 1153 bp, Homo sapiens
agccaacacaaaacttctgatgctctgttttctcatctgtgaactggagctaaggctaagtggtctgtctgtttaataagagtttgaatcagatggcctggcatgaagagtcactggcctgagagaatgtcaggggcatttgtaaatgtgtaaagggctgaaaaatcctgagggattattattattgctattgttgttattattcacagacacatccaacagccattgtctgcctccttatctgtcatgctttctgcacgagcgtcagcctgagcttcaatctgtgtgtatatctgcagcttacgtccttgccacccctccagaacccagtttcatccttgtaggtttttccgaagcaggatttgcacaagtggcgtgttttcttaagtatttattttgcaggccatttactcggcatggctatttttacagtgggtaaggagcaaggctaaaaataacttagctcataaccagacaggttctgcatttgacatttacgtggaattcatttgcatctcatttgttcgcctttctgtttaacaggtagaatgtaagaaagctcagccgaaagaagtcatgttcccacctgggacaagaggccgggcccggggactgccttacaccatggacgcgttcatgcttggcatggggatgctgggtgagtctggacaggaccgcaggtcaccatggactgggagggctatggaggcctctactcccaactgggtcacctaccagtggggcaaactgcttcacctttctaagcctcagtttccttgtctgtagatgaggatgataattccccgttccaagacagttgtgatgattaagtgtgggtgtgtgtgtgtgcatgcatgtgtgtgtgtgtgtgtgtgtgtttgtatttataatattgccccatgcctggcttataggatatgttagactattttctctcttttccatctccttcctcaaaagaaggaaaagtccccctctatctgcctcagccctctcatctgagtgggagttcttaagatgtaaggactcctggctgacttgacttgtgtgggctaaggctacgttttctaaaacttgggagaggagggaagtggtaagggtgggcgataatcctgtctatttaaatgattaacatttttctcttgggatatca

SEQ ID NO: 10857 - DNA, 1173 bp, Homo sapiens
agggtggggggctggtgagggtaccaggaaatagagcattaaaagcccagagggcaaatgccaagaacccacaccctgggtgatgagaagttggcacagtgaggcccattagaaaacttcagtaaaaatccgttccatgcaaactggcactgcctcgagctacaaaggatccactcccccgaatcatcccattggggttttgtttggagggggctagggagttctcaggggttgccgagggtcagtttgccagagagctagcaagtgggcagactggcaggcaggtccagagagtggggcccccttcctgagcttctgctcaccacagccagtgtccaaaggccccacctgccctctggccagtgtccctcagtccccccagccccgggccccgggggcggggtgcacagctgcctcgtgtctccctgtgccatttggttttttaacttgagtgctttttggtatcattataaacaagccttggccctacctgtgcctggggttggggaaaagataaaagaaaactcttgagatttttgagtgttgttggttgttgttttctccgttcagtttctttctttttataacttggattatgaaactaaactttaacccaaaattaaccctgcctctctccccaccccaccccgttctccttgacttcatggcaagtttaaagggcagcatggggttctttatgagtctgagagccgtctcccacggtctgtgcccccttctgccaccctaccctctcatggactcccagagccaggtgggagtcccacccatccctctaactcctaacccccaaggtcatctccagtcacacatttttttttttttttcgggatcaatggtgtttgatttgtagccatttccatcaggagcaaagtctctcccagcccattctaggtcagccatgctcatcgctgcactgttagtgaactgtattcaggagtgtgctcccagaccacctgcccacaccagcctgggttagcgcaaggagtaaatcctcaactccgaggtgcccgccccgccccacagggtgcagggtcagcctggaagctacagggcaaccctgcagtgctgccgggcagggtgtgtcaggggcttgggatgtgccccagggcaatgactagactgtatccaccatagtgagagcgctgcctaggc

SEQ ID NO: 10858 - DNA, 1237 bp, Homo sapiens
aaactcctgtgcttttataattattaaaaaggagctactcaagtggaaagtcttttgtgtgggtcctcaaggggctgcccctgggataacttccccaccccaccctgccccctgcctgctagagccccagcagtgagttttctattagatatgattgggcagtaaataccgttcagccctagggtgtgccagctcccaaaaggacttggctctcagcagaatggagtggtcttttaggactgagatcagctctctgggtggccccctgggtccaggcactttcctggggtgggggaggggagttctagcgagggcccagggttaaccagggcttactttccctctggcagtgccctctctgcttccacgctgaccccaccagtactgcaagtctgcttattctttgggctgtggcgtagtggagggtggcctagtcctcaggagagaggcagtcctgtatctcttggggcagtcagatcctgacctcagggaacccccaccgtgatggaagagatgtttccactgccagggagctcccaatttggaaaggcaacagggtccaagcccttaggagcttctactccaaggctggagaatctattctgtgtccttgaatttgcagtttctctggggcaaagaaagatccaagtaaacagaggaaaccttgtcaaagtgtgattccagaagggacaactgagcagcatgatttaaaaagcatgtgccttcaagttagagccagatttggtcctgtctgagacactgtgtggcattggacacatttcctagctgttcaaacccttggtcttcttatctgtaacaggggttacacagctgctcttacaagatgttcggagcatgaaaaaagatcgtgtgaaacacctaccaacatgcctggcaacacagtaggggctcataagtatgagttccctttccagcctcacacctgcagaagctacagcttctagaactttgtgcttcttgcctcattggttttcacctccaggccctgttttgtccctaccagtatcaggcctaacaggggcagagtgatatctaattcttacatagcttttcatcatgattgagaagactacattaggctgcctcgtaagtctgtggtcccagccttggatttcacagtgttttcttttagcagcagtctgtcatgcagaaactgggcctgcagtgagtgcaatcacttataagacacaagcaaggatctgagcctcctggcagg

SEQ ID NO: 10859 - DNA, 3809 bp, Homo sapiens
tttatgttttcttctggacatcctggccttccctgccctgcagagcatacctggatgtccaggcaagactgggcgaagtttctgagtggccctttgtttaggtgatgtcctcagacctggacccccaccagcctcactccccatcccaaccagagatggctcacttcggatcgagggttgactacatctcatcatctcacgaatctgctgtaatataagacaacagcttttaaatgtgtatataacccatgatttcggttttgttttgttttgtttttcttgatggtttccctctccctccctctcttcccattctccttttaaatctctttgaatcacatttggtagtgattttgacttagtccagtagtcacatagctttaatatctagttcaaagctaaccatagtataattgttatattaaggagttattttttcttaaaacatttttttttgcttgttttggttctgttctcacttttaaaggatgctgagatggtaatatgactctccatattttggtaccaattctgagactgtatgaattttcaggtggaactttagcacacactgaagcaaagttgtgaagtgcagggcgggaggtgggcgtgagctttctattttgcgttgtagaagaagtgagatgtagtaagctaattaacagactttctagcagttctttttgtgatgtctctttgttaatctgagtctatctattttcggcaataaggtaaggacgacagtgttttgagtgtcctccttttctataagtgctttttttctgttgaaagaggtgatattataaggttttttgaaattgtgaattctaaaaaagaaatgttgtaaatacaattccattaactacatagaaactattaagaaagagagaatcaaaaatatttttgtgagggagtcggtcccaggcagtttgatgctctgtggaaggaggcgggaagggaacgttggccaagtcagttactgagatgaagatcgcccagctgccaggaccaccccaggacaagttagagcactgtttagctcctttgtctgtgtgatagacctaagaactgtattagtgttgtaccagcctattaacctcttgtctgtgcacagcttcaaatgttaccgtctagttagatttttatttaaaatatgaaaaactgcttttcccaagatgttttttaaaaacaaagctacaattttaatatttaacatatttaaagtttcaaagcacacctgtttggcttgggtgggggtggggtgggggggacattctttttcagtcttaatttttaaatatttgatcattttctattgtccaatcatttcagcacctccaaaggtccctaggacactttgcctctcttctccccctgccccccaccctgctcccacatctgggggcccatgggccaggagtggataagcctgcattaatacaacctttctccattcactttctatttacaaattaggaaagcaaccttttggtttatatatattttttttaatacctcagtgctgcaagtatcaccagagaggctatggaagaatttttttttaatttattgtagatgtaaacagaattttaaaaataaaaagtataaacatcactgcactgtgactggtgggaaaaactgacagtttcctctttgcacatgtttaacatttggctgttataatatatggtcctcggttggggaaagatacttatgatgaaggatattttttaatttaacttttttttaaatattggtaataggtcggcaacagcaactatagaagtacaactcaatagatggcattaaaacatattgtagtgtggatatatattttttcttttttaaaatgtgatattgacgttttattaatattttttaaattgttacgtttataaatttggtacttaaggcacagccagtatgagacactgaatgcgacatttattataaagagctgctgcactcctatttttataaattttactaacaaagtagactaatgtagacattcacagacatggtagggcaaaagcatcttcaaactaaagactccaaaatgctaactcagaaagaaagaaaaaacccgttttcaattctaatgaaacagcaacaacattttttttaattaaaaaaaaaatcatgttctttgtttttctaataaaatgttaggttgtttggtgaggtttttttgttgtttttttcctttctttgtttcttttcttttcccccaaacaaccagattaaatgctgagcgcttttaaaatatcaaaacttgttcaagtcataaaacaacaaaacataagttttatttaaaaaaaaaaaaagaaagaaaaaatagtaaattcccagaaattcagtgtttagacgagggaatttaattcctattttgtccatgttggtgatgtactgtacttcccttccttttctctgcatcccccatcacctcatagaagactctttgttgatcattgtatgttaataatgtataaaatggctatcttgtaagcgtgctgtcctggtactagtgtagcgactttttttctcctctttcttctagtacatattgataggtataacataattaaggtttaaaaaaaattagacatagttattcagatttaggaccagtaaggatagaactttctcttatttatgaaaaaaaatgctaataattttggggcagttttttcctttaattatttttttcaatttcaagtttaattttattttagctgatctgatgtggtttcaactaacccaaggtctcaccatgttaaaatgccggcggactctacggcgttttgtagatccccccccccccacccactgtgaaggggtgccatactaccttaaatgctaatgctagatatgcaaaactggatttttttaatttattttttaaaagagggaggcatggtatattaaaatgattttactaagagaaaaaatatttttttaagaatgctcagaagaaattgataatctgtgtgaatatgttttagatgtttatataccttttgaagagacccagtagcccatagcacaaatcttgtggaaatccgatatgttttaatgtggctacctaggtttaaggttcacgttagtccccccattccatctagaagtccattttgaaagatttttgtaaattcttttaacactgatgtttcagcctcgtctttgtttcagttaagctcaatggcgaacatgggaaccacctttcgccttccctgggggagaaaccctcttggctgatggcttttccccggaattatcaaacagccaccgggtgactttctggcttccagatccatctgcctgagacccccgaactcctctcctcccaagcagaggcgagtgagtggcattagctcccggacccattcccggtcctagctgggcatggggctgacggagatgaccaagccttggtctgctctctagcagcttccacagacttggctcgtggccttccttatatccactgggaacaaacagcctcgcgctctataccaaacagcctcgcgctctatcccagtcgcccattagcttgattcaaacaaagccccagcaggcctttgcgtttttatccttcataaccttcatcttaatttgaacttgtagcttggactttaaggtagcatggctctattgctgtcaatttactgtttcactgcacagcaatcacagccagtgaatgttacacacatcttgctagactagtataaaaatcattgggtaattgttggttctaatgacctgaaaggtgttcagtttttgttcttggttttgttttgtttttgatt

SEQ ID NO: 10860 - DNA, 1192 bp, Homo sapiens
ctgcagcatattcaagaataaagcaatatcgtttactacattttttattgaaggtcagccatgctttctgtattatattgcatatgaaattgtttacaaaagaaacactaactcatacttctctttattggttgcaagtggcacgcaggaacagagggagagtggggggctggtgggggaggggagatttttttttttttttcttgaatgtgcttcgcaagccaggctatcttccaaggaaggcagacagtgggagagcagagggactgactgcaggcaagcacattgaagaaagacactggcgggtttccccaccctcaccccaaagcagaaaactagcagacgtcagctcagccccgtcctgggcacagacactacacaaggagacgctggaagttaagcaatactttaatactgtaatatgtttgttttctttttctttcttttttttctaccaaaaaaaagtaagtaaactaaaacacaaaaacatataaataaaatccatccctcttgtcggggacctgcaggggggcaaccttaatccaaacacctggctatcaaataatcagaatgtattgtctcagacaggatttcagttccgggaggcaggggcatgatgggggagggggccggaggctgagagacaaaagttccagagcctccctcgaaggttctctactactgtattctgtacataatgtaccatcccatgtggaatctgtgagtgtcctcttaagtagcgtgggctagccaatctgccgttcatggtgtattgtaaactccgaattccatatgtaataggatgcaagtctaagcgtttcatgtggacataaatgtatctaaataaaactttccctagcactgtggctgacctcacccttacttttatactttagtatgaaactgatgagaactttggtagtgagtattttttttatatatatacatatatatgtactatctatatatatatctcaagcatctttcaggtctttgtgtgtggctttcttaaagccctgttgtaaaaaattactatgtggatggcagtctctcacatcacagatgtggaaagtataattttatatttgtattttcaaataaataagtttgtgaaaggtttccatcctctactgtggtccagaaatcaatgtgtttgtctgacaaaaaaaaaaataaaataaaataaactgtt

SEQ ID NO: 10861 - DNA, 1243 bp, Homo sapiens
ttagtgctaaatttttcactcagtgacagaatgtgcctagttatatatctttagcgaattaattgagtgaaaatgataacatctctgtgatacttaaatctggtcttttaagcaacacggaggtagtcacgtttcccggaaatccgaacacttgagtgtcagaccacagactgcgttggaagaaaacgagactcagaaagaagttccacaggaccagcatttggaggcacctgcagaccagtcgaaaggtctcttgcctccctgaaggacctgtatactgtgtatgctggcattcacactctactcactggctgaatgttgagctatttttaaacagttgaactgtgtaaatgtttcttgatctctaaggtattatgtttgccttctcttagttatttctgggttgtcacaaagctcagtatcatggtttgacagaagcagttatgtgaacttttatgttaggacattactaaataaagaattccctagctgcttataaagtaaatttactttgaattgtaaataacatgaagaaacctttataaagattgttcaaatgggactcaatctgactaggcttgctttgatgtttgttagtatgtgggctggctacatctgattcccgggtacatatttcttctgatccatcagacttatacgtgtacacatgttgtggaaccttggctagctggttttgtctgcagagaatctttgtacttcttgctatagaacgattatctctccacttgagaggccaagctgacttgcgctttgtggtaagagtgaggacctgtcattgctgatacacaaagaccaaaactgtaactttaatgtcatggattgagtgtgctggagacagttaacataggcctgcacagactaggctgttcagtaaatacttgttgaatgaatgagtgaacgaatggttatatccagctaaagactggattcatatggtgtagataacaggattgccaagaaaggaggcagctaatttaggtgatgctctccaccagcatccacctgcctccctggggccaaagtgtgcctacaagtccttatcaacttccctgccttcctcgtttccccaggttttactaaatacatgaaatatccctctgagattgcagcctttgtatatgtggtcaagccagtggtttttagctgttagtagtaagctgcttcagaaattccctattttaaaactcatgtagattttctacccagtgattctttgtgtatg

SEQ ID NO: 10862 - DNA, 1178 bp, Homo sapiens
tcccagccgtggtgggctgagggtgcctcccccaggctggggttctcagccggtcacgctcttccttggagcggacctgagcagggcgaggcgtattgcagggtgcgggggctgagctgggtgaggccctctcatgttttctcctggctccgaatagttgtgcctgaggatgcctctccttgaatttatgtgtcatgttaaagattattgcagctgcctctccccgagtggaggtctctaggaagaggaagggaggaagagcctgatgggccttccttatcaggtcatgcaagaccgctctttgcatttttccgtgaccgaacgtgggtgggacgcacaaaagaagatagagggatttaactctcctgagcgttgttaagtttggtttgggatgtggacagatcttctctgtaggtggggagcagtccttccccgttctgtgttgcagaccgcataatacctttaatgtcccaaactgtgctagactgattcaggggctttggcaggctactgcaagtgacccagtttcgttctgttccctccctaaggactcgggacctggttcgggccggggtgctgaaggagaagcccctgtggtttgacgtatatgacgcctttcccccgctgagggagcccgtcttccaaaggcctcgagtgcgatatggcaaagccaaagctcccatccaagacatctggtaccacgaggatcggattagagcgtgagtgctcagccctgtagtggacaggaggcaacagaacttcagaagggaaggtttcggtagcagtctgggaattcaaacatgaaattgagtcaggggtttgccctgtggagaaggcttatctagccaaattagggaggcagcaccccttcctcatagtgaaactgaagttctgaaaagtggaatctggagcccagcaaccgaaagatcattgcaattatagccgcatgtttctgggcatctgctttgggccaggcactgtactaagctctttgcaagcattatctcattctctaaaggccttactctaacttgtaaggaaggcattcttgtttccattttattcaaggagactgcgaagctcaaggaaattagctaacttcttgtaattactaaatatataggagggtggcagatctgggaatcacatctctgactccaagcttatggtgatcatta

SEQ ID NO: 10863 - DNA, 2392 bp, Homo sapiens
ttaacatacttattgagtatgcacacctctctctgctagttacagtgtgccttacgagaagatttttctgattatctgttattgtgtaaccattggcccagctctgtgtaaacaagctctttagcctggcctgctggaggttggctcttcccaagaaagtttttagaactcagaggaactgcatgaagtagtagtgagaacacttagccctgcattgcagaagttaactgatcctctcagcatcactgtgaggtaggtaagtaaatctgaacttgaaacctaaagtgcaaggctaaacaagttgcttaagtccttgcaggaggtatagcatcagaaggtgattcatacactgggatccctggcccccaggcttgtgctcagaaagatcctctgttctgttgaccgcttgatagaaaactggaatttgatttattaaatgtttgacatttttaatgaaaagaaattgattcagaaactttgtgaattttgctcactgttttgagaatctaaagaccctttttcttcttattttagaagctgctaacctgtgccaaacctccacggctgctacgacacctgtgactctcactactccattcagtataacatcctctgtgtcgtctgggactatgtcaaacccagtcacagtggcagctgcaatgagcatgagaagtccagtaaatgtttcaagtgcagttaacataaccagcccaatgaacatagggcatcctgtaactataaccagtccattatccatgacctctcctttaacactcactaccccagtcaacctccccacccccgtcactgccccagtgaatatagcacaccctgtcaccatcacatctccaatgaatctacccacacctatgacattagccgcccctctcaatatagcaatgagacctgtagagagcatgcctttcttgccccaagctttgcctacatcaccgccttggtaaacagtattataaaatcaaaatatgggtaaaagtaaatatttaccagcaacttaacttttagttgattaaagcaaaaagtaaaccatgaaattgggagattttattacattagttaataagagtgtggtagcatttttctccaatttggctgggattattcaaagtagggtgtgtatgtaacttatcactggaccactttagtttaatcagaaattccttttagctgacaacattgcttaaacaggatagtagttggcaagatgaaatgccagaattaaaaccaatcataagtagaacccacttcaaaataaaaaaacagcattactatttctaatcccaaggaatcactttattgtaaacactagcagaactcttctccctatacaaggtggatggctgattttaacctgaaattttaaatccacagattgagagctagtgtagaattgtctgtgtttattgtttttatgagtaaatacatgcattgtcataataaaatgcatttcagagaatatgcattttacctttgggaatatgttaatttcaggcagcattccctatgggaaaggtgataccagctctgatatgcaaagcatatgataatttatcattctaacttcaacgtataatagggattgtgacctgatatttggagatgtaaatattgctcagcatattaatcccgatggaatatagcattgtagttgactttttaaaaaaaaaaaaaatttaaaaaaaatctacaaattgtgttttgctaagaaaagcctcaactgacagaggagaagtcaagtgtgtggacaggcaagctcctaataaacagagtccagtgggattcctatttaggagccaaggagtactttggaacagtacaaatatattgctttaaattggaagacgctggaggcactgggatgtgatatgcccctctctctcccaatcagagcctgttgatattacaacagggacagatgtgttagttgctcactagagtttatgtcttatattaaattgtatacagtttttattctaaccactaactaggtagtgtatgccccttcagaacatgcagagtgtatctttttttaaatttctccttccgtttcttaagtattgcgcagatttgttcaactttgtaaatatggacatcactttttttttctttgagaaaacacttgtatcagctttgtggtgttttcagggagacagctgtctgcattccctgtagaaacccagcaatgattatgcacgttgagacatgtgctttttatttcttagcaagatattttatctctgtacataaagtagaaaccaaaagctagggaaacagatactctttacaccatcatgccacgcattgtttttaaagcattgcgttaaaaaaaaaattaactaaaccaagatgctgtgattttttaagttgcaatatg

SEQ ID NO: 10864 - DNA, 1643 bp, Homo sapiens
aatggccttcactcaagtttgagtgtttaaagttgaaagatgtgctctactaaaagttatagtaattctaacctcacattgaaatgagacagtattccttgttatacaggctgaatttgaagattagagaggatctaatgtttacttaggtaaaggggcataggttttgtagttaagatgaccagacagctaaaagctgtgatgggaagtatggactgctcctatttatagtctcagaaaatggacctttaggtctctatccgtattggcaattattagaagaaagttacacccttttgaaactacaaaagctgtcttggaatttccccctcttctccctatttatgtccccttagaatattttagggagcctataattattttctaaccaaggaaaaacttaagtctctttaagaagcaattacttttcataacatcagattgaataacccaccttgctgttcagcccacatcctactggaaacaaaaggtaagaaacccattttctggttcttgattgtttgggtctgaattttgtttttaaaactaagctaagtttaatgttttttaaaatgctgtttggaatatgaatagattccccgtaaaatgatttttcctaagttttatgctttagtaaatattcagtgctcacgtctgtgcatcatagtgcttgcgtttaatatgatttattgtagaatctcaacttttcttggtgtttgttgtctttgaaacattgtcttggtcattagggctggtgttttcacatttctgtggtcaaggtggatttcttatgtgtgcctttttgcttactttgtatatgaattttgtaatttaaattgcaagtaagttatatatatgtatttaccataaatagtattaaaagatgagaaactgttagactgaagttctgttgtaacataaccattatttccatcacagtatgaagactgcaaacgcagaaaacagattacagtctcttatccattttttgaaatccaaaaactacgaaaacaaaagattttctgttgttgagctaattaaatgtgaaccctgaccagaattgctgccttcattttgcacttagtgtgactaaactgtttcctgttgaacttcattattcattgcacagttgccacagactttgctgagggttttatgtaatacagggtatatatgtacctcataaagtgcatacagctctgaatcccagatatgtctgtctccaaagagttcatataagggattgtaggaactgtactagcatacacaggcctaatgcttttgtctgtaactggggtgtcttgactgaaaaacctgttattgtgaatcctttgttgattgaattttaagttcccccatctttttaggctgaagcagccacaagaaaaaaaggtatggcccacatttctttacattctgttgtaatagtggactcaacaattatatcccattgaagcaaatactcaggcatcctagagtgtacaatacaacattcttttgagttattgtttctgtatcagtacttaaaggaacattgaccaattagatcctataggaaaagctgggattggcatgaagtaaagagattatcaggaaacatctgttcattatgtctatcgtgattgtctattgaatgaatagta

SEQ ID NO: 10865 - DNA, 3541 bp, Homo sapiens
cagaattggatacagtggtcttaacagtggaatttcaaggtaaggattcaggcaaggttgtccaagtaaattgccagatttctggttttagttacattgtattcattcagcatgtctgaagatagatgaaagcttagatctttcaatggaaagttctgtctatccaatagggagaaactgcctacatccgggttaaagttgatgggcccagaagtccaagttatggaagatctcgatctcgaagccgtagtcgtagcagaagccgtagcagaagcaacagcaggagtcgcagttactccccaaggagaagcagaggatcaccacgctattctccccgtcatagcagatctcgctctcgtacataagatgattggtgacactttttgtagaacccatgttgtatacagttttcctttattcagtacaatcttttcattttttaattcaaactgttttgttcagaatgggctaaagtgttgaattgcattcttgtaatatccccttgctcctaacatctacattcccttcgtgtctttgataaattgtattttaagtgatgtcatagacaggattgtttaaatttagttaactccatactcttcagactgtgatattgtgtaaatgtctatctgccctggtttgtgtgaactgggatgttgggggtgtttgtggttatcttacctggggaagttcttatgtttatcttgcttttcatgtgtctttctgtagacatatctgaagagatggattaagaatgctttggattaaggattgtggagcacatttcaatcattttaggattgtcaaaaggaggattgaggaggatcagatcaataatggaggcaatggtatgactccaagtgctattgtcacagatgaaattggcagtattgaccttatactaaaaggcaggggttaaaaatgattatatacattttccttaaaacacttgcaaacattttattcagttgtctttagctacaattgctttgctttttaaaccttggcaattgtggcaaaattatattgcccattttgtagcaacttattttgctcccttccccccatttttgttttaatagggactaatgtgggaagaactggctaatttgtcacagtgcttagttacaactgttaatgtgtgacctgctgttggtgtacatgtgggtacagggtgtttttaaatccaacaagatagagtataatatcaatactgctaaatctgcatgtcctctgtgtgactgatagagcgttgctatttcatttttttaagacaaaatgaaagcaaaatatagagttccaatgtattggtgtagataatctagttgggaatacttttaagtctcaccttcccctttaaactaatattcataattggttcatatgtttaaaagactttaatttacaaattaaattgcaaatgggagcattagatttagttttagacttaggtgggtagcaatgccagtaaacttaaattacgtaacttcttgcaaccacgaaacctgtaatacgctgtacagtaacaagtgttggcattatcagttgaactgtaaatacaaaatgcttcttccaattagtctctatgatgattaagtttctaaaatttatctgaacaccattcagaaacttgttttggggaatttgatagttattgatgtgcatctgttaaactgatgacagacataactcatcattccccagaaaccttttttgattacagtatctaacattttgcctcctcttttttggttttgctggttataaaggtttggattggagagggctcactggatcccaatccttggagctggatcattggattcaaatcataatgtggataggatagggaggatgaattaccaggattcatggagcgggatcagattaccaggaacataggagtggattcctgccccaaccaaaccgcattcgtgtggatttttttattcaacttaattggctattccaaagattttttttttcctatttttgacgattggagcccttaagatgcacgatggaattgtgttttgcgttttttggtaaaaggagcaaagcgaggacctggagataaacgctggagcaatctccttggaaggattcagcacgagtagatggtaaacatttaaaggggaaagggggggtttgtttaaaatagtaaatcagtaagtcacttctaaatttaaagaaaacaaaattggagttgaagaataagtaggtttccaattggctattgccgttttctttgaaaaaataaacattttttaaaaaactatgcatggttgtcctttttcctcttcatgtaagattctaactgggtctatcagttaatctttaaattgttaagtaagataagattttgactcttgtgttaatgtgttagcaaattaaaagttcttaaaaggcaatctaatggtattagccatcttttattgttaattgtaaaagtcttcaggggaaagcaaaaggggagaataaggcatttgtgtatgtaacttggtaaatgacggtgggggatggatctagcatctgaaagataagcttctctactttgttataaagtggttaaaaaactatagatgctgcttattttctggtggtcatagacaacataggcttttgtgcaaaattggttgatggctactaatgttcacttggagatagcttttgatattctcaatgaaactcatctcaaaaaaaggtaagtattaaatgttaacatcagcacagatgtattagaactgttttttgtttttgagacagagtctcgctctgttctccagactggagggcagtggtgtgatctaggctcactgcaacctccacccctggatttgagtgattctcgtgcctcagtctcccaagtagctgagactacaagtgtgtgccacccttgcccggctaattttgtatttttagtagagatgtggtttctctgtgttacccaggctggtcccaaaactcctggcctcaagtgatctgcctgccttggcctcccaaagtgttaggattacaggtgtgagccaccatgctcagcctgtagaacttttaacccaagtctcatttcttttttgaaagggaagagtgcacaagattaactgcttctttggatgaatcattgttaataaaaagctgggcatttagaattttgccttataagcccttctccaaccataagattattttgtaccaaaaactttggtgttctctaccaaagcagttaaaaacttttagcctgctacttcttgtatttgtctactgacagccccttggtactatttaggttgggggaggggacctaaaataaatagactttaacatttcccttgggtgctaatcatagttggaagttgaatttaaggtgattatttgggtgacaattaaaaacctaaggaaaaccagaaatcttggtagtggaagaaatgtgtaaggtcaccccaatcggtagattttaatgaacgttgtggaatgttgggaagaggggatgttaagttgaatgcagaatttcactaagtacttagtgtaagtttaaggatgt

SEQ ID NO: 10866 - DNA, 1258 bp, Homo sapiens
agttcattccaagtatccaagggatgagcctcagtgcctggagctgagaccatttctgaacttgatgtcagcagttgctcgggaaaagccttgcccttcatggccccttctgacttaggcagcattgctgacatatcagacagaagtttttgatcatattataataataacaataaccatttatttgagcatttaccatgttctgtgctaggtactttacataccttatttcctttagtctttacaacaaccctttgaggtgaacacttattaccaccttataagtggggaaaccgagattgaggagctaagtagtctgcccaaggtggcatagcttgtaagggcgagagtcaggattctgccccagaccagctgactccagggcctctgcttcacggtaaaatggcggtgagtcaggtgcttacgcctccagctcttgctgacccttcccactattgcttttcttcttcccattcagaactgaactttggtctagcttgggttgcatcttgagttttggtttggtttgtttcctcagctttatggccggcacaaggagtatctcagcagcctcgtaggcaccgactttgagatggtgagtagcttggcttcctgcagcactgtgagctgtgtttagccggagcattctgactgtggatgagttacactacctctcttaaaggcccaaaggtatactctacagtgtgaaaaggaagtcaaagaatagcacatatagtccttgttatgtgttttgcaacattgcatgttgatagagaactgttaatgctaagaaaaaggtctgaaaggctatgcacatgctgtgggtggctttctctggggagggtgggattagatgtggtagaagggtagtgggtggtgagagggatatattagggatttttgctttttattccctaaacttaggtagctttgaatttttatcagttgtaatgtatttaggtattactttataattaatttaaaaaataaatataaggatgaaaaatgtcttcttcacctttcatgtggatattttttcaaaataccccatagagaggcaggggtgccatttctgtttgtcacatattttggctcttaaaaaatataggcctgatgcggtggcgcatgactataatcccagcactttgtgaggccaaggtgggaggatcacttgaagccaggagtttgagagcagcctgggcaacatagtgagaccacatccctacaaaaaaaaaaaaaaaaattagcaaggcatggt

SEQ ID NO: 10867 - DNA, 1224 bp, Homo sapiens
cttaaggatgaactctctagagaagcaccttcctcctacaggaggggaaactgagcccacagtgagtatgtaacttgaccaaggtcactgagccaggactggacccaggaccctcgcgtcctggtccacccacctcgtctactagtgtcccacagtgctgcgctagtcccttctgccacccttcccagtcccaggacgggccctggagggagaaaggagcctgtgccccctgatggctctggctgtcctgatcctgtcttccctcccctgaaggaaagtttgcactggattttattggagccccatctccccagcgggcaggcgggcggagcctgtatatatgtatatactcagtgcctcagttcagcttcctccacctcgcttccactgcacaggcccaggaaggagaaaggccaagccaaagtgggccccaccctgcccccgtcgtgctccatccttccctgccggggcctgctggcccctgtaaggtcccgcccccaaagaccctggggccagcggggccgaaagcggagttgggtttgccttattttgctcattggattcaagttcttttgcatagttttcttctaacccctgttggagtccaggggctggagaaaaggacagatttatgcagctattttcatacattccctgttcagagtggggtaggggttctccgccgttacccgatccactccatcccccaccctctgaggggtgagtgtgtctttgcatgtttcctttgctgtggtgggagatagtttgactgaacccccaccttgaccttggtctccaggggtgtggaatggtgggggaatttgtttaaaaagacattttattataataaagtctattttcacaaaatctatgctggactctccatgggcaaaggactccttggaggggtggggcagctgggctttggactctggacttcagaccccagaagttacatcctaaggctaacaggggcaaaaaccaatcaacaccacgagcttttgaatccttttcctaagaaggtggtttggtagcttcctgagcccgtggtcacagggtcagatatttgctactggggctggggttgtggaggaagatgggacagacgggaaacacacagagggaaagcaccagtttcaagatggtggactgaacacacactgcagtctttctcctctataccaaatgcacagaaataatagacatgagagaaatagaacaaat

SEQ ID NO: 10868 - DNA, 2053 bp, Homo sapiens
atgacccagttctcgtctgtaactcatgttacgaacacattcaagtctctcgtgccagggaactcatgagccaacagctgaagaaacccattgctacagcttccagttgaatgccggggagaaacctgtccaattttagcaggtttgaagggaggatcttcttcagttgtagtttggaaggttccttggtgtggctcatgaaatcacagagctcagagataccatcttgagaaatcctccttggtatcatgaaactggagcagaggaattgcaatttagcaggaggtcctctactggtgataccctcaccttggggtaatggtcctaacccagacccagggtctggaagcttaatgttgagttggtgactccagcctctttctcctggaggtcacaagatgatgattgcgtagatgttgcctggtgcaaagtgccccaaacagcaatagaaaggcatatgtataaccaaactccaagtgataaccagacccatctctcctccaccttgacaaaagcagattatagtatacaaggtaggaattcctgtcctatttgagatgaactatatcctgtacctctgtgctctgtgtctgcatgaaggctcagcctttagaggcactccttctagttgcattagtactgtctttctgtggagtttggtttgaagactggctcagcaagtggaggtttcaatgtatttttcagttggctcatcagccagcattggtgaatattcagtttaggggaacagttctagggagtgagacatttttgggagcagaggaaaactctgctgatgttcggtcctggcaaacattgagttattttgagctgtgaaggcagtcgtctctgttacacagtggcagctcttgagttatgcactgtgaagaatgagaagggaaaagcaaaaattatccttgtgaaatatctgctgattgtgccctactctttgcacctgacttttcctagttgtcctggtgctaacacaggagctacaccttgatcctctcctggcatgaaaataaaacaaaggttttcgttgttgttgttccattgcccatttcccccatgttgtctttcccttggctgatgcctcctctgggtcacattgcttcttatcctgaacacttgacaccttgagggtagaatttagcgtttggtttttacctcctagcatatgctgtttggtatgtgagggtttcagtacaaatgctgctgtctatttctgtgcacttaacaatggaacccaaacagaagagaataaagccttgataccaaaattgggaaagaacatgtgtccatttggaccaaacgttgttggtttttaaaaaattttattttgtttttttgtttttgtttttgttttttttcatcttaatatgtaccagtggcacttaaccaaaagatacagtgatatagccatgtactgtgggtgggacagatacagtctccttggcctataatgaaaccactaggactttatacagttttccttaatttgttgacatataaatggtaaattatatttaggcttatcctgttttgaaatgatggtagtcatctttcttactgctactttcatgttgctttctagaaaacagcatttcattccaaaataactaggatctgcatttagaacaagaatcattatttgtcctgaccttttcagtcctacagagacgcatctgtggttcttttgtacttgccatagatgtaacctaaaaagttttggcatatttaggtcagcctagcggaactttttttttcatttaaatggagctgaataatggagattttgtgtctgcaaaattcctgagatcattgaaaaagtaacaagctgttccttgtttctgatacataaaattattttaagcattttatcaatcattaaaatttactgccagttgtgagtggctttttaattaacttgtctttcattgcacttcactctgcctgttttcaaggggagtaagattggtaacatttggggagactgtatctgtctacttagcgtggctgttttgagggactgtcccatcagtgaacaaactgc

SEQ ID NO: 10869 - DNA, 2319 bp, Homo sapiens
ctctattaatttagcaaatttgtacattcacaaaaggcagtttgtctactacagcagaaggctggttaactgccagaaaatgtacctccaggccctgcatgccgtcagtaacccgcccggcattggtgctctactgtctttggctagagcttagttgtgtttaaataatcatctttatatttggggttttaattacagttccattagtgcctgtagattagtgaacagaaaattgctttggaagagattctgccctgtagacactatgtgaataactgaagtaacactagactgaatctcctttttggagtatgtatcttctctcacttgttcaagtacaggcacactgttcaaccgcatggtatctttctgttgtgtgacttctacaaatgtaattttaaatgaaattaagttaacatggattcattacgttcctggccctgtagacacgtgtaagattatttaaaattctttcatttttttctgcctcttactatacgactgtagtgcaacaaatattttaaagcccccttttcttctttattttcattagttgtacattgatttcagtgtcaacacatttaaagattcattcatgttgcacagtggcttacatgaacgtgaaactgtgatataaggttttctttcatactcataattagcccaaaacagttgccaaactttgccattgtgctcctgcatttgtgtttgagctgctatatatttgtggaaattacactgaaagttgactaagagactattgaaaaagcatgaataattaaatatacatgtgagagacatctcatctgctgtattttacttagtgaatattgttcactcttccgtgtctgatgtcttgctgaatgctgtgactcatagtttacttttgttcaaaatagtttgcactttttgttaataaaatcaacttgagaaaatatgcctctgctgtttattaaattgggaccagaaaccccttcttttctactcattgcctcattagtagtgtagagaagatccaaacatttgattagtttgtgtttagtctaatggcgaggagtgatgcctagcatcgatcccagtcattctaaaattagaataaacctgaaaggccaaaagatttcttcagagatgatagcttttagttcagacctgtttgcttttaggacaggaaagtagtttccccctcgtttccaagccaccttatatactaaagctgctctgagttccttggtgatgtcgggaacaccgctgttttccctcttccttgatgtagtctgctatgctaaattttaggtagcagagagggaaggaagaggcacaggagaagaaccagttgctccactctctgcttgtcctactttcttgctctttctgtaccctgatagagccctcagcatgtttttttatttttatttttgtaacctttccttttttgctgaagaacagtctgctgttaccttgcttctgtatttagtattttatctcaagttcattcctggaaaatctctcctgaatagagttttcttagggctagagatacattaatgcttgtgttgtctgtgaacgtgtcctttctggacaactttaactacttgtgtcattgatctttaagtaacctttgaggtagatgagttgtgtatcaaacctgtttggccatggagccttaggttcagggaggttgtatgattctcttcaggttcaaaaccactggcagggatggggtgaactgctggtctagtgccttttccactttatctcacttgcagcagacccaacattctgatacctaataatttaaaacctaaagattattctttttttttagcttttaattttgagataatttcaggtttgcaaaagagttgaaaaaattgtgcaagagtttccgtataccctctgcccagcttctccttttgttaatgccttacataatcacagaacagtgatcaaaactaagaagttaatcctggttgcaatattgtttaccaaactacagaatttgttcagatcgcaccagttatttcacaaatgttctttttctgttctaggatccggtctaggatcccacattgtattttgttaccatgtttcctcaggatccttcagtatatgacagctcttccgcctttccttgctttcatgaccttgatatttttgaagaggatgtgttattttattaaatgttcttcttatttgggtttgacagatgctttcctatattaaattgaggttatgcattattgggaaggcccttagtgcatcacatcaggggggatatgatgttgatatataaatatacatatatatacatacatacac

SEQ ID NO: 10870 - DNA, 1247 bp, Homo sapiens
tttgtatgatttttcttaaggagctcacagataatcttttaagttaagattttacgggcggtgtgcggtggcccatgcctgtaatcccagcattttgggaggccgcggcaggtggatcacctgagttcaggtgttcgagacccagcctggccaacatgacaaaaccccgtctctactaaaaatacaaaaattagctgggcatggtggcgagtgcctgtaatctgagctactcgggaggctgaggcaggagaattgcttgaacccaggaggtggaggttgtagtgagccaagatcgctccattgcactccagcctgggcaacaagagcaagactccatctgggggaaaaaaaaaaaagattctgctctacaagcaacaagatgggaatgttttatgacaaaagtctaaaccaattggggctacagaatgttgtttatttttagacagtagagagaacagcttccatgcaaggtaagattaaaactttttctgacagactaaatagtgagttttgtgctgtagtagcctattcagaggtgttcttaaatgtctttgcagccacaaataagaagagtaattcgcccaagccagctcgatccagtgtagcaggtagtctatcacttcgaagagcagtggaccctggagaaaatagtcgttcaaagggagactgtcagactctgtctgaaggtaaatttgagggattcagaatgtacttttagtggggtaaatatttattacctgaaattgatgttatcgtggagctttagatcttgaagggcaccaaaaatgctaaagttggatttgaaagtttctttttttgaaacagggtctcactttgtcacccaggctggagtgcagtggtgcgatcttggctcaccgtggcctcgaccggtggtttaagagatcctcctgcctcagccccaccaagtagctgggactacaggtgtgcaccactacgcctagctaatttttgtattttttgtagagacaggttgcccaggctggtcttaaactcctgagctcaagcaatccgcctgcctcaacctcccaaagtgctcggattacaggaatgagccccaccacacctggctggaaagtttcttgatctcaacagaacagacccttaacaaaatacagccattagactatgtattctaaacaccttaattttatttattctttatttttgttgttttcctgagacagagtcttgctctgttttccaggctagggatgcagtggtgcaat

SEQ ID NO: 10871 - DNA, 1255 bp, Homo sapiens
agttatacactctttggatccccagcttttgggtgagtttcttttactaagcaatgaactatttgtgatgtcctgatttagaactccacagacttgaaagtgcaatatttaacattactgtttagatattgtttaggtcaaacagctttagtgagctatttataatgttatttctgtgaaaaaatgtgataagcccccaagaatgaaatactaagcatgtttttagaatacattttgtttcaagttgttagaatgacagtcataaatgaggtttatggaccatttcctaacttaaaatgaagtttgtggaccatatcctaaattaaaagcagatgtcttctttgttttacctctttaggaatcaagaaccaagtgatcatttataacattctttatgcagaaaatttgtgtttttgattgcatgtctgccattttgaaatataagcaagttgggtcatttccatttgaccttcctctaactacctttttcatattatctattcttggcaatattataatgtggtgcttctgtttttaaaatttacccaattaaaattattcttacctctttatcttctaggaaaggaatgtagaagctgtaagaaatgcaaaagatgagcgtgttcgggaaattaggaatgcagtggagatgatgattgcacggttagacacacagctgaagaataagcttataacactgatgggtaagtgtttatgtatgctgctggggtacctggtgctttcagcttctttgagattcagtctttgaagaataagggtgatcatcctaggaaggaatcttgagattttaggcaactccatgttgttacaatttagacagataaatgttagacttgtatttagaaatgataggagagaaaaattttcatagccatttggatgaaaatccaagttttcatagccatttggatgaaaatcctaatggccagtgggcatcattgttaggtagctttttctccaaatctaacagaattccttctactaatgttccatatcctttccatccattttcattggggatgaagaaactgacatttgtaaacatcggcgtcatcccctgccagcattttcttagagatttaaagtctcagcttttgatttctagtagggttcattttacatatgcttaattatatttattgctgacctttttgcttttcgaagattccttcattcttctttgattgtggagcctggtattgaacttaaattttaagtaagaatttaatccaat

SEQ ID NO: 10872 - DNA, 1150 bp, Homo sapiens
gaatcatatgtttttgtttagctttttgtttcttttcataaatgacgtgttaatgtggtgaaaataagtcacagataatatttttcattgtctttttttttattttttatttttttagttttaatagtattatggggccaggtagtggctcatacctgtaatcctagtactttgggaggatcactggaggccaggagttcaagaccagcctgggaaatatagcaagattcccgtctctacaaaaaattttaaaattagctgggtttgatggtgtgctgctgtagtcccagccactcaggaggctgaggcaggaggatcgcttgagcctaggaggtcaaggctacagtgaaccatgatcatgcatgccgctgcattccaccctgggtcatagagtgagactcatctcttaaaaaaaaaaaatagtgttatggtatgagtattattgtgctctctattttgagaaacgtatttattttataaaataatctcaaattcctgaattagtgtatgtgtatggattttctccccagtgctccactccagctacgagaactagtaaattgtcgttgggcagaagaagtaacacaacagcttgatactcttcaactctgcagtctcaccaaacatgaagaaaatgaaaaggacaagtatgtcctcaatttctttgttcaatattgaatggattttgcctttgtattgtttaatgacactatattggtagttgccttttagttatttatgaataagtagtgttatatttcttgtttttaattctttcagtcatgcgctgttactgttaagtaacatattcttattgtgtttatttaacaacagttatttcatgccatgtatacacagatacctctcgccctcccctccccccacacagaaagtactttgctagatgataggcatacaaaggtaaatgagacatgatttctgttaactgtttaatggggacacagtgataatacagtgttaagtcatttaagggacaagaatgaataaatggtcttatgttccatgattgaagaattttgaacatatctggagagttgttatggggagcaggtaaagaaaggaaagagtgatgtggcagtgattggtttttatagatgaagaagctacaacatggttaattgtaaggctt

SEQ ID NO: 10873 - DNA, 1162 bp, Homo sapiens
ttctgggcctaggcgataccaggtgatgaggcagcacagccgacaacaactttcctttcacattgacagcagcagttccagttcttcaggccagctagtggatttcactcttcgggaattcctatggcagcatgtggagctagttctaagcaagaaaggtttcgatgacagtgtgggcaggaacccacagccttcccattttgaacttcctacttatcagaagtggatctcagcagcttcaaaactgtatgaggtggctattgatgggaaagaagaggacttggggtcacccactggagagctaacatctaagattttaagcagtattaaagtcttggaaggatttttggatattgacacaaaattctcagaaaaccgatgccaaaaagctttacccatggcccacagtgcctaccagtcaaatttgcctcataattacacaatgactgtccataagaatcagcttgcccaggctcttcgagtgtacagtcaacatgctagaggtccagcatttcacaaatacgccatgcagttacatgaggactgctacaaattttggagcaatggccatcagctctgtgaggagaggagtttaactgatcaacactgtgtgcacaaatttcactcattacctaaatcaggtagctaaaatttgttcagcattttgaaataaaaactttgagctgtgttttcattcttgttttaagatagtctgttcactatgtattgatattttagaaagagccctacagaaatttaggtgcatcagctatacgttttctctcctgctgtaaaaggaaaatatcagctatgactactttcttattttttttcatttaaaggatacgtcctagtgaattggtaagtgagaattattaagtagtataaaatttcagacatctcatattaacactttgccttggaggatttgtagaactaaaatgaatgttatgttagatgatggtacatgataatggtagcaggaggaaaaattcacttaaaaactctaaactttacatttataatataaagtattttatatactttcacttgcttcttctgttatgtgtatttaggtaaggtttttgtttgtggggttagatgttgtagaatgcaaagtaaattcgcacattgtgtttatgaaattaatagtggctgttat

SEQ ID NO: 10874 - DNA, 1316 bp, Homo sapiens
gtctcgaactcctgacctcaggtgatccacccacctcggcctctcaaagtgctgggattacaggtttgaaccactgcacccggccagtaaaagaaattttgaaggccattgcagctatttggtagtgtcttgttatttctaggtgtaccttagttaaagaggaaaaataaaacggaaaaaagcttggaaatcagtgatgtgtagttatttggcaagttatacataatcagcagcagccaggctcaagaaaataaaagttgattagttgatcagaaataaaatctgtagagtgaattagatttctgagttgttgttgttaatggaacattctatttgagacctttttcaggtgtgtagcaattctaccatgtccatttttttaagcattaaaaaggaacttaccagttgtaaattaagacaagatccaaatagtcatatttttgtgtttcctctaaaaaaatgtaagatttccatttttggcactgactaactgagcctacatctagattttaaataccatcttgaatcctaataattaaactgatgaaagtgcatatcattgttcctaacatttatgaacccccataaagatgttcctgatctttaaaactcattaatctgagtattaagtagaaacagaattttccaaagcattagacatcactttctcagtttatctgaggtgacttcgtgtacatctgtttctaatatatttgactaattttcatgatctcagattgtgaggtaaatgtaatctggaataataagtgtcttttacctagattacatctctcatttggagtttggcaatgaaactgctatgaagaatgactgtactctcctatctgtccctggatgacataaatatcatttgctttgttgtttaaactgaaataaagttttccaagaacaaagtaagcattcttcattctttttcagttttaattccaaatatactttatagatttttttgcagaatttaatgaggtgatgctttaatcatatgaataataaatgcacctgagatttctctctagtaaagaaaagaaaatatggaaacacttttatggtaagaaagttacttcttggcatttgaacaaataacttgggagggtaatccactgaatcagtcattttcaatttcacttattgtaacttatggttatagttgctagggatcattttgatcatctttgatagaattctttttgttatttctcctttctaaattttgctttgttatgattcagaacagatcatattaaagggccagcttatattttatgtaaaccagtagaagaaaaagtacccaacaa

SEQ ID NO: 10875 - DNA, 1188 bp, Homo sapiens
ggtaggaatcatctcgctgagtcaaggtgaagctgggaccagaccgtggtgacgctgatacctgtcatctgcccctgcttctctgctacaaaaggcatttccttggccgggtatggtggctcacacctgtaatcccagcaggcatgagggaggccaaggtgagtggatcacctgagctccggagttagagaccagcctgtccaacatggtgaaaccccatctttactaaaaatacaaaaattagccaggtgtggtggtgggtgcctgtaatcccagctacttgggaggctgaggcaggagaatcgctcgaacctgggaggcggagattgcagtgagtggagattgcgtcattgcactccagcctgggtgacagagtgagactgcctcaaaaaagaaaaaaaaaatcattttcttgtctttggtcgttcagtatctcttctctgcttctgtatttcctaggaacatgcttttgaaagcagccagaaatataaagaaggcaaatacatcattgaactagcacacatgatcaaggacaatggctgggactgattggacagcatctacccaacccagtgtccacgtgaacgccattcaaccgaacattcttcccaagcgtgagagagtgactgacacttggttccatccatttaggggccttgccatccggggcatcctcccaccctgacgccatctttctggtgaccggcctctaaatcgctgtctctctgtctctttgctttgtatctgtttgtgagttgatcctggcttctctctctgttctagttttggctgaaaacaaaacaacaaaaggaacagatccttgaccgcatggcggcagcccaccttggtaagggccccagggcccatgcgagagctgcctgatggcctcttgtcaggagagcagtggcacgggggcgtgaggaagagggaaaggggaaactctaagggtcctggcgcggggaaggggtggaagggtggaggtaggaacaaaattgcgccgctcctggagacctgataacttaggcttgaaataattgacttgtctaaaaggacaaagagaaaaaaaaaatacctcatgactgcattctctctgactagaagcttctgttcctgacaccaaatgtgccaggttagcaaatgagcacaagatgtggccctgattctagttggtggggcaagggcctggtt

SEQ ID NO: 10876 - DNA, 1213 bp, Homo sapiens
attaacgaaaattaccaaaaaattcttgtaaagaaaaatcctaaaattaaaaggagtataccttaaacaacttgcaagtgaaccctaaatgtcatttagatatcatagcttcttcagtgtcattttctgtaggttatcaagattgaagtcctcaagaagttttaaattatgtggagttgtctttcagagctcaattaagtgggaatgttaatttttgatactgactgtgttaagaatgaatagatggtatcaaagcagttagtttggacaatgaagtaagttatttagattatagaatagccatattttaggaaccacataatggcctaacaccctatgacatttgttttcaaatctccttaattttttttctccttgtcttccttcctttcattattttttaatggcagcaagaaaacagctgtcacaatttcattacctttgtgactcagtattaacctgttctaaacagatttggtatcatttgtatccaaatgaacacattgcagctacattttattctttaaattgcaggttctgtcagtgtgtgtggaagaagaaaacataattccttacatcaccaatgttctacaaaatcctgatttggctctgagaatggctgtacgtaataacttagccggtgctgaagaactctttgcccggaaatttaatgctctttttgcccagggaaattactcggaggcagcaaaggtggctgctaatgcaccaaaggtaaagagttatgaaaatgaagttgtcatgacattaatccattgttaatattctgtttcttatattactagaaaaggaaccagcttcctacagataaactgtttttagattacatttgggttacattttcctttagtagaattccttgtcaatgcctctagatttggttaattttctctggatttgattagttttttaaaacccagattgttagaaggatatgtgggtctagcaagcttttgatttacatagatgtagtaatgtttagtcatttaggtgttatactgtttgacctcataaatgatagttactgattttatttccataacttggacatgaaatacatactgtccaattttatagtgggtagagctgtcaaaattaggctgaatttattcttatcacttttgatgttagtttatggtggactgaattaacaccttacattcctgaccaatattcattatgaaatttgtactta

SEQ ID NO: 10877 - DNA, 1199 bp, Homo sapiens
cttttattcagatataaggaggtaagtatatcatatagcagataaacctgggagagtgaaaaatagccttatataccttctttttattcttggacaactcaatcatattttgagtcttaatttcccaatttataataggatcactgataattaaaattaatgtaaagccaggtacagtggcttgcacctatagtaccagctactcgggaggctgaggtactaggatcacttgagcccaaggctgtagtgcacaatgattgtggctgtgaatagccactgcacttcagcctggacaatgtagcaatactcggggggcggggaaaaagtatgtgaaagcacattatagaccataaggtatttacatagttagcatgtcaagagtgtgttatttataatacagtatgtgtgtgtgaggtttttttccttttttcctagattgaaactgcttctgccttggctagaggccagaattcatgagggctgtgaggagcctgctactcacaatgccttagccaaaatctacatagacagtaataacaacccggagagatttcttcgtgaaaatccctactatgacagtcgcgttgttggaaagtattgtgagaagagagatccacatctggcctgtgttgcttatgaacgtggccaatgtgatctggaacttattaatgtgagtactgctagctgaatatgtagagaagctgcatttttaaaaacctgttacatgagagtttcagggtaattttaggtaatatgggacatttggggacggtgggtgcttttttaaaactttatttggaaataattgtgaatctgaaagtggccaaatagtggataaagtctatataccctttattctgattgacttgctaatgttttaaccccactagccttaccatttgtgttctcacactcttacactcaggcacaccattcatacatatgtgtatacacacacatactattttttaaccacgtgggaataacttgaatgcatcatggccttataccccttccgagtgtatggcctaagaataaggatgttctctttcattaaccacatgaaagataccagcttcagtcagtttgacattgataggatacctttaaaaatctgttctattctagttttgtcagttacccaatgatgtcctttgtagcagttttttcccctctagtctaaggtcatatatggcatg

SEQ ID NO: 10878 - DNA, 1198 bp, Homo sapiens
gtgataatacagaagtgaaatattgcacggtttacatttgtcattatccatgtttccttgaaaaggaaatgaatgcaattttcatttacttgggtgaaagataaactaggatgttagtgtttggatatattttttctttttctatacttaggaaactgggaagaactggtgaagtacttgcagatggcccgtaagaaggctcgagagtcctatgtggagacagaactgatattcgcactggctaaaacaaaccgccttgcagagttagaagaatttatcaatggaccaaataatgctcatatccaacaagtgggtttccttttcagatttaagaaaaactagttgggctacttgattagcttggtaggatcaaaacatcataactgaagaattccaaggaaaaatctataggaaaacaaattctttctcattgtgaagatatcaatttgaaaagaggattaagctcacactaatatcttgctgaatgtgggttacctttttttttccaggttggtgaccgttgttatgatgaaaaaatgtatgatgctgctaagttgttgtacaataatgtttccaattttggacgtttggcatctaccctggttcacctgggtgaatatcaggcagctgttgatggggctaggaaagctaacagtactcgaacatggaaagaggtaatctaaacccaagtttgagtgaagaattaaagaaacgctatttaaacattagtttaaataactagccatgttttacatttgagttcacagaaaggaaatgtttattctaggtctgcttcgcctgtgtagatgggaaagaattccgtcttgctcagatgtgtggacttcatattgttgtacatgcagatgaattagaagaacttatcaactactatcaggtattaacgagacttttatatgacctgagatcttttaccatagatattcttatctttaactgcacatttctcttgttcaggatcgtggctattttgaagagctgatcaccatgttggaagcagcactgggacttgagcgagctcacatgggaatgtttactgaattagctattctatactctaaatttaagcctcagaaaatgagggagcacctggagctgttctggtctagagtgaatattcccaaggtaaccagtcattgtaacacagtgaagcaactgtgtagttaaaactaatgcttca

SEQ ID NO: 10879 - DNA, 2103 bp, Homo sapiens
cagtcataagcagttctggcctttggccctgcactgtttgttggctttttaggtaggaaccttcttagagtaagactgtcatgctaaaattgtagcaatcaaatgtgccccccatacaactcatttgaggttgagattatgttgctagagtggaggagattggagtgttctaaatgctaacagtttgtcctgcctccttgcccctgccccctgctcctttttgttttcttctactgtaggtcagccccagttgatgctgacagcaggacccagtgttgccgtccctccccaggcaccttttggttatggttataccgcaccaccgtatggacagccacagcctggctttgggtacagcatgtgagatgaagcgctgatcctgtagtcacctattttcgtactgaaacatcgtctttacccacttctcagtttataatgggggaaaacaggcaacgtgttcttgtaacctttatttcatgaaggacttctttttgtttctaactataaacttggatcacctatgttaaaaccttatttcacattccacatcattttagaatttattttcgaaggggaatagtttcaatgttttattcacttgggctttttttcttccccctctttctttaaagaactgctcaatattcaatctgttgtgaagaacctgatttgcactctgtagtgtttaaagaaacaaagaaactctaatattgaatctcttaaatttagtgtatgtaaacagcttacaaatacgtattgtctaaatgcatttaaatctgttttattcaaagaaaagctaaagcaaaaacactggcatatgaccatgcaagactgtcagtgccaacaaagacaacactaatcagcacatcgtacactggattgcagtgcttcccagattattgaaaaatgttacagacaacttgcctgatttttaaatgagcgtaaaaggccctctaacctatgcaggtttccccattatgcatatagaaaatgctagtatgttttgctcacttcatatgtaacaggtgcccttatgttgtgctgtatcctgtgctttttctgtgggaccattccattcaggagcaaagagcaccatgattccaatcttgtgtgtgtttactaacccttccctgaggtttgtgtatgttggatattgtggtgttttagatcactgagtgtacagaagagagaaattcaaacaaaatattgctgttcttcagttttgtttgtggaatttgaaattactcaaatttaaaataaattactggactgtggaaataacatagaattgaagttttaattaaataccactcaaacgaaaagaacagtagtttttgtagttttatattggatactgaggcattagggaggcatgaaaggaagaggaatgaggattgagacatgtgaagacattgtgcattatatcaatgtgcattcctgtagttcattaacaaggtacatgcaatagtctaaagaaccagagtcactactatagtggcttaacatttaatctgtctccaatattttaaccaagtgacaccgaggtttttatcgaagcatttcacttaaatgaacaaatcatggctgttatattaacttgaaataaaatatatttaaacatgtagttaacatgctctttctcatcatgaattataaaggtgcccaaattatgggtatcttgatttttttcaaaaattggttgtgtgaatccagctcttgcttatggctgagaatgttcctaaagttcatttcactatcccttaatcctcaatagctacacatacccccttgcctagttagtcttgcactgctttacaactctcttaggcaaattacctaacataagctccacagaagagttttttaaaacttaaaatccctgtcccaccaggtgtggtggctcatgcctgtaatcccagcactttgggaggctgaggcaggcggattgcttgaggccaggagttcgagacaagcctgaccaacatggtgactccatctctactaaaaataaaaaatcagccaggtgtgatggtggatgcctataagatcctagctgctactcaggaggcaggaggctgaggcatgagaatcacttgaacctgt

SEQ ID NO: 10880 - DNA, 1170 bp, Homo sapiens
tctgtttgttactttcaaaaggcccacatgatacaattagagaattcccaccgcacaaaaaaagttcctaagtatgttaaatatgtcaagctttttaggcttgtcacaaatgattgctttgttttcctaagtcatcaaaatgtatataaattatctagattggataacagtcttgcatgtttatcatgttacaatttaatattccatcctgcccaacccttcctctcccatcctcaaaaaagggccattttatgatgcattgcacaccctctggggaaattgatctttaaattttgagacagtataaggaaaatctggttggtgtcttacaagtgagctgacaccattttttattctgtgtatttagaatgaagtcttgaaaaaaactttataaagacatctttaatcattccaaaattgtgtccgttttcttgagcgttttgattttttacttttagcttataccagctgaatggcagccttgcctaatccacctacaacaagaatttcttaagctttcttttatttgcatgagagagccactaccaaggcatgttttgttatgctgaaactgggctgctgcatactgctaaatggcacctctgggattggcctacctggggatttcttggtttgtgaaaacaggagaggagaaatatctcatacaagtgaaaggatactggagagagaaattacccatttctaaaaaaaaaccacactctgtcgtatctgtgttaatgttttctagcatgtactctggtttcaacagacacaaatttatatgttaacccagttttcttgccgttctgtaagtgttttattcttagtgtgatttttttccattgggatgtttttgattgaacttgttcattttgttttgcttgggaggaaaataaacaattttacttttttcctttaggagcattatgagcattatgtcagaatagaatagaattggggttcgatcttaacaggccagaaatgcctgggtttttttggtttgtttttgtttttgtttttttatcaaatcctgcctgactgtctgcttgttttgcctaccatcgtgacatctccatggctgtaccaccttgtcgggtagcttatcagactgatgttgactgttgaatctcatggcaacaccagtcgatgggctgtctgacattttggtat

SEQ ID NO: 10881 - DNA, 1170 bp, Homo sapiens; identical to SEQ ID NO: 10880

SEQ ID NO: 10882 - DNA, 1206 bp, Homo sapiens
agtgagggtgatttaattgtagactatcatttttctacctatgggtaaaatgttaaagagtctttaatcaatatatatattttttaacctcaggtctggaatctacagatattttaaagtttgtagatataaaacctggaattccaagccagttctagtttttaaatatatgtgtgtcacagaagaataagaatgctactaaaaatagaatcctgaggacttagttttaaaacctataatttttaggatctgtttttcatttttaaggggctgatgtcttttaattatggttagaaggaaagcacaaactctctcattagaagtgggttggaaataaatattgttttatttataatgttttttctttttctttacaggaggagaactatttatgcagttagaaagagagggaatatttatggaagacactgcctggtaagtgaactttttgtggttgcatagattcaggtaattacaagcaaagccccattcccactatgggcagccacatgattcagtaaattgagctggagccagtcactcactcaggacctcaagggggagaagcagttttgggactgggcagctatggaggtcacatcattcctttgcccttaggcttgagtggaacgctcttcacaccagttgttcctaacagaaccattctcattgcggctttctttccttgaattggtaagctgcctgccttggctgtgggtgagtgtggtttcccagtgaacctttatgtgtggaacaatggaaattatcagaaatcatccctttttttttaggctttctatttctcaaggtacagtcttagggaggtgataaacctgggcatatcatctgtagattgattatgtagtcagggtgggatttaccctcctatttctaaacatgtcatctgcttcaaattaaaaatatgcacatccttttgtgaagcaacaatattgggtcacaataaatcagtttatcctacacattaatttaatagaaaacaacacttaaatgtttttttctaccttgattaccaaaactgcattccattgtttaatttcaggccttttctaacaaagaagctgcatttaagagccttagggatgaagtgcccttttttggaggaggctcactgagccgtgttggaggctgtgtttgtggtcgtgctggctgtgaaactgcctcagtcctctaggacacaccctctcc

SEQ ID NO: 10883 - DNA, 1596 bp, Homo sapiens
gaatctatgacagagcaatgcttttaatgaatttaaggcaaaaaaggtggagagggagatgtgtgagcatcctgcaaggtgaaacgactcaaaatgacagtttcagagagtcaatgtcattacatagaacacttcagacacaggaaaaataaacgtggattttaaaaaatcaatcaatggtgcaaaaaaaaacttaaagcaaaatagtattgctgaactcttaggcacatcaattaattgattcctcgcgacatcttctcaaccttatcaaggattttcatgttgatgactcgaaactgacagtattaagggtaggatgttgcttctgaatcactgttgagttctgattgtgttgaagaagggttatcctttcattaggcaaagtacaaaattgcctataatacttgcaactaaggacaaattagcatgcaagcttggtcaaactttttccagcaaaatggaagcaaagacaaaagaaacttaccaattgatgttttacgtgcaaacaacctgaatcttttttttatataaatatatatttttcaaatagatttttgattcagctcattatgaaaaacatcccaaactttaaaatgcgaaattattggttggtgtgaagaaagccagacaacttctgtttcttctcttggtgaaataataaaatgcaaatgaatcattgttaaccacagctgtggctcgtttgagggattggggtggacctggggtttattttcagtaacccagctgcaatacctgtctgtaatatgagaaaaaaaaaatgaatctatttaatcatttctacttgcagtactgctatgtgctaagcttaactggaagccttggaatgggcataagttgtatgtcctacatttcatcattgtcccgggcctgcattgcactggaaaaaaaaatcgccacctgttcttacaccagtatttggttcaagacaccaaatgtcttcagcccatggctgaagaacaacagaagagagtcaggataaaaaatacatactgtggtcggcaaggtgagggagatagggatatccaggggaagagggtgttgctgtggcccactctctgtctaatctctttacagcaaattggtaagattttcagttttacttctttctactgtttctgctgtctaccttccttatatttttttcctcaacagttttaaaaagaaaaaaaggtctatttttttttctcctatacttgggctacattttttgattgtaaaaatatttgatggccttttgatgaatgtcttccacagtaaagaaaacttagtggcttaatttaggaaacatgttaacaggacactatgtttttgaaattgtaacaaaatctacataaatgatttacaggttaaaagaataaaaataaaggtaactttacctttcttaaatatttcctgccttaaagagagcatttccatgactttagctggtgaaagggtttaatatctgcagagctttataaaaatatatttcagtgcatactggtataatagatgatcatgcagttgcagttgagttgtatcaccttttttgtttgtcttttataatgtcttcagtctgagtgtgcaaagtcaatt

SEQ ID NO: 10884 - DNA, 1171 bp, Homo sapiens
ttaaaccattttcataattagtagtgccagcaatagtggcaaacactgcaacttttctgcataaaaagcattaattgcacagctaccatccacacaaatacatagtttttctgacttcacatttattaagtgaaatttatttcccatgctgtggaaagtttattgagaacttgtttcataaatggatatccctactatgactgtgaaaacatgtcaagtgtcacattagtgtcacagacagaaagcacacacctatgcaatatggcttatctatatttatttgtaaaaatccaagcatagtttaaaatatgatgtcgatattactagtcttgagtttctaagagggttctttatgttataccaggtaagtgtataaaagagattaagtgcttttttttcatcacttgattattttctttaaaatcagctattacaggatatttttttattttatacatgctgttttttaattaaaatataatcactgaagtttactaatttgattttataaggtttgtagcattacagaataactaaactgggatttataaaccagctgtgattaacaatgtaaagtattaattattgaactttgaaccagatttttaggaaaattatgttctttttccccctttatggtcttaactaatttgaatccttcaagaaggatttttccatactattttttaagatagaagataatttgtgggcaggggtggaggatgcatgtatgatactccataaattcaacattctttactataggtaatgaatgattataaacaagatgcatcttagatagtattaatatactgagccttggattatatatttaatataggacctattttgaatattcagttaatcatatggttcctagcttacaagggctagatctaagattattcccatgagaaatgttgaatttatgaagaatagattttaaggctttgaaaatggttaatttctcaaaaacatcaatgtccaaacatctaccttttttcataggagtagacactagcaagctggacaaactatcacaaaagtatttgtcacacataacctgtggtctgttgctgattaatacagtactttttcttgtgtgattcttaacattatagcacaagtattatctcagtggattatccggaataacatctgaaagatgggt

SEQ ID NO: 10885 - DNA, 1277 bp, Homo sapiens
aagatggcagacacaagcagtatggatgaagactttgagtctgattacaaaaagtactgtgtgttacagtaaagctaccactctggctgctagacagcttggcggtgagggagatgactccttgtagctgacatttggcaaaagcgtcactgaaaggcaagctaaatgtagttattttatcctgtggccctgaagcacaaaataaaaattctaattaaaatagttaactttaagagtagtaatcattttattttgaagtctcatacaagctctccgatagagaactttcaggcagatcccaccattagcctgtaaacaaaaggtttggcaccagccacctgggaccaaataagaattcaattgtgcttgtccagatatgaacaaatatgtagtgagtatagagtttaccataatcataacaaatattaaagatttccttggagtcagagtaaaaaacaaacaattataatgttgtctagggacgacatgatatgctacctcctttttcctgaagttttattccattatattgacaagatggagaaagcaagatcacgaaggtgtgcaaatgattcttaaggcatggacgaggatttttcaatttattttttaaactgtttccataccctttctttgtctttcttgctttttgtttttgccgttgtatttatgtttgagacacaaccagtcattggtggcaggggcatatagtggtcagtctgaaagggaggctctcttaagagctgtgtgccttccacccagagccttgtgggagacccagtagaaagaaacagcatcctgggaaatccagctaccatggccctcccagtggaggcatcttacatttaggatacttcaagtatcctcagaaatgtattctgcacccccggccccacccatgctgagggaaggggagcagttgccaatatttgcaccatcttcacatgcacctgttgcaacaagagcttctgggaaggtaagtggcattggagctagatcacgtttcacaattagtggttgttcttttctgtgtttgtcttgcactttaaaaaagagagaacacatgcaaatgaacttgcttgtgtgtatttgatggctctaagggctataaattacaaacaaaacacatcccagacattaggagttcataagtgtatttaatgaaattggtggttttaggaagtcaactttagttttgctttgtttgcatgtccactaatttttttattttgatatttgtcttttttttaaattttacagtagtcatcgaaagttat

SEQ ID NO: 10886 - DNA, 1103 bp, Homo sapiens
ttaacacactaagaaattaagagtaaagacaaattgacaccaatcatgtctttctacataccagctggggaaacaaataatctaataaatatattgcctactctaaattaagctcctgcaactggtattatttatattcatctttgggatttctgaacacactctcacctcactgacagtttcttaatatgaaatgcaaaaatggagtctctgagggttggaatttagatccctgaaacggacaaaactgaagtcagtcgtatataacacacttcttcctgtgaaaagagataatagttcgaaaattgaggttagttttccgttatttttatcaagcattcatcctttatgtagttgaaaaattattcaatcatctcgttggttttacggatgaaagcgcctaagacattcttttgaaatatgttagagagagaacttttccattttatctgaaacatctcccccttctcatcttgcttctgtttctgtagaactttcctcaggacaaccaaaaagtacgactctcagtgagtggatttttgtgtgcatttgaaattcctgtccctgtgtctccaatttcagcttctagtccaacacagacaggtaagatagaactagaactccttctcatgattgctcctttaaatatttgtctaagagttgtcatcttttttatatttgttcatgctgaggatattatagcagaagaattttggaacccaagggaaaccttactgattattccatattttttcgacgagaaacctaaaatttagagaacccaagtgacttcagttagataggtagtcgttagctaatatacccttggaattcagatctctttgaacttgtatctaatataacatggcaacagctagtatgagaggaacatactaccagaaaatataaacaatagatatagctagaaagaaatccaatattatatgtaatttaatgtggtcactcactgagtccttttagccactagtatgctttgtctattctttatattacttacaattaggttaattaggctaattccccaactataaagggctttatgaggctcccctcattgatgtgtagtaggtagatagtcctga

SEQ ID NO: 10887 - DNA, 1141 bp, Homo sapiens
attagcaccatttagctgattatgagagttataaaaaaccttttcattgaatataagtaactgtttgtgccatggcatattactacagctaagctttggttctcatattgtttgttccagttcccacagaaaagggagccacaggtctaagcaatctgggaaacacatgcttcatgaactcaagcatccagtgtgttagtaacacacagccactgacacagtattttatctcagggagacatctttatgaactcaacaggtaatctttctggagtcactggcctcttaacctgtgactttgatataaacccaatatcacctaaatttcctcttttttcaccctgtgggagaaagattttatcttatttgccctatttaatatgaaataggccaaggaatacatctcttgtttcaaaaagaaaagatattttgatgtgagatgctaggcatttttgcgcccacatgattgtgatttatgagaatctttggcaacaaattttcctctcaaacttctaggacaaatcccattggtatgaaggggcatatggctaaatgctatggtgatttagtgcaggaactttggagtggaactcagaagaatgttgccccattaaagcttcgggtaagcaggttaaaataatataaaagtatttaattcctaatagttgtttaatcatttttctctgcttgttttttgtgtttagccttttaacttaataaatgtttttggatccttcacttggtataaacaaaaggtcaaattcttttgcttgtttaaatatatgcaaaattactactgtatatgtagtgggtaggataaagaccaaaggtacactctaaattcgggatgtcattcattttactaatttgtcaaacatcttatatgaagagtaaaccttttttggtaatacttcactattagcagtattctaactgcaaggtggacctcagagtcttattaattacatccaatccaatccattttcaacgtaactaagatagttctatctgtagaatacaaagaagtaggctgggcgcaggggctcacgcctgtaatctcagcactttgggaggccgaggtgggtggatcacttgaggccaggagttcaagaccagcctggacaagatggcgaaaccctgt

SEQ ID NO: 10888 - DNA, 1157 bp, Homo sapiens
ctgctccttaatagtgcagacagaaaactgcagtgaacacatgccaaaacatgattgaagcctttggctgaaactttatacatagaaataatgatttgctcataacaggtatcattaactgccactttttatgttttccctagaatttgtagccttgctgcttgcttttcttctgggtggcaaagttactactggaaaaacactataagtacaaagtttttggggttttatctttgctttagaagtggatgtgtacttcacctcttggctgtggaggaacttagttgccaggaaattttttttttttttttcagacggagtttcgctcttgttgcccaggctgggagggcaatggcaccgtcttggctcactgcaacctccgcctcccgggttccagcgattctcctgcctcagccttccgagtagctgggattacaggctcctgccaccacgcctggctaggaaattttttgttgttaatatgacatttggattaatctccagcttcaacagtacttcttttgtccataaatctcaggaatgttttaggcagaaaactggttttaccctgttgataatcagaaggagtgtgctttaggatttattgcataatactattctttaattgcaatcctaggtatctatagcatgagtggccttagtgagtttgttgaagtgcacatgtttttcaagagtaaaatttaagattaaaaatatatcctatatatagatatctagaaaacttggtttgtggtgcacagttaagtgttggatcactaaataaccattgcaggtaccgtttgtgtaacattactcatttctgtatattccttttatgggaagatattttgccatggtaactaaaacttttcagttctacttttatgatgtgaatgaatgctacgttttattaaatattaccaggtcagtactatttttatactttattaagcaacaggggattttagtttaataggctcaaaataaaaagttcttaatggaacagttaaaaacaaaacactaacaatctttacgtgaaaatccccactaatagtgccacaataatttctatagaaatatctaaggtcattaaatagatttttgaagacggttcttcattgtgtcaggatgacctttcatatcattctcaccaactt

SEQ ID NO: 10889 - DNA, 1946 bp, Homo sapiens
ctattttgggtgatccctatcttgcagaatgtctgtaggaataagcatatattcagttatattcagcatgtaccgcatgtgtaagtagtctggcccacattttcaacctagtagaacaaacaacaggaaatcttttttttgttgtttttaaaaaattcattttgcagaaagcctgaaagaaaaaaaatacccctaaataaaactatttaagagtttaaaagagttgcattcttattatgtaaggatgattttaacaactttttaatatgtaattcttccatgtggaggtattcaatactgtagtgtaaagaaattttatgcggaaaatctttatatgcagtatagaaaagttaacacaagtactaataaaagagggacatcccgacttacgtttttctaccttgcccagataagtggatacaaccactctatattacaaggaaaggactgtcagattcatctgaactggaccagtgttgatctgtaatgtaatagaaaatctgatagaccagcacttctgacttttttttttttggtacaacaatgcaagatgctctgatagcatttgctaacaggaccaggaggatctaaaaaggaccagcctaatgtagaaggtggttacttggaccagaggctttagattattattttagatcctacatatacttttatcagtagaatgatttcatttagatgtataatgaaaaaggataatgcaaaaattatgtaatagataccaaattagggaagtttggcaatttcaatggcatatttttagtcaaggtacacagatggcagtgccataagcaagtctataaatatcggctgcagccatccccctcattttaaatgttgccctaataatcaatgcagttaacaagtatattggctgtgtgtcatgaaatagttcatgttcagatggaaatgttaggttactgtatggtttatggagattaatgaaaatgaatgcccaaaaataagtcttagaaaatcctccatttttatggtaaatagtaatacaactaggtcatttcatttgaaatctaggagtcaaatggaaagatcccctaataatacacctatttcactaacttgtctttctgtttattgggttttgatttgattttttgtaagccagtcaggttatttaatgatgaggtaataatcaaatttaagaatttgtgacatgtagcaattcaagaaacaaaaaggtattttgctgttacctcaattcttactgtagtagcccatctgatgcttctatagttaagaatctgggttccccccctattttcaggggttcatgacttggctgttaaagatgttgctcctagctaatgcttggagtagtctgtgggtgaatggatgtgtgttgaattttagttttcttttaacatgcatgttgggtgagaggggaaaaaaatctaagctgtctgccacattgagtacagaaaagttgtagatttcaaattttattaatattttaagcacttttttgaacttcccaaccttgtttgaagctgttatttgcagtcctattagttttgagccattgcatttaagttccctaggagggggttggttgggggatgtactgaaagagatgaagcaaacccacaccctaagatggtaactgtgtgatttagaaacctgagtttactcctcaaatcgaattattttctttttaaattttggaaagagtaaattgacgtacttgcagtttatgaagctgccccccacccctcagttaattgcagtctaatgtcaagaggcacttctttattaattaccaaatagtctttgtgaccaaggactaacatttttaagttactcagctctatcctcatgggcctatatatttaatacctccaaagatattttcaggataggctttgtatacttttattggttatttagaatccagtggtatgtttgtggtataggaa

SEQ ID NO: 10890 - DNA, 1153 bp, Homo sapiens
cttaatagttaaaggtagtagttgtgtttgttttctaagccttatttgttgaccagtatagcggatggttagtctttcatttgcctttgaattatagtaatgcttcaaaatagattgtgatcattgtattttaggtttctgcagttcttttttttgtgggggacagagtcttgctcagtcgcctaggctggagtgcggtggcacgatctctgttcattgcaatctctgccttccaggtttaagtgattctcgtgtctcagcctccccagtagctggaattacaggcatgtgccacacctcacccagctaatttttgtgtttttagtagagacagagtttcgccatgttggccaggctggtcttgaactcctggcctcaagtggtctgcctgccttggcctcccaaagtgctgagattacaggtgcctagcctgcagttcttttaataagttaaaaactcttttgaccaaggttatgagactcatggataatattctttgggggtaataatgttctaaaatattctagttaccaagatgtagggttggtgaagttggagaggtatagtgttggctttaagtcactttgttttgaacatcagtaatattaaagctgtaaaatatgtttattcaaatgtttctgtttactatgcaggcttacagtggaacacctctaacagaagaaaaggagaaaatagtctgggtcagatttgaaaatgcagatttaaatggtatggttttaactttttttgggacgtgtgaattaattgtttgtttggagtacctgattccaaaaagagagcctctactttagtcagattactttctcttatagtaatttttcagttttcaaaataaaaggtagcataaccgcagtacagaaactttagaactaatattgtgtaataagccttaaagtaactataacacagtgtgtaagtgttaaactttgatgaagttaaagtgagttaaaattttcttaggcagaaaaatggttttcttaaaaaaggagttattcaagtttggtcagttatataagatttataactgcaaaataatcattagtgttgaactttcttggcttgaaaattgtttttttctgaacagaattttatgctagtccaagtacctcatataagtggaatcgtacagtat

SEQ ID NO: 10891 - DNA, 1220 bp, Homo sapiens
ttgcattattctatcatgctggttgctccttatttcaatcagccttccagagttgttggggttatacagctatcaaggcccagtgggcatcatcaggtttcatcttagctgagccatcagtcaatcaggcccaggtatttaaaggaagctctgtgaatccagtgcctcttgagccagtggcatgcttctgacagtggaataaaagataaagtggctgtaatacccaaggttctgctcaaccagactggctgtactctggaatataccatttccatttgaatagcggtccctgttggttgggctcttcccaccttgttcattttcaaattttagttgacccatccccaagtaggtctagaaagtcacaaggcctccatgggtcagttgttcaattacaattagaactttgtagctggttaatagcagccttctaaaaaagggagtgtacttggtggctgcatcaggcaggtggcgatgttgtactgagataacacctctgagtacttcagcagccattaagtctttacctaaacattttactcttggaatcctacgttgtttctggcatataatatgggaaggaactggaagtctagtaggtggtctgttgtgcagttgtcccactatcaccttggtgtacatgttcgatgatatcctctggcacaagcatttaagtacagtcatgtaagccattaataccagttatatattcaccaacataagtcaaaatgatagtacattgaatcggactaaagggtcccaccattttatatcccattccagtgtatttttcctccatgaaaagcatggactagcgtttttaatgtgcacatgccagttgctccagtgacaattgcccttcagtaatgttatcccctgtgcatggcaggggaagctaccctttgcataaggtgggacagctaggatgttgggcttttatctcacttggccttttttttttttttttttttttgagacagggtcttgctctgtcacgtaggctagagtgtagtagtgcaatcattgctcactgcagccttgaactcctgggctcaagagatcctccacctcagcctcccaagtagctgggactacatacagttgcataccaccatgcccagctaatttttataaaaattttttagagaggctgttgctatgttgcccaggctggtcttgaatccatggcctcaagagatcctcccactttggcctcccaa

SEQ ID NO: 10892 - DNA, 1123 bp, Homo sapiens
aagctgtttttgctgaagaagaagaaaaaaaaaaggccaccccgaaacaacagctagtgaaaaaaaaaaaaaaatcttgttctgataacgtcttttccctggcttgcttacagtggactgtggagtaggaatgactctagagccgtttcaatttaaaaagatttgtaggcaaacttgctgtcctcttctgttgctgaaaatcgtgattgtcttggttacagtgattattttaataaaatgcaattatctgaataattaatgtatttgactactctactgtgtcctccattcacagaggccaaaatgtcaaagatcaagtagattgggagaataggaaaattctcattataaaggcaaggggaggagggaaaggatgaaatatttggaatttcagtgcagtggtttctatttatccgaaatgtcaagggcagtgtaaaatgtatttttaaaatgtgtttctgtatggtttgtgcccattcttggcgtggctgtggctgtacagagaccattgttctttgaggaatatgagggggtgtctttgtccaaagtgacaaaaagaagacttggaagactgggcttcctttgttcctgtgcggtgctgtaaaatttggtttgaaattaggacctcagggaaggaccttcaatagagagctttcatttcctgccagcattttaatcactctggggtttaaagtggatggccggccagcataatggccctatgtttaatagaacagcttgtatcttgaaggccagttaagggatctgtcatccgcccaatattcgtcttttctgtttcctgtccatttatgaagatcacccacccttttaggtggcttccctggatcattttgtaggggagctgctgccactgcttcttaaagaggctgaacagaaacccagttgaatgtggtccagtcttcagcccacgcagggaagttctgcagagtgctttaattagacacgaagttcaccacatttgggagttgattccatcagttgtagagggactgtgtcagatttcacaaaaaatatagaattggaagaagattaaaatttatccatatctcagaattattggcacctattgacctgatatgtgctcacatcatcactgtggtgg

SEQ ID NO: 10893 - DNA, 1156 bp, Homo sapiens
tctatatactaagcaaattagcactctatcatatatattataaatatttttccaagtttgtcagtatctttgccatacaaattttaaattttatgtgtttatcaataatttctggggtttgtatcatattaagtatagctttctcatttctctgtttttaaaaaaaattcttcgttttatggtaaatttttactttcttttccgctacttcctttttacaagactgttgtgcacataatagatgttcaagacttttttctaaacagctatttcaatttaggctgtttcatgtaatgagaggaagactgaatttggattcagaagacctcattgacaactaactataacacattcaaactagttactaggtacctgcctcctgcatttttgtgaatatctaataagatcaagtgaatttaatatatgagaaagtcctttttaaagtataaagaaattatttgggacagtttttcagtgaacacattcatatatgcttttattatttttctccctaattggtctcaggtttgaaataaaatttgtctctaggaaaaagcaaagctcataaatgtggggttttctttattgcttctttgggaataccttaccgatgagaaggctttcctgagccttggttgggagctgaatgagaaggggcaattgggcctctggtgaaaggttctccccaagtgtccaaactagtaccttttaagagtaggatggttggaaaaagtgggcaggacatttgcataatattccaggacagagagttcacttttattgggctgaaagagttcaaaggcaaagtcttctgggaactaaagttggtttcgttggcttactcttagacagatgtgacttcctgtgtcagcgagggaggctccaaggacaagttgaatgcccaagttatagaaagttatgtttgtattggtcgttgttaataaaacagagtatctggggtgtttgaaaaagaaggaagcccatcaacacagaggattatgaatcagacccttccagaagtctctatacctcactttgagagaatttccattttggtttaatgagttggtcacattgcatcatccctttatctacccaaaatgtgaattttaaacattttttatccagataattttttcacagagggaaatgcaca

SEQ ID NO: 10894 - DNA, 1328 bp, Homo sapiens
caactctaaccaggcctggccctctcctgtgtcttgcagaacttcagcgagagggaagcatcgagactctgagtaacagctcaggctccaccagcggcagcataccaagaaactttgatggctaccgatctccgctgcccaccaatgagagccagcccctcagcctcttcccgactggcttcccgtaggtaccagcaacctgcttctgactggccagccccctcccctgctggaggaggggagaagccccgctctggtcctacccttcagtctctgctcttccttcatcaaccaccttccccaagcttagtgacagcagccgcccatcctacctggatggagaagagacccttctccaagcacctcagcgcacttgccctctgccacacctgtcggtggaggctgtggccaggagagactgtagaagctcggtccctgtgtatgtttgcatatgacatcctgcattggatccgcttttgtattttttaaccatacccacggtggggcgggtggggggagcctggaacagtgaccagatctgggggcctgagtggggacagagttgatcgtccacctggccattttgaccctgagtggacagtcacagcctcagctcatgtctggctgtgacacacactgcccccagcttcccttggtcagccccactccagcacggggtgaacggaggcccagagtactagggaaggaggaagggaggacatgcctcttcttcctcctttctttccccatctgttcatgggaagagtttgtctttcttatctttaagcccctttaccctggtcctgtactgatcagtgaaggaaaccgtggttactgaggccctgttgaaaagtgcacgtcttgtccaataaatcacgctgcagttggtgtccatccctgagttgctggggtaagggtcctctccaaatgctgagcagagtcctatggcctgagtgcccaggatcccaacaccccctttcatgtgcaacttgggggcagaaggagtcagtggaggattggaatgggaagaacttttgtcctggaatttggatggggcctgatttaagaagcccattctctaagcatcttgcctgttaccagaggcaatgagttcttggggtgccacagggttggaccctcctccctggggatcagggcttgccatgtgctggtgggttgctgtcaaggggagagtctggcaaagcctcatctggggggcaccttgttgtaattgcctctttttaactcagaagatggaagggtggtcaggtgaaggtgggtatctcatgaaacctggccggaaccctcagatgacacgttcctgattt

SEQ ID NO: 10895 - DNA, 1207 bp, Homo sapiens
attattcctccaagtgcacctccaactgcacctgtgttcattgaaagtttgattctgaaatataacccagcctcttgaggtgaaagtgctgagtcaaatatcaccaaacaggaagctgtttcaatagaaattcatattcttggttttcttatattttcagtttgtatttagcaaaaattaaggacattcatttttactgtaactaaaaaagttatttaaaaaacactactactttttcatttttattagtatttaaaaggaactcttttttatttctaacatatgccacatatgggtacatatcaactgaataaaagaaagtaaacatttaaaacatatgagtacctcatgaaatgaataatgaagaatcatctttagatggaaaaatataccaggttctacttatgaaataaattatgtgagtaagattacaaaagatggtagtctgtttaggcaggcctattaaaagcattaagacttgagtactggctattaaagtgagtaaatggcaatattataaagttaaacacatgccaaaaaacattttccagaggactgggattgtaacaataccactaatgagggcaaagaggtcttaatgcaatttgcactttctaaagtttcaaaaagaggctttgagttagtgtattattaatgtactgaacatctggaactgtgtaaaagctatggacattgagcaaatgcaggatttccccactaggttgcattctaacttattccctccctagcgaaatactagttttaaagaagtttgacaaagtaaaatgacaatatccagataagacatgggcattctaaagtgtcttttagtttgtgagatctgactttaaaaaaaattgcctctgaggttaacaaattgaagtgatgtgaacaccaattagtaaattaaatcatctctatcactatatgttggctggtctccctatatgaatagtatttaccctttatgagctattaagtaggatattttcaacaaagatacctcacatttttcatatatgtaagccataagacctgagagacagctctgtgtcatcgtactttcctttaagttagtttttaggtgcctagttaggatacctaagagaatttaacaattgagttatttttgtgtttatttatgtgatttctctggcaagacagaaatagttaagctgtctaaatgtgtaattcaagtgtcacctgc

SEQ ID NO: 10896 - DNA, 2971 bp, Homo sapiens
gtgttgaatttatatttgtaaactaaaatattgtttcatttttttccaacagttttaacacaggctaagcggtatgctttttttatgccaactctgccaagtttggtctctttttgtcgagcatttcctccattgtatgaggatattatgtctttgctgatccaaatagggcaagtttgtgcctctgatgttgccactcagacaagagacattgatccaattattacacgtaagtggtaacttattttcaagggttatcttaatatctcaaacaaaaaggccaaattcctttccaaatttcttggccttaatgttttttttcccttatgttgtaggtcttcaacaaataaaggagaaaccaagtggatggtctcaaatctgtaaagattcatcttataaaaatggatccagggacactggaagcatggatcctgatgtacagctctgtcactgtattgaaagaacagtaattgaaataataaatatgagtgttagtggaatttaaaacaaaatttaaaacaacaaaaagttgtttgctgcatatacccaacatgaatctgcatattagtaacaactctaaactgaatgggaacagtaaagtattgtcttggaatcactaaaacaattcaattcaacatgagtatagtttagaactttatgagaattatgcttgcttgtttctgattggcacatctttggatctactttgctgatatgtttctattgtagcagctgagctttttttttttccactgggaacacatgtaagaaactcattattggaaagggaatttggccttgtatttagcttttgaagtgaagactgccatgcctttaatttcttataaaaatgagtctgtgggtagccctagtgtttattttaactgtgagcttgtaacagaatgtgacaaagatgcaaagatgggagaggaaaaaagggtaaagggaaaggagaattaaggaaataataggagttaaaaacacaagtagaaatctcaaagatttgcagtgcaagtaatagtaatgcaagttggaattctagttctcaagaaagagtattgagaagacttttaaaaaggcaagtagcttttgtaaatgatttctgtggaaatacagatgaggatttaaagatttcacatatttgcttcaatttttattaatatatgaagccatatgtttaaagagatacttgaataatttggaattttaagatactggtgtaaaagtgtttacagaaacatctttgttcaaagaagaacctgagagatctcatttagttttatgttttaaatttatttttataatgctttattaacttacctaatgctcagaggggggaaatatgtatcaaattaaatgaaggtagagcaataaaacccactggattaaagagctcttggtttgtcatcaggattataattcatatcttactttgagaagatctttgagtaagaaaatgcagtgtttgaacctgaggaaaagttaaagtgtagaaaatattgtcttgccgaaggattttgcagtcctctgtcagtaacttccattgattaggcagacatattcaggtaaaccctaatcattaaaaaaaaattatcaatgtagaaagtaattcccttttttctctctgagatatacctcaatcacacacttccccacccccacttgaaacagacctcttcacttgtgttttttttttttttttcctgaggtggagtcttcccctgttgcccaggctggagtgcagtgggatgatcttggctcactgcaacttctgccacctgggttcaagggattctcgtgcctcaacctcctgagtagctgggactgcaggcacgcgccacctgtatttttgtatttttagtaaagacgggggtttgccatgttgcccagactggttttgaactcctggcctcaggtgatctgcccaccttggcctcccaaagtgctgggattacaggtgtgagccaccgcacctggccagaccgcttcacttgtaaaagaaattaggctaataagaaggtgtagtttttgagaaatgaaatttaactttagccttttcactagtaaatagtcacatctcattttcttcctttgtaaaatggggttactactggccctacctcatattctatgagaatgagtttgtagctgtttcaaatcatgaagtgcatagtatcacatgtgatagaatatttataactttttattagatgcttaatgttcaattaagtaattttgatgtgaaaaataaaagtaataaaagtatcttaaaaatagcataagaattttcatatttttaaacaaggcagttttgtagtcccttaagattaaatacaactgctccttttttttttaaactgaggccttgcgatattttgtgtgaatagatatgccctaggagttcagaaaaagttaaaagtatgttttctaattaaatgcagtgcacattcctggatcaatattcaaagactggtcataacctgctgtgttaaaataatcacatatgctctttttcatcagatttgttgatgatgtaaataaaatgtgtaaatatattagtaaatgttaatattcatgtattttaagttaaggttataaaatttgtcacaatgtgtttttttattcaagtgaaaacagatgtgtgcagctattttgaatattggtttataaacattcatattctttatcaaacgaacctgtagtttttgtgtttcattccactagagttaacctgaagggaacggttcaagggactgtattcgaggtctgtatggctccagggcctacgtgtatccctttctgttatgccacatacattaaatggcaatgcaaggtgagagccagttgaaactcttagtaatttaggagaggaaaatgagagtagttatactagagcagttactcaaaagagttgattttttttttttttgagacggagtctcgctctgtctcccaggctggagtgcagtgg

SEQ ID NO: 10897 - DNA, 5223 bp, Homo sapiens
atcttaaggacagactactcaggtttaactactcaatttagtgcctccttaaacatttactttgcacatctaggcaaattagacttagcaggtaattagaaattctttttctaaggattattgtatggtctcaaaaacaataaagctaaagaaaaggaaatagattcaaagtaagttttgcacttaaaaatcacttctggctaggcacagtggctcatgcgtgtaatcccagcactttgggaggccaaggcaggaggattgtttgaggccaggagttcaagaccagcctggtcaacagaacaagaacctgcccctacttaaaaaaaaaaaaaaaaacatttctataatgaattagttaaaagagaacaagcatttttatagtggctttcattcataacataggactaaaatgtatttcatcattttataagatatattgggagaataaggtaaaactaaatagcagattattttctgtttggctgactgattgattacctgttaccttcttaggcctctttgcacctccacgtgccttcagtgcaatctgacgagctgcttcacagtaaacactcccacccacttgactcaaatcagacttcagatgtcctcaggtacaactcttttaccattaacagtttgtcactgcaactttaaaagaatataatgttgattcttatatatttttctcatttttggcaagaatttacagttgtgtaccagtggatctctagataaacactgctattctaacttgagtaatctacttttgagaataatttttatggaaattgcttctttcccctcaaggactctctgttacactcttttttaaggtgactttgagtcttaaatgccataattgaaaactgcttccaaaatctaggttggaaataaataaatgacttatgcagtttatttgcttttcaggtttgttttggaacagtacaatgcactctcctggctaacctgtgaccctgcaacccaggacagacgctcatgtctcccaattcattttgtggtgctgaatcagttatataactttattatgaatatgctgtgatcttcatttgatggaactgtgcaagaaaagaacaaggaaaaatggatgtttcgctgcaggattaagttacaattatcttctcagtgaaggtcatttgtgatggggtctaattcttattacttcaacaaatattgttttgacttggggggaggggctataaccctgctatttttcattgactctattgaactctttaggatgatgactgatcatacaaaacgtattataacattttcgtagcaaaattaaccttttttttttccagtcacagtatttgtgaaaagtaatgagccatagtacccagtcatgttaaatgaatattaaaagcatggagaggaaacatgaggaacaatgaatttcaacatatggcttcagaacatgaagatgttcttgtatggattatagtatctagtattcaaaaatgcctgcatctcttctcttatttattgtaagtttttaaatgtataaattgtcttatatttcttaacctcttttataaaaattttcctagaaggtttatactgccttcttgctttaaagcaattggtctaaaatatatgtaatcgtcttaattaaaaagttgcagtagggttgcttttagagtattatttttttgtaagggggtgggtgggacagtaaatttgtattgtctcgatgtacagtttaacggggatagagggggaataatgtccataccattgtgtgtggaggatttacagctaagctgtagttgcagagtacatgtacagtaatgaagttcactgtgtttataaattgaaaaggtaccaggtcttacagcattttatatatcacatctttacagaataacatgatggcaatatacaagtggtattgttaggtggtttaacttagaataaaatgagaattcttcagttatattttgtactatggtttagggctatgactaatatttcaggccatttccggtgaaagaaacttagttttacaagaaaaaccatttgctactgaatgcttaaactaattttagtgtttaatgttacatgcttaaatttttttcagttttaacagtggcatatttaggcatggaaatattattatgaaatttattttcaggatctgctataaggttgaaatttagcccagctctaggcattttacaaattatttttcaagcagtcattcttgattgtttgacttttttttttaaattaaagattgggaatgtatgtgagagtatgcatatgtatgggtgtgtgtgtgtgcgcgcaatcaaactgtggtgtaaatagattctcagtgaattctggtattcagactctattccactagtgaaagaaccattttttaaacttcccttgccttttttatttatttaattttcttggtttggagatgtcagtcccaaacaccagagtctgtacttttctataacacagctcagattaaggtagggcatatgccaaggaggttctcacctccctaaagaagggacttgaattttagggactttaattcacccctccttcaatacaactttcccccttcttgtttgcacatgccaagataactgcttttatgcaggctgtacccccttgaaaaatcctttctacagtgctgctcacaaaagagcccaagttcgcctcctacctgcattgctgacttgaattcacagtcgccgagtctacctagctttcttggaagcagtctagcaaaatttctatttgtacgttcactaattatctacaaggacaaaatcagttgtatttacaaaactctacttcagtgtttgttttagtttttttttttactgaaacttgtttttgtgaatactctgtgcttagaattaaatatcactttcttatgaacaacataacttcttcagattgtgtatatgaaaacattagcaagtcttgttttttctatgaagcaaacacaattggtgacaaaggttgtcaatcatttcttcaaaattataatgcagttctaatggtcagcatattttgatattaaatttaaagatcacctctctgcatttgtttttaaattatgctaatacaccacacattatgttggtatgttttgttctgtactttctttaaaaaaaaaaaaaaaacttgtctgagatttgaaggaaaatgtgcttatttggaatttccataaaaagagtatcctttttatacacttaatagtgactttacaaaataaaagttatattctcagttgtttaaaatcactaacctatgataaccacacctcaatttgaaagtagatttaaaattattccctgacaggttatttaatatggagccataaggagggaacccagtacacaattattttttatttgggaatcagggaatagttcccaaatatacaggatttattgataagattttttttcttcccttcatatatccattcaaactcaatggaaagttattaaataaccattagaaaagctcagtagacttatttgagaaattaagccttgtgcaggatgatggatttgacttactaatgtactgtcacagacaaatatgggtagttttgtttaaataggtaagcaaaatattatactttatagcagtggattaccaacaccttgacttctttgttacagtgctaacatctttttttttgtgcaggtatccatgattattaagcagggtggaagttcagtattttgtcatttaaaaagattagttatataatgtctgcttccagccagtgagaaacatctagccatacctttcttatgcaagccattgagttatcaggactgtgaattaacactgtatgaataaatttctgtacaccttattgtttggccagaaggccaccaagtgtacttatatgtaatccttaaattttaaagtagctgtaatttttaaatatttctaaacttttcttaaaccactaaaattaagctcttactacttagtcaactatcctcagctgtattcgtactcaattgtcagtatggcacagattactgtattaaaatattctcctttcgtcttcatatttaccttctgaggtaattttttaacttaatgtgttactacaaagatttgcagatctttaatcaagcactatgttaatactgtaatatcagaatactatgttgcattatttaaaatgttcaaattgaatagattaaaaagtttttaaatgctattgcatcatataatttgctattcatccactatggcattgcatatcaatcagttaatacacttaatgttgcatgagtgatattttggtctgggtttcctcttaagattttagtttgtctgaattaaggaaaaatgtttttaatatacattcttattttgtcccacccctccagaaataagctggaaatcttaactttttggggggtcttttttggtgttttaatgggcccagaactgtggtttaaatttttatgtatgtattttcttttttgtggagtataaatttaaaaactggatttgggacctaaaatactcctcaggttgatgtattcatgaagttttaaaacatctttagttttcaaagtaaactggatatgtggaccttaaagttattgagtttaagctacaaattgtaacgtcattactggacatgtcagcatcaaccctctcaaaatagcttggtcactttatgaaggggcgttttaaagttgttgtttagcagtgacatttaatatggtccaattgcttttctttttaacgtgacaaaaagagaataaggaacaaacactattgctgccgaatgccataacactgagttgtacaaattgtgattgaggaaatgaaaaggtttatactttttaaaaaaaaaaaaacaaaaacaaaaaacaaaacttcaaatggaataaattattcatgaagccttcattgttgtgtcttattctgttgaaaatatttccatattaaatttgtgcaaaattagtagcaatatttttgtgtcattataaatggaaagggacagcctagaaactgattaatggtcttttaatttttctgaagtattttattttaaaaaggattttaatcacatacaaatgtacagtatgtagaataattgtatatttgtatacctaccaattccttgtaggctggccagttaggtattgtctagtccaaacaagctaccttcaaatatttaaagcttagctgtatcctatttttatt

SEQ ID NO: 10898 - DNA, 1195 bp, Homo sapiens
tcgtctaggaaggattggtcatggagaattgaaaggtaaaattgtgcttttattagtatttatatttccgttttatgtaaattcacacacagttctgaccacgtctaggtatatatgttgaataaaatgcaaaggttatcaaataaggaaccacatatgtctaggccacaaatggcttaattcaaattttaaaaagacattttactcttattttaactttaatatcagtcttattactgctgttcttaattgttttctgttttttccactttctgattgttatttaactcatcctctgttgagcagataccaattgaatttggtgtatcctaatattagggggataaagaatgttcagtagcatcagcagtaagaattttggcttgatgatgactcgtgttggaggaatacactaatttaaaagccattaactatttttatattttaactttaacttggttctacaggatattaataatgctgttactttgattttttttttttttttttttttttttactgttgatacccacagattggagctgtttgctgagtcgtcgaaacttgcagtctctaagtaaaaggctcaaagacatgtgtagaatgtgtggtatatctgctgcagactcccctagcattctcagtgcttgcttggtggcaatggagccgcaaggctcttttgttattatgccaggttagctatctttagtttatatcagatttaattctttatgcagttaagtttttaagtattatatacaatttattcttcgtttattaaaagaaaaaatgtctttcattttcagattctgtgtcaactggttctgtatttggaagaagcacgactctaaatatgcagacatctcagctaaataccccacaggatacatcatgtactcatatacttgtgtttcctacttctgcttctgtgcaagtagcttcagctacttataccactgaaaatttggatttagctttcaatcccaacaatggtacgtaatttgttccattttggtagtctgaagaataccccccaaaataaattcatgtccaatacctgaaacgtgtgaatgttaccttgttttaccaaaaaatgattttgcagatgtgataagttaaggatcttgagatggagagattatcctcaattacgcaggtgggcccttaatgcgataacatgtgttcttataagaag

SEQ ID NO: 10899 - DNA, 1176 bp, Homo sapiens
gaaattcttacagtaaagaactcttctaagtttgcttaatccaatgttttaaatttatttaacattgggcttctaataacaaaaatcagtgactcacagaactagagggagaaggtgtataaatatatttgtataacaatttttattttgctttgatttagggatatttgtattcataattcatgaattggtgttaatgtatacctaaaatgactgcatttttatgctcacttatgtctgcattctgcaagcttttattcaaacaaaatggttctagtactattgttatctaggtgttttttcattagagatattttaattttgaaaaaaaattaatgaatttctaatgtaaaaatgaaaaagacctatggcaccatttcacccttgatatgtttatttttttggcctacttctaaaaacacccttgatatttttatcataactgttaattgcaaatggttaagcttattttaagtagctttcatggttggttttataatgtgtatctaaatacaataataaatttactaattctgctttctgtatgtatatttgtagtcctgtcgattaggtcaacatagacctgtttctcgactgttaacagatgggatcatgagagttggatctactgcatcaaagaaactatcagaaaagttggtagcagaatggttttctcaggcagctgacggtaacaatgaagcattttctaaactcaagctttatgcacaagtctgcagatatgacctaggtattgaatttgtatttattgtataaggctggtgttagcaaaatgtggcctgctccaccagctgtttttgtagataaaattttattggaacacagccatcctcatttatgtattttctctggctgcttttgtgctacaacattggagctgagtagttttcatagagactgtgtggctgcaaagacaaaaatatttattatctgaccctttacagaacaagtttgctgatccctaatgagggatcccatcaggtaggaagaaattatgggttataaataaattttctgttgcctctgtagggtctgatgttttaataacttgaagattcttcatttgttacagtttagagataaaataatttatagttaatctctaccaaaccaagaaatagttctttgttgtagctaagaaaacgacagctgtttaag

SEQ ID NO: 10900 - DNA, 1190 bp, Homo sapiens
agtcagtttattctttttgtagtgctaagtatttggagaaggtaggtatggtgtgaggcccatcaatcagtcaattctagcactttccagactgatgtaacttctatttagtagagtagaatacgctttctggccagttgctgtaggattgtaggtgatgactaagcttagccaagccattaatttataataattactaacaggaaatatcaggtacatttaaaaatgagtaaatttcaagccttgttataccttttaaccttaactagaatcttacctctatatttaaattagatactaaaatatttaaatcatgtaagacataatctttggctgtctgatcacatggctattaaatgagcatgagataattggcttttatgaatgtttctgcatgcccttatattttatttaggtcacgagcaaagtatttttttcccctttcaaattcaaattattttacttttagtattacatgtgaaaaagaaatgataaccgaagtgtctaatactattaactggtattatacttcgccataatagtgatactgtaaatatgaaacctttattttcacttttcaggcacaaaaatctcaagtcaagaaatgctggacaacaaggacaggcaccatctttaggtcagcaacaacaaatacttcctaagcacaagaccaatgagaagcaagaaaagagtgaaaagccacagaaacgccccttgactccttttcaccatcgtgtgtctgttagtgatgatgttggcatggacgcagattcagccagccaaagacttgtgatctctgctccagacagtcaagtgagattttcaaatatccgaactaatgatgtagcaaagactcctcagatgcatggcaccgaaatggcaaattcacctcaaccacccccacttagtcctcacccttgtgatgtggttgatgaaggagtgactaaaacaccttcaactcctcagagtcaacatttttatcaaatgccaacaccagatcccttggttccttctaaaccaatggaagataggatagacagtttgtcccagtctttcccacctcaatatcaggaagctgtagaacctacagtatatgttggtacagcagtaaacttggaagaagatgaagccaatatagcctggaagtattacaagttcccaaagaaaaaagatgtagagtttttaccacc

SEQ ID NO: 10901 - DNA, 1206 bp, Homo sapiens
ctctgttgcccaggctagagtgcagtggtgccatcttggctcactgcagcctctgcctcccgggttcaagcagttctccagcctcagcctcccgagtagctgggattgcaggcgtgtgcaaccacacccagctaattttttttgtattttattagagacagggtttcaccatgttgaccaggctggtcttgaactcctgacctcaggtgatccacccgcctcagcctcccaaaatgctgggattacaggcgtgaaccactatgcccagcctgggcagacaaatttttaacagtttatataataaactcagtgtcatactttatcttcacagtaacgaagtataataagttgatttttctctggaatggttattactggtttccttttcttttttataattgcacgattatttgccacatttttcactgtgttcttatttggtaaaacagtcttttgttacttatttgatgtctgctttgggtttctagttatcttatgcccatttggactaaatggcactctcacaggacaggcattcaagatgtctgattcagctacaaaaaaattaattggtgaatggaaacagttctatcctatctcatgttgcttgaaggagatgtctgaagaaaaacaggaagatatggattgggaagatgattctttagctgcagtagaagttcttgttggtatggatcctgagtattattcctaaggggaaaatgcatgattgtatgtgttagttatattttgctgaataacaaacaagtctaataactcagtggctttcaacaccaaagatttattccttaatttcctgcccacattacttaagggctgcatcttagctggtttggctccatgtatctgctcattctgtaacctaggttaaatgaatatcccagtagctaggacatgctgttcttatgagaacagaagaataatagggactgaacctaaccatgtaagtgtactcagagcttctgctgggatatggtgtatgttacatctgctcacattgcattagacaaagctagttaaatggccaagccaaagtcattggggcagggaaatatattctgtctagagggaagcatgcttaggatgggacagttaattgtgaatgaattaatatttggaggctgaaaagttgacaacctgtgttgtatgatgttttaacatttggtaaaactaccacttccaataact

SEQ ID NO: 10902 - DNA, 1910 bp, Homo sapiens
ttctctttagttgatatttgctctgggccctggcagccgatagagagccttagggttccctccaggggtgccaagactatctgcctctgtcttcaagaaactctcctttgcaggcgtttattcgacgatgcttggcctaccgaaaggaggaccgcattgatgtccagcagctggcctgtgatccctacttgttgcctcacatccgaaagtcagtctctacaagtagccctgctggagctgctattgcatcaacctctggggcgtccaataacagttcttctaattgagactgactccaaggccacaaactgttcaacacacacaaagtggacaaatggcgttcagcagcgggtttggaacatagcgaatccgaatggatctgatgaaacctgtaccaggtgcttttattttcttgcttttttcccatccatagagcatgacagcatcgattctcattgaggagaaaccttgggcagctccggccaggccttgtaggaaaaggccccgcccgaggttccagcgtcaacggccactgtgtgtggctgctctgagtgaggaaaaaattaaaaagaaaaactggttccatgtactgtgaacttgaaaacttgcagactcaggggggtccctgatgcagtgcttcagatgaagaatgtggacttgaaaatacagactgggctagtccagtgtctatatttaaacttgttcttttcttttaataaagtttaggtaacatctcctgaaaagcttgtagcacaaaggctcagctggggatggtgtttgacttcggaggaaaaaagttgctattgcccgttaaaggcactagagttagtgttttatccctaaataatttcaatttttaaaaacatgcagcttccctctccccttttttatttttgaaagaatacatttggtcataaagtgaaacccgtattagcaagtacgtggcaatgttcattccaatcagatgcagctttctcctccgtctggtctcctgtttgcaattgcttccctcatctcagtagggaaaaaattgagtgggagtactgagatgtgtgggtttttgccattggacaaagaatgaggttagaagactgcagcttggagtctctctaggttttcaactatttcttcacaatttgaacacttgacggttgtcccttttaatttatttgaagtgctatttttttaaataaaggttcatctgtccatgcagtcctcttggattctctgaatgtagtaactatgaagctatgccaaaggtaggcagaaaatgggcttgggagccagacactccagggatcagtagttcctacccatagtctttgtgtgcttgctaaatggtgtacatttcttgttaaccacgttattaaaacttgatcagcacataagctttcttctgttagatcttttggcagcaaacaaccttccccccaagcctctgaattttgtgggtgtgtggtggtgtgtgtctgtgtgtgcatgtacacacacactttgtctagctcactttaaaagattcatcaaatggaattttaaaaataatctgaaaagaaatagatatttcaggccgggcctggtggttcacgcctgtaatcccagcactttgggaggccgaggtgggtggatcacgaggtcgggagttcgagatcagtctggtcaacatggtgaaacgccatctctactaaaaatataaaaattagcctggcgtggtggcgtgtgcctctagtcccagctacccgggaggctgaggcaggagaatttctggaacccaggaggcggaggttgcagtgagccgagatggcaccactgcaatccagcctaggcaacagaatgagactctgtctcagaaaaaaaaaaaaaaaaaaaaggagaaatagatgtttcaaatatgaacattcttttggcaccaa

SEQ ID NO: 10903 - DNA, 2849 bp, Homo sapiens
tgggcagcttctcccttcctctcacccctgcaggggcaagtatagcgcatttgagcccgagggtgtcctggccaacgtgctgggcctgctgctggcctgcttcggtggggcggtgctctacatcttgacccgggccgactggaagcggccttcccaggcggaagagcaggccctctccatggacttcaagacgctgacggagggagatagccccggctcccagtgatgcgcccggccggccctgggggttcgcggggtgtcttcttgcctgcccctgctgaggcgtcttcaggactgcaggctccggagagtggctctggcagcaggcgggcgcgtgggtgcagctgcatctgtttgagtgctgctttctggggtcaggtctccgcctcctctgcttctcctttctccgctgctatagaccagttcattgtgtgtggctcccgtgtctctgttgcccccttcagtgcagaaggctttgggtaggacttcgggtgttcggtcctggtcgcagagcacagatctttaaagaagcgagagaggaggccccaccctcctggcagcagatgcctggggcaaggccaggggaaactgggggggcctcagggacaggcctggaaaggccacgatggctgctgaattcaaacaaggagtccctccagcctgaataacacgtggcacaaatgggcccggcctttggcagaggagcaagtgatatgatgtgtaaagtatgttggtggtgaaagcaaggttccccaggagaggggagggactggcccctgggaagctctgagatgaggctgtggcccagctgtagtcctgaccttcctcttctttaaccctttagccctaggatggctttggtgggagaggggatagaagcccatgacttcagacagactttctcttggcagatgcaggcgggcctcctcccaggctgctccagacatgggggttggggatggggggcaccttgcagccccttcctgctggggctccctccttgtagcaccccccttgcggctcagctctggtttcctctcccaggctcacccaggctctgctcaggctgggaggcagagggcacaaaccttataattttttaaatgaaaaaccgctgctgctggctgtggctagagccccctggggctgctggagctgctgcctctgttctggaggacgagccttctccttatctgctgcccatctttccaggaagtcaggatggagtcagaacaactacagtcatcccccgtggtgtctgcacatcactccagccccataaagagtgtcatgttagctgagtcaccatttggcttcggcctggaaatagtgtgattagaacactgatcgtgtgcgaggccaggagatcaagaccatcctgactaacaaacacagtgaaaccccgtctctactaaaaatacaaaaaaattagccaggcgtggtggtgggcgcctgtagtcccagctacttgggaggctgaggcaggagaatggtgtgaacccgggagatggcgcttgcagtgagctgagattgcactccagcctgggcgacaggctcaaaaaagaaaaaaaaaagaacaccgatcatgtgcttcttggatctggtgactgttctctccctgttttcctttctttttgggtgtttgaggagcatggcttagcttgagacacacacagacactgtgtacttcagtgaagggcttaatatacagtttccaaacctgacgactcttcttcttgtaatggctgcccttttcctacctgaggccgtcttagagaaaggggccagtctcctctaatgctcagatttcccatagttggcttttgctgtgtctcctgcctcaggcagtgtcatttctgggagcaggtggttgtagtccaggcccctccccagcagggtctgcccaggctccttcgagcccctttccccgcctcctctcagcctgtccggatgacagtgttcgcctcctgtttagactgtacactcttcaggggtaggggtgccgtcagttcttcaatcagctggcacacacttgtatagtgaaatgtttacatgtgggaaaactccgccttagacaaactaccaaagtacaatcgtgtctctctctagccggaatgctacagagagaaatggaaccttagatttgcaacaaaagtctgtaaactggtctgtttgccaaagtgaacactggatgactaaggagctgaagaaggcccccagaagcggatttgtggtgggttattttattttgcctgtggccaatcttctgtgaaatacaatgtgctgttggtgcaacagatgattcaataaatgtctacagcagacctctcgcctgttatcttcctttactgtggtaataaaaggagccggagcttttagcagccagacacatgacgttagctctaggcctgagagaaattgaatatccgcaggctgggcacagaaggtaaagcgattagtgatattgatcatggcctaggggctgaaaaggcccagcggttgtccagtctcgacccagcagaggcagtgttgtttccacatggttagataagccctttcctctcagcctgagagggtggcctggatggtggagctgcaagagcctgataagagccttggcaaggaaggtcccccagtgtttaatggacccctttccctttgaaatcagtctttttgatccttaagaagaggagcaaagcttttggaacgagctgagattccactttagatccacgtacgtggctcaggcagaaggtgagtttttggcaaatttgggtgggatcgtactgtgcgctttgtgccttgtcacttaaagcagtggccgccaacctttttggcagcaggaacag

SEQ ID NO: 10904 - DNA, 1135 bp, Homo sapiens
gctggaatgcagtggtgcgatcttggcccactgcaaactctgcctcctgagctcaagggattctagtgcctcagcctcccaagtagctgggattacaggtgtgagccaccatgcccggctaatttttatatttttagtagagatagggtttcaccatgttgtggctggtcttgaactcctggcctcaggtgatccactcgccttggcctccccaggtgctgggattataggtgtgagccatcgcacccggcccacacacacaccccccctttaatggtggagttgccaacagttgtccgatgtggcagagagaactggggagcagagaaggagcccatcactgggagggactgaaaaccagctcctgggcactgcagggcagagcgtgtgccgggtgtgaagggggtcagtgcccctgtgctggccactgtccccctagttctgatacagttgctgccaggagaggctggaccgtggcaaggggccagtggggaaccggggcgggatggggggcagcagcagtgctctggggtctgcttgtggtggccatggtggtggcagttgcagtggcaactgtgggccatggcagcacttttccgtggcgcacaggccgctgccgggtgaggggagagccccgcttgttctcctcctgccgcctctcctcccatccccagctgctgggtgctctccggccggcatgaagctgtgcaggcactgggcactcccttgggctcttagcggggccttctcattgctgcttcgctaggaaccacccgctctcctttcctcctggagggccacgtggggccgagcacctgggacagccgtgctgagctctacccggccccttcgcaggcctcgtttctgggggccttcagttttggaaacctccctgagggcccctctagagtgcgggtccgccccgcccctggtgtggaggggaagtgccctgtccctgtgtgctgacaggtccctgtgtgcagcatggtcggggcacttctactctgcaggcgcggccgggcggggagcggggtggggggcgggcgggggcgtggggggagcggggctggctctcctgggtgtggggtggggaggcctcctcatcgccagcatggagttaaaaaccaggatgggg

SEQ ID NO: 10905 - DNA, 5412 bp, Homo sapiens
cccatcgccctctgtggcagactcagtgctgtgtggcgcctcctcagcccagggctgagttttaagattttctctcctttcctcttctcctttggttcctcaattaaaaaatgtgtgtatatttgtttgtcaggcgttgtgttgaggagcagttcacgcactggctgtgtctattcctctgcccaggtgtctctgtttgctgcccaaggcagcagttcatgtctcgtccatgtccatgttcgtgttagcacttacgtgggaacaaataccaatttgtcttttctcctagtatcagtgtgtttaacaaattttaactttgtatatttgttatctatcaggctaatttttttatgaaaagaattttactctcctgcttcatttctttgtcttatagtcctccctctttgcaccttcttctcttccctcagtgcctggagctggtactgggcccctggccccatgagcagtttgccttcttgagtcactgcctgtgtagtacatacctgaccgggagtccaaaccaccttggtgctctgaagtccactgactcatcacacctttcttagcctggctcctctcaagggcattctgggcttgtaaacagacataggaagcctctgtttaccctgaagcaccactgtccagcccattggttcccactggcagcatggtagagctgagagaaacaggctctcagggtacctgacttgaggggaatcgtttcatgaagctgaacttcaagcatatttccagtacattctttcagagtctgtttttccatccaaatataagccccaggccattccacttagtgtcttttcaatgataggcaagaatgatatctgagttgaacttcggtgcttctgttgtttgagtttactgtgcctggtggtatattgggcattctttggattgagtgttctgaggtgagagagtcttcccgaggcatcctgtctgtgcttccaaccctgaacaagaccttacatgagagatggactgatggactgcggcaatcctgggctgtcaagtggatagatagttaaaaagcattatactgtgggtaatgaaaagggaggaaaaaaaaagaaggaaaaggaattatagacccccagggtcagccagttaagagctctacccacacctgtcaacccctctctcccccagtttaggttctgagcagtattggacttgtagcctgcagttgtcttttgacttgcaggccgcaggtgtctttctgttatgtgaatgagttccatggaggggcatatgtgtgattccaccgttagatgagcccttggggcaggcagtttgggatgtgctcttgggggaaagttggctgtttccttgcgctctgctcctacccgaaggtttttaagtccctctgaattgctcatctgagattagtagagtagcaggcctgaaggatgatggttttgtcctctttggttctcacctgcttgagaagtaaaacagtaactttgttcttctgggcccttaagcttttttggttaagtcttccttttcagaagtagatgtcattatatgccaaaagtctagctctttgctttaccatacagggacctgtcccaaagaaaaaggctctttttttagccagcatatttccccttctacccttttactttgttgttctgattttaggactctggctggccatgtgcttgtggttgcctctcctgcatttgccactggatttgcactgcatcgtttggagatacaaagcgagcagttcttggtcagaaccctcctctgcttttcattgtgtttgataatggttactgggtccttctctcaagggtagcaaggccaagctgatggctgcttgtttaggaggccatcagttccttcctgtggagaagggtctgaaatggaagtcagtggtagaaggggctggtctgctgggcagggcttacatccactgagttctaagattcctttcctgatctgcacctacgcctggtctgtatggtggaatttgtcagctggaactcagaaacaacaacttgaaaaaaaaataataattagaacatatttgcataagatagctatttactctggaaaccaacaacttttgagatttcccttgccctgtggacgcccagctcctgtcatccttccttaggtcctgcagtacagtcttcccctgaatgccaccggggacccagggggactccacccccctaagcaagcacacacatactcacagttgatgagttgctggtctttgagtcccagctctcttaccctccctttactccaccagcccgacgacccatgactgaggaggggatttctacagtctcaggatttagaaagtctgtaagccatccatgctccagaaagcaccgatctgttgtagttgcaaaaacaactctgtaatttgttgaggttctcaaactgacagccagcgagactgggtgggaggccctggatctgttctccctgactgcgggaggagcagccactaggactttagcaggaagcccacatggaggctccgccaggctgtggcccagctggtgatggcccttttgctcctggcagcctgaggcacagctgcctgtattgtcctcatctgttctgactgaaggatggaggtgctgaataaattaggcctcaggcctctaccaccagagagctggagaatgggtccacgtcattcaaggacctgaattttttatgctcaggagcattggaatcctcttcttccagggaggaattagcctgcaaggttaggacttgaagagggaaggtatttaataactgggcgaggatgggtgtggtggctcacacctgtaatcccagcattttgggaggctgaggtggccagatcccaaggtcagaagatcgagaccatcctggctaacatggtgaaaccccatctctactaaaaatacaaaaaaaaattagccgggggtggtggcgggtacctgtagtcctagctacttgggaggctgaggcaggagaatggcgtgaacctgggaggtggagcttgcagtgagccaagatcgtgccactgcactccagcctgggcgacagagcaagactccgtctcaaaaaataaaaaaaaaaaaaaaataggtgaaaattccttataaatccaggattggctctgagagaactggctaagattcaggaagaaacaaaaaattcagaatcctacaaggttttgatgacaattagggccaaaattttaggaggagatgtaggatgcaggagaaaattaaagtgttttctttatatcagaggaggaaatagtagaggtcagtgaaggtctggggtagggaaacattcagactgtccattgcatggctgtggagtgagactgcccttagcctgggtcagccttcctgggccataaattgggcatccgtgatgctaggtaactgtgggaacaaaatgacagcttagagcagccatgggtgatgtttggtggtaaaaaacctacaggcgtttggggtcccatgattgttccagaccatgactcttcctggttgtgggtttgttacagagcaggagaagcagaggttatgacagttatgcagactttccccctcctttttctcttttctcttccccttgcttttccactgtttcttcctgctgccacctgggccttgaattcctgggctgtgaagacatgtagcagctgcagggtttaccacacgtgggagggcagcccagtactgtccctctgccttccccactttgagaatatggcagcccctttcattcctggcttggggtaggggagaccattgaagtagaagcctcaaagcagacttttccctttactgtgtgtactccaggacgaagaaggaagatcatgcttgatacttagattggttttcccagggaagagggcggagcagagcaaagtcactgtgaaccctgggccaggccctggctgggccagctcctgagagcgtctcgtgttgcagacccttgcccacttcacccacctgcaccttctccccctctcacagtgtcactgctgctaatggtcaaagtcaaatgtgtggccacatgggatgggccaggtcctctcaggctactttctggatgtcatttttaaaatatggaaacatgcaggtgccttcccaaagaggcttggactggtatatccaacgagaaacaaataagctaaagaaagtttaaactcaagaagaaagatgttgacagtctatgtaacagctggaaagtttataggcacccacctttgggacaacccagtgattatgaacatgtgatatctactatttaaaagaaatgttctcaccttgggttgattgtggtataccatgtgttatgaaaattgttgagctgaagctttgaatcgatttagttgagtctgactcacttgctttggttcctgtgtattttactacccctcttgtcagtgaccttccttccccaccccacccagagtgaatttgtagcatgattgtataaacctctatgtagaaaatggagatttcttgctctgaaatgttaagctctaactgatccatttctgtgtcctttagcctagtatgtctgaacttccattcttgttatatatttaaactttccctctatattataggttttgtggcatccacggtcaggtgtagaggaagctgccccttgcagaactgtactgtaatatttttcttttataaatattttcacaggactgattgtacacagggcttgtaataaaattttaacactgtgctgtgaaacaactatggggaatctccattgaaggctacttcatgggcacctgaaagtggagtgttatagctatgactttctatttcttgtttcctaagtaaattaaacctaattttcaccctttcattctgtttcagcctcctgtataagaagtaccgtattttctgcccatcatactttgtaataaaacttgaacatgtatagattgactgaatttctttttgtgacgaattcagttcttcccattttgtcactttggtcatgttccatagacagtggcagtgccccagcccgagccgggcagtctactcatcaccttttatatcctatttagtcattcacttgttaattcagtggagcacctcctctatgccaggggacatggccctcaagttggttgcagtctaccagaggagacatctacataaatacttgtggccgggcacagtggtctgtgatcccagctgaggcatgggggtggctgaggtgggaggatcacttgaggccaggagttcaagaccagccttggcaacatagcaagaccctgtctcaatcaatcagtcatttttattaaaaaaaaaaaaatttcttttagccagactaagatctaagacaaatctttttttttgcatttcttttttctttttttgagacggggtctcgctctgtcacccaggc

SEQ ID NO: 10906 - DNA, 1164 bp, Homo sapiens
aaagtatctcacaactgggtactgaggtatgctacagcatggatgaactaaaaaacattaagtgaaagaagctagatgaaaaagattgaatctttatgaattgaattgaatatgtatgaattgtatgagtctaaatggaatgaaatgtccagaaaaggcaaatcaatagagatagaaagtagagtagtggttgcctggggctggaggtgggaaggaggagtgactataaatgggcacaagagatcctgttggagttctggaaatgttttaaaattggattatgatgatggttgcacaactatgtaaaggtactacaaatttttggattgtacatttagagaaaaaaatctgtatggtttcaactagatctcttaagaccccatagtatccagtgagattgttttcctccaaatgtatttttattttttgtttattttatttctgcaaagtgaaacattgagataaacttctgttttatattattttccttttctatgtcttgtatcacagctctccatcctgctgaaaaaccaagatgatcttgataaagcaattgacattttagatagaagctcaagcatgaaaagccttaggatattgctgttgtcccaggacagaaaccatgtaagtagcccttgtcatggtctggcagctgaagacaaagcttgctttccttcaggaacttgtctcgcctccttgacagacattttcgttcctcagccactgccaaattgagagcataagcacagcacagcccacttgtcagtggccagtgaacattctgcatttgatttcaccgaaaagccagattgtcagtgttaacattgcatctaaaggttatttgacttttggtgagggaggaaggaaaatactttatgataaagaataaaattcttgtgctctaaatttatgttttttcaattagattttgaccccaacaagagaaatttgattcgtttggcagtgccgattaggaaagactgtcaaagatttgagactgtcatgctttataaacccaactcccacaacaccttgcctttcccttggaacacttgtaggaaacaaacttttccttttgttcagtggaaaaagccatgggttgggggcctcttataacttatcagctgttgctttacccaatggcaggcagtctgtagggtgtca

SEQ ID NO: 10907 - DNA, 2800 bp, Homo sapiens
atccaggagctccagtgtcctgagctcagcgtggaggggtaggggctgggaacagtgtgcaaggcagccgtgggccccaccctcggggatgtgtcctgacactgcaattggcaccgaagcccagagggtctgggggcacaagactgacgccagggtatgaagagtgttattttcattcaaagtgttattttgtttttccttccaatgtctggagaccaccagggcatctctgggctggatgagctcccacaagcctgagggaaaggccagcactcgctagcagtggcaggcagaggcccaggctgccgtcccctagagtcccaggttggctctgccagtcctgtcctttaccaaagatgaatgaagcaaatgtcatgctgccttattcagggaaggaggagcctgtcctgcctgtggccatgaccctgcctctcccaggcaggggcccgcgatgtggaactgctgccactgaggggggatccagttttgtcaatgcagttgtctctgttttacaagttggagtcactcttatgctgtacccagtttctaaactggagactgtgtgtgccctctgggctctgagtacccctgctttgggcttgggcctaggctgcattgaaaagagctgaaggttgtggcctttgcgctcctggcccagcctttgttccccactggagcagaaggggagatggacgacacggtcggggcatctggcctggccagtgccctgatcccagagagcccgaggaggtgtctcaggctgcctgagtcgtgacctgctaggccagagcccactccatctggtagaagggaaagcccatatgctaccaccagctgtgtccaaaaccgccagctctgttcttcctcagccagcctcgcccatccccttgaggtctcagcccctttcccttgtagctcctcccctggagggggaatggcagcaggggttggggaaacagcatctccaagcagcttagagttggccatatttacctcagcctgggcgctggtcctttcttccggcccctcccctccaaaatgtgcctattgctagagctcctccctctcaacacccagtttccttgggagttgtcattaaaggaaaaaaaaaaaaaaaaaagccagtgcccagggatgggcatctccagggagctggggattagtgccaggcagccctgccagccatgcctacatccccatgggcacagaacaagccaaagccttcgttgtatgttgacgatgcacttttatgaatgtagtttctatcgctgtttttagccttttcacatcatgtaatgtgaggccttgtacttgttaatttatatctcagatcatatttgatggtttttatatatatcaattctagactgttacaggtgacggacgcctcaagagagagaagagaaaatgaaagcagctggttttgcagaagtgtgtgtcgcatgcgccagttgggcctggaccctcctgtgtccatccctgttcccccaggggctctatcagcccctgtaccccacactgccctctgaagacaacacaggctcctgcttccacctcggcccttgcccagggtggggcctggccctcatcttgaccaaagctgctgtgtggcagctcggcctctctacgaccccatcttggtggctgcacactcttcctggcccgcacccccatccccagtccctgttccccaagaggatacagagcacggtgctggctgactcaactgtgcgtcccaggttcagggtcttacagagctccaccccctggggtcttacctcactgggaatgtgttttgaaaatgaatttgaagacaagccaacaaaccctgcactccaaaaaagcaaaacagaccctaatttttttgtgccaaaaactgtggacatgctggctcagcatcctcaggaccaagttgttgcttaatttattgttttttaataactaatccagataaaaagttgtggggcttcagggtgacctgggcccaaaggttctgaagggcagttcctggcagccccaggcttgctgtgggaaggggccgtgccgtcactttctcatcattccatggggtgtgtctgcctgggccaactctgcatggagaggccagggctggggacagtccgcactctgccaccctcctgccccttccacccaccccagctctatgtctgtgtctgaattgtggatcgtgcagccatggttattgtggaactgtggaacctgcagccatagttatttgactatatcttgaccgagggcttgcagtgcaaagccaggccagtgttgcgcattacttacaataaaagggatcatttatatcagaggggtcctgtggcagtgctttcagttgtggggggtggaggtaggtttttgcttagcaggggccaggtatggtgcctggcaacgagcctgggcctttcaagcagaagagaacttgactccaagtagaggggtcctggggtgatctggctgataccattgtcagtccagaggtgtctgcccctttcctccagttgcccctccaggagctccactggggtggtcccaacagggctgatttaccagggtggcactgctggccctcacaacctgaacgtcaccagtggctgagttcccggagctttcatgatatttggtagggtcttcctggcccagaggacttccttcagtcccatctttgcagggcaggggtcaggtgtctccaagagccacctctccagtacccccttgtggtcatctgctactgttgcttaaccgaaccaagatgatccttgccatctgagacctctggtgcaggaag

SEQ ID NO: 10908 - DNA, 1209 bp, Homo sapiens
ccggcagggggaaggtgggaaggaggtcgagctgggcttgcgtgggggccaggtgggaaggggatgaggcttgctcaggcgtaggggaccagggcagggctctgctccaggactccttccttcttccttctcccgcagccggtgagggtttggaaaccaggattggggtctgcccaccaccctgcttcctgcttcgttcagcctccctccccacctcaccccaggaccccctgggaggcccccaagcccagctcccctatctaggtgccttttctccagcaaggagtcagcatgcccccctcagggtcccaagctccctcactgccaccggagactgtgtggcccccacgtctccccatctacctctacccttaacctgtttctgagccacggagacagggaggaaggagcgcgacagtgccacctgttgggcatcataaatgcccctgcagcccatgggggaggagatggggaagtggagccaccctgcctctgcagggcaaggcagggcctgccccagtggggcttgggaccatctcgaaccaccagcgtggagaagcagaagcaaaagcactcgccaggctgcagcctcaggcactggcaggggctggtgcggccccactcccctcccccgctcccatttgtgcccatcctgttgtgaccaaccccgttttaaacatgtttcaatagatccagattctctattgtgtggcctgctgggggatctgtcacaggaagggtgcagactcaccatggggcgggcatggggggacagggccagccccgactacctcggccctgatgggggcagggagctagaagtgggtgtcagttccctgacacaccattgagaaatgggagggctcctcttcacagcgagggcttcatgctgtcacacccacagtggttttggaactgaaactccacctcacccctcagttctgggttggttcagacccaccaacttaccatatgcaccccattgtgaagaggcctgagagcgggagggccaggctgccagtgggtgatggcgcctgtcctcgctgcacttcagtgcctggggtgcaagctgccgcgttccctggctggttccagctgtctagctccctcccttcttcccagccctttgacctggaagtaagttagcgaagaatggcggtaaccagcagacccagcaagtgctgcccaaggttttagtgacccctggat

SEQ ID NO: 10909 - DNA, 2163 bp, Homo sapiens
taatttttattcactaatgtagatattggcaattatttttataactatcttctagaatgttatggtgcaagcctaagtttttgaataatactataggcagtattctaatttggatttttttttaacatatgtttcaagcttaatttgaattctctcgtccccactccctttctctatttattaccccttctttctctaggaggctgcattgaggcgtgagcaaaagaagttggaaaagaagcaaatgaaaatgaaacaaatcaaagtgaaagccatgtaaagccatcccagagatttgagttctgatgccacctgtaagctctgaattcacaggaaacatgaaaaacgccagtccatttctcaaccttaaatttcagacagtcttgggcaactgagaaatccttatttcatcatctactctgtttggggtttggggttttacagagattgaagatacctggaaagggctctgtttcaagaatttttttttccagataatcaaattattttgattattttataaaaggaatgatctatgaaatctgtgtaggttttaaatattttaaaaattataatacaaatcatcagtgcttttagtacttcagtgtttaaagaaataccgtgaaatttataggtagataaccagattgttgctttttgtttaaaccaagcagttgaaatggctataaagactgactctaaaccaagattctgcaaataatgattggaattgcacaataaacattgcttgatgttttcttgtatgtctacattaaacttgagaaaaagtaaaaattagaacactgtatgtagtaatgaaatttcagggacccagaacataatgtagtatatgtttttaggtgggagatgctgataacaaaattaataggaagtctgtaggcattaggatactgacatgtacatggaaaattctagggacaggagcatcattttttccttacctgataccacgaaccagtgacaacgtgaatgctgtattttaagtggttgtatgtttattttcttgagtaacaaatgcatgaaaaattaatgcttcacctaggtaagatcattggtctgtgtgaaatcacaaatgttttttccttcttggttgctgcagcctggtggatgttcatggagaagctctgttctctatattatggctgtgtgccgttgcttctccctctgcttttatcttttccacagttgaggctgggtatgttctttcaaagaaatggccatgaatatgtgtaagtatacttttgaaaatgagctttcctaaactattgagagttctttccacctcttgcggaaccaactcttggaggagaggcccatgtatctgcacgagcacttagcttgttcagatctctgcattttataaatgcttcttaccaagaaagcatttttaggtcattgcttgtaccaggtaatttttgccggggatgggtaagggttgggttttctggtgggagtggggtggtgggtattttttgttgatgctttagtgcaggcctgttctgaggcaataacaagttgctgtgaaaacagcatgtgctgctgcctttgtaactgcatggaaacttttcacatgggtttttctccaagttaatacagaaatatgtaaactgagagatgcaaatgtaatatttttaacagttcatgaagttgttattaaaataactaacataaaacttaattactttaatattatataattatagtagtggccttgttttacaaacctttaaattacattttagaaatcaaagttgatagtcttagttatcttttgagtaagaaaagctttcctaaagtcccatacatttggaccatggcagctaattttgtaacttaagcattcatatgaactacctatggacatctattaaagtgattgacaaaatctcagagtgccgccttgactttgtggagttatcctacaagagtataagctcagaggaaaattctttctgttcgataaaagtcagcactgaaatgcttttccttcaaaagagttcatctgaatattccttttgttattaccattcaatcattttaaaaacattttatatttttagagccccatatgttatttatgggctcctccctgcattccacctcttaagactccattaactctcctgtgaatgcgaggacaaa

SEQ ID NO: 10910 - DNA, 1269 bp, Homo sapiens
gttgctgaaggggggaggggaacaaaaacgcgacatgcgcagtgaggaacgcgcgggcagaagggcggggccggggctacggctcccggaaggcgcctgaccttaaagctccagaacgcctcacaggctcctcagatactctgacgggaaactgcagttgggtggacagtgttcatgacccatctagaaagtgggtctgcgaatgaagaaaaagtggcgtcaaggggctagccaaaaatcccaagagaaaacgggttggacagaaaccatatttacatgaacatgcctatagtttaaactgttgcatatactactagagcgacactcttgcctctggccacgtggtcccacacagcatggccacctttagcttccggagcaccggttccgtgtgacgtcaacttgacggaatcctaggtaggaggattgggataggcgagggcagttccggcccaggggcggggattatgtaattttcccaaaagccccacctcgcctcagccgggcgggagagagggaggtctcgcgctttccccggggttgcgtcccgccccgcaggctgcgcgcaggcgctgacgagccgctcgcattctacgtaacggacggcggaggctacgtgaagagaggcgcggcgtgactgagctacggttctggctgcgtcctagaggcatccggggcagtaaaaccgctgcgatcgcggaggcggcggccaggccgagaggcaggccgggcaggggtgtcggacgcagggcgctgggccgggtttcggcttcggccacaggtaaggagcgggccaggacgcgctcgtcggcgtggccgggccaggccgagcggtgactccgagttgcttggcctgtagcccggtccggttgagataattgtaatggtttgggggaactttcccacggagctgtgagcaaatgatagccaaaagggcagagttagaggaaatgtacagtgtgtgccggaggatgacattaggatgtattgattctcttgggtggggagaaactaggcaaaggggtttaatagaagcaaaaacctctgtggccagtctcttctggaggtttctaaaatgaaacgtgtttgtatccaacacatataaagagacagaggaaagtctgcatgatttccagaatactcgttttggccgttgtcaggaagacctaatctaaaatgacaacaaggaatgatggcctcactcagtcctctttcctcaagtctagactcagtcgctgaggaactattggatgagcttgcagaaaataa

SEQ ID NO: 10911 - DNA, 1184 bp, Homo sapiens
acgctctgcgggtaaataaaattttcagttgtgtggctaccatcctttctgggagtctgtccctatagtcagttctgataagcctcacttcacatagcatttttcctttgcttctgaacataccagttgtttaagttccaaatgtttacgtccaataatacatggtttgagaaataaaatataagctcattttcctcaaggaagttagaagtagccaaagttactcctctgggtttgaagcttacctgaacaacttcccttccaggagagccttgagggagggagcactgtaggaagccttagataaggatctcagccacttttcaaatttggtggattatgctaccaaagagaaaccaatctgtggttcctgtgaaaattcctcccttagcgtagtgctggctgaaaattaagcaaaagttcccccttcccacttaatttcctctttgtcctcgttctcttcttctgttcttttctccctcccttgacttaaccttgaattttgttcaatgcagaatgcctggtttcggaaatctcgattcaaaggagggaaaggaaaaaagctgaacattggtggaggaggcctaggctacagggagcggcctggcctgggctctgagaacatggtgagtctagactactacagtagtgcctttatagttggtctcatgtcctgaaagtcattaggaatattctcatctacccaggaaagcctcagtgagtttaaagccctgtctagaagggaatttgtatttaatctgatttgagtcaatgcagtgctcattcttatggtaactttctattgaagaagcatctttgtgtacttggttgactaggcttgctcaggaaattattctagattagcagtgatctcacactgtggtccctggaccagcagcacatgcaaactcatccccaaccccagaccttgtgaatcagaaactctggagttggggcccagcagtctggttttataagcccttcaacactggcctaaagcctgctgctaggtaaatgttgccaaagggtcactgtaaagtctagccatatcttgtcattaaactcaggaacggatcaggaatttccaagtcgggagctagtttttctcacaaaccaggtaacaaatgtacccttttggtggcctttcttaactgcctgttttctgtcaccttgattccaagcca

SEQ ID NO: 10912 - DNA, 1512 bp, Homo sapiens
agggactgggggcagcaacgggaaaagagagagatatactgagaaccggggcagcagccgtcacagtcacggagagactggcaatcggcatagcgatagtccacgtcacggagatggtggtcgccatggagatggataccgccatccagaaagcagcagccgtcatactgatggccatcggcacggggagaacagacatggaggaagcgcaggccggcatggggagaaccggggtgcaaatgatggtcggaatggggaaagcaggaaagaagcttttaatcgtgagagcaagatggagcccaagatggaacccaaagtggacagcagcaagatggacaaggtggacagcaagacagataagacagctgacggctttgctgtcccagagccgcctaaacgcaagaaaagtcgatgggacagttagaggggatgtgctaaagcgtgaaatcagttgtccttaatttttagaaagattttggtaactaggtgtctcagggctgggttggggtccaaagtgtaaggaccccctgcccttagtggagagctggagcttggagacattaccccttcatcagaaggaattttcggatgttttcttgggaagctgttttggtccttggaagcagtgagagctgggaagcttcttttggctctaggtgagttgtcatgtgggtaagttgaggttatcttgggataaagggtcttctagggcacaaaactcactctaggtttatattgtatgtagcttatattttttactaaggtgtcaccttataagcatctataaattgacttctttttcttagttgtatggccaggcagtccccattttaggagttggcttctgcaaattcaatccattgagctaactgttggggagcaatttggtagttgtagacatttgcagggaagggagatgtctgattctaaatgggagttgatgctcaggtccccagccaggtttgcatccagccctgagacatgtaggaaacacctttcagacccaggctctgaagattcccagaagccacaaggattgaagggaaaaggtgatcctggtaactgttccaggattgctccaggtttgagatggtattgctaaatttaaaattaaacaagaaacccaacaacagcttttaaagtgtcttctatctcattgtattttttttaacttgccccaatgatagaaaagtcttttgctgaaatgattttgatgatttttgtttatcgtttataaaaaggaaaagaaatatacaaactttgacttttgtgactttgtgaaggtttctttaagatgtgcattcctttctgcttgctctctagtaaatgttttactaccgggacctgtggatcgtttgtcatttctgtctatgaattggtacatattaagaatagtgccgcacacagtgtagggacagatagggaagtgcttattaaaactgtcagaaaagacaactcttccattatcctggttttattcaggaataggatgggggtggggagggcttaagt

SEQ ID NO: 10913 - DNA, 1194 bp, Homo sapiens
tccccaaagccttatactttttgcattggctttaattgggttcagcagatgcctcctctgcccccctgcaggcaggcccaagtaggactgctggaggctgtgctttgacattgtaagacatttccgaaccaaaggctgctgggtttgcatgtttacagactccccctggggcgagggtcagagctggctctggggagctgggctaggaagaggaggtgcagcccagactcttcctagcctttctaaaccaaagttctttgccattcctacaagcccagccttgctgctggttttttcctttcctttgggtatttgcactattttgggagcaagttttctatgtgggagccactttttttgtacaggggtaagttgggggttttcagggagcctgttaggtgcctccttcttttctttcctcaatctatgcaagcggctctggccgccatcatctcctgggatgccagagggctgcctctccagcggcttgggccggggaggggacactccagttctctagcatggcctgaggtatggggtatgtgcatgtggaggccagggtaaggtgaatggggaggctgggaggactggtgttgccctttggagcttggtgaggagggtgggcctagggcttggcgagtgccacatctggcaggtttggaaatttccaaataaatccttttgtctattggtggtgcctggacctggtccttgaacagcacagccctcattaacagactggagtcctagaggacttggcccacagagctttattggagagatacacacaaaggctgtccactcacttccataatttcttgatggacatgtttttctcactgtccttctgcatgacctaggggtgggagagagaatgaacattaagttacgaacacacacatgccctagcccactgccccagagccaccactggcaaaggcacaaagatggaggcctataccttggctactgccatctcaaagtcctcctgagtgacatggactcgccgttctcgcagggcatacatgccagcttctgtgcacacgccctgaacaggaaaaggaaattgaggccccactgctgtgcccctcatctgtggcccttgagcccagagcttcctgcctctgccctgttttcagtgggtactccaattaccttcacttcagcccctgatgctcctggcatgagctcagc

SEQ ID NO: 10914 - DNA, 1333 bp, Homo sapiens
ctctacaaaaaatttaaaaattagctgggtgcggtggcatgcacctgtagtcccagctactcataaggctgatgcaggaggatggcttgagcccaggaggtcgagcttcagtgagttatgatcacaccactgcacttcagcctgggtgacagagtgagattgtgtctcagaaaaaaaaagactgggccagacacttgggcgctcccagagaagtcctgccatagggaggggggcgctgctccaagcccgttggaggttgatttgtgtggttattacagtgttcctgcagatggcagtcgagtgtctcgaggaagtccctcgtgggctgcaagagggcaccatttccctgcctccagtctgcccagagtcctgcttccatccttcagggcccaggaatcttcagtatccggagctccagggctgaaatggggcttctctttcttgggatttagcatagcttgagatttgagagctcagcagcaccatctcacacccctttccatccccagcctagcaaacagaagaggaagttttcttcattctttaagagcctcgtcattgagctggacaaggagctgtacgggcctgacaatcacctggtggaggtgagagtgggcctggggcaaaagcaggctgatgtgcaggtttggcagggaaatggcctcagggcccttgggaggccctgtgttcacgcccacccccttggtgataagccatgcttccctccctgccagtggcaccggatgcccaccacccaggagacagatggcttccaagtaaaacggcctggagacctcaacgtcaagtgcaccctcctgctcatgctggatcatcaggtgacagagaccctggggtcatttctgggcccacagggacccctcaggaggggagctggttcctagaaacccttcctgtccctgccctattttcccactgttctactataagaacccgttctgactcccctccatccaactccagcctccccagtacaaattggacccccgattggcaaggctgctgggagtgcacacgcagacgagggccgccatcatgcaggccctgtggctttacatcaagcacaaccagctgcaggatgggcacgagcgggagtacatcaactgcaaccgttacttccgccaggttagccagatgccagcccccgttttctcagcccttgctttgccttgcctgctgggctactccttggccacagcctgcagactgctgccctcactggtcctggaatggtccactccactgtgcccacaagccaacgctgagcctttcgtatttcctccagatcttcagttgtggccgactccgtttctcc

SEQ ID NO: 10915 - DNA, 1242 bp, Homo sapiens
ggagcttggtcacatctgttaggaatccaaaggacactatgacttatttaaatcttgtcttactaaacctctcttgggcacgtgtgccagaatttctcttgttgcttcttgagtctttttaatttcagtgttttttcgtttgttttttgtttttttgagacagagtctcgctctgtcacccaggctggagtgcagtggcacgacctcagctcactgcaacctccgcctccttggttcaagcaattctcctgcctcagcctcccgagtagctgggattacaggtgtgtgccaccacgctcggctaattttttatattttttttagtagagacggggtttccccatgttaggcaggatggtctcgatctcctaacctcgtgatccgcctgcctcagcctcccaaagtgctgggattacaggcttgagccaccgcacccggcctaatctcagtttttgaagtgctccacaagtcattaggcaccaaaacattttcacctggggaacactggcatttccctgattagctgtgaagcaatctagtggctaagtgtgaaatcctgggtgcgcaggtgttctcactcccgccgtgttctcagtgcagtggtggtcagaggcccttccaaggagacatcactctgatcagttacagatagatgttctggaagatctgcaggtgagtagatccagcagagtttcttcccaccaactctagaagaaagggccttatcagagttgaccctgagcctttggtaaggttttgtgtgcatgcgattcagttatctttggcaattcttttcttgctgcagtgagagattaattggttgctgatcaaaccgttcatgcagatggggggacctttggattgtacggctttctcctcttggctgctttcttttcaggaagttggactttggccaggtttggctttcccagagccgttcctttctctgtcctttccttgggtcctcatggtgtgcccattggatccttggccttgtgatcctctgggaactgggggccagttccacttttgcagccttctgtgctggaagagaagcccagcgccctggaaggagcctctttaagtcccccatgtcgctttctctctctgctcttttagtgtctgagattgcctttctttgaatttcccagtgtttcttttccttgtcccttccctcaccaacctggagttattttggttgactatgtcctggctttggcttctcctggcaggaagtcatca

SEQ ID NO: 10916 - DNA, 1521 bp, Homo sapiens
gcctgccagtgcccattccactgtgaggtgtcattccctgcatctagtgacaactgtctggattgcctgctgcaaagctttgatttggcaaaggagaccatggaagaatcatggtggatccagaagttatacgtgacccacaccatggcttttaaaagtctacccatgtttgtggcagcaaatgagcacagtaagagcaaagctgaacaacttgcctcctctactcctccaaagcttttcttcaggcagccggtgcacagtggactttttcacttctatactttgtatgcggccttccacacttccagagaatgtcagtgtgcaatgtgtctggagggtggggagaggaattctgtgagccttttcatttcggtgacagaagagatgggcagagcaacttattttccacattaaattgtgcatttgggaagcaagtagccatagtacacacacaacacgctatcagcttgggtaaggacagtgggatttatgtgaacatcaggcaaagccatgagatcaaaccatcccaagcctttcaccaatgaggtacaaccacctgggggctagctaatcttgaatgttttcctgagacaggagcgtatgtgaaaacatcaaacactgcacatgacaggatgggtcctctcatacagatgggatggggttagaaagccagagccagtttttccatctggcgtttcctgtgtcctccaggtttatatgggaatcgaaacagtttgttaatctgattgggagagttccatgggcagatttcccttcctgaaggccaaaacggagaactgctctctttaattatttcaagagtcaagaccaaaagtttgctcagcatcacactacatctcaaaattaatgttgccaacttaattttgtgcatttgtgtcagaatgtttagtttacaaggttgggggctctctttgcttcgagaagtaaacctaataccatttttttattgtttaaagctgcattcaacgtcaaaattaccttgggtaacttttgataacttacatgtgtggacaaagctaatagtggttttttaaacagcaccttgcctgaacatgactttaaagaaattaatatattgaaaacatgtttgaacccttattttaattgcaccattaaaacatttgacttaaattgtttgaccattccagttggtgtactgttctgatttttcgttgtgtaggccgatctgcctgtcagagtccacgtgtcctggtcactggtctttataattgttgtgcaataactaaaggctaaggactagatgcactatcgtgtaaagagattacacatgactgtaccatgttgcacttaatcaaatagtatgtggggatttaaaatcgcttgcattgtttcacaaaataaatatctcaatgtcaaatactagataagcatctaagtcatttctacggaatcctgttcagataggggcacaataaaatgagtacagagcaccggggccctcacctggcaatcgcagctttcatttactgcgttgatcac

SEQ ID NO: 10917 - DNA, 1729 bp, Homo sapiens
aattaaaccattaaacccaatgaagtgaaaaacggtggacatctgccaagtaaaagcataatcaccacttaaacagcttcatctgtgctcctatctgcgaatgacagcgtctcctgtggagaaactgctctctgacttctggttttctcactgttttcacagagcctgagcccttgtgaagccggcaatgacaagtctgtatggtcgccatgccgagaaaaccactgacatgccaaaaccatcagcccctaaagtgcacgtgcagaggtccgtgtcccgagataccatcgccattcacttctcggcatccggcgaggaggaggaggaagaggaggaggagttcagggagtactttgaggaggggctggatgaccaaagcattgtaacagggctggaagccaaggaagacctctatcttgaaccccaagttggccatgaccccgccggccctgctgcctcgcctgtcctggcagatggactgtccgtgtcccaggcccctgccattttgcccgtctccaagaacactgtaaagctgttggagtcccctgttccagcagcacaagtattaagtacagtgccattggctgtgtccccagggtcgtcttcgtcggggcccttagctagctctcccagtgtgtcatccctttctgagcagaaaaccagttcttcctccccattgtcctctccttctaagtctcccatcctctcatccagtgcctcaacctccaccctttccagtgcaaaacccttcatgagccttgtgaagtccctgtcgaccgaggtggagccaaaagaatccccacaccccgcaaggcacaggcacttgatgaagacattagtcaagtctctgtccacggacacttcccggcaggagtcggatacagtgtcctataagccacctgattccaaactgaacttacacctgttcaagcagttcacacagccccgaaacacaggtggagattccaaaactgcaccttcttccccactgacttctccctctgatactcgttccttttttaaagtgcccgaaatggaggctaaaattgaagatactaaacgacgcctttcagaagtcatctatgagccttttcagctccttagtaaaattataggggaagaaagtggcagccataggcccaaagccttatcttcaagtgcttcagaactctccaatctgtccagcttgaatgggcacttggaaagcaataacaactacagcatcaaggaggaggagtgtgattctgagggggatggctacggaagtgattccaacatccccagaagtgaccacccaaagtccactggtgagcccacaagagagatagaactgaaaagttcccaggggagcagtctgaaggatttaggcctgaagacaagttctctagttctggagaaatgttctttgtctgccttagtgagcaaagaagatgaagagttttgtgaactgtacactgaggacttcgatttggaaacggagggggagagtaaagttgataagctctcagatattcctctcaagccagaggtgctcgcggaagatggtgtggtccttgacagtgaggacgaggtggactcggccgtgcagcacccggaattgccagtgaagacgttgggcttctttataatgtgtgtctatgtgtacctcatcctccccctcccccactatgtgagtggactctttctgggaattggccttggattcatgactgcagtttgcgtgatttgg

SEQ ID NO: 10918 - DNA, 1339 bp, Homo sapiens
tgttgtattaagtaaatttgacctttattctttgcagatctgtgaaatgttgtcttctgaggggccacgtgtatctgtagtgctgaggactccttgggcctctgaagtcacagagagaaccctgcagggtgggggaccagtgtgtgacagccctgctttgcattttctttgagaagtgctgtcattttgcatttctctccaccagggcaatcttcaatcttgagaggtgtgatcataacttgccttgtttcttgtcgctacagagaacggaaggctcccttgatggaacttagacagcaaggccagatgcacatccctggaaggacatccatgttccgagaagaacagataatccctgtatttcaagacctctgtgcacttatttatgaacctgccctgctcccacagaacacagcaattcctcaggctaagctgccggttcttaaatccatcctgctaagttaatgttgggtagaaagagatacagaggggctgttgaatttcccacataccctccttccaccaagttggaacatccttggaaattggaagagcacaagaggagatccagggcaaggccattgggatattctgaaacttgaatattttgttttgtgcagagataaagaccttttccatgcaccctcatacacagaaaccaattttcttttttatactcaatcatttctagcgcatggcctggttagaggctggttttttctcttttcctttggtccttcaaaggcttgtagttttggctagtccttgttctttggaaatacacagtgctgaccagacagcctccccctgtcccctctatgacctcgccctccacaaatgggaaaaccagactacttgggagcaccgcctgtgaaataccaacctgaagacaccgttcattcaggcaacgcacaaaacagaaaatgaaggtggaacaagcacagatgttcttcaactgtttttgtctacactctttctcttttcctctaccatgctgaaggctgaaagacaggaagatggtgccatcagcaaatattattcttaattgaaaacttgaaatgtgtatgtttcttactaatttttaaaaatgtattccttgccagggcaggcaaggtggctcacgcctgtaatcccagcacttcaggaggctgaggtgggcggatcacctgaggtcaggagtttgagaccagcctgatgaaaccctgtctctactaaaaatacaagaattagccgggcgtggtggcgcatgcctgtagtatcagctactcaagaggctgaggtgagattatcgcttgaacccaggaaacggaggttgtagtgagcggagatcgcgccactg

SEQ ID NO: 10919 - DNA, 2771 bp, Homo sapiens
tcaagcaattaatcccaagttgcttcagttggtcgaagacagaggttcaggtaaggatgactgataggaaatgttggtagttacgagtcacatcgttgtctacaaatccatttaaatggtattggagggtgagtaaaaccttgaatgtgaaaacttaagctgaaaaattgtaaaaacatttcacgcctaccatgaatagatctgtttctttctgtccacaatgatttgtgtcatagacataattgatcaatttgcaattgttttcttgacaggtcgttccaggggtagaggaggcatgaaggatgaccgtcgggacagatactctgcgggcaaaaggggtggatttaatacctttagagacagggaaaattatgacagaggttactctagcctgcttaaaagagattttggggcaaaaactcagaatggtgtttacagtgctgcaaattacaccaatgggagctttggaagtaattttgtgtctgctggtatacagaccagttttaggactggtaatccaacagggacttaccagaatggttatgatagcactcagcaatacggaagtaatgttccaaatatgcacaatggtatgaaccaacaggcatatgcatatcctgctactgcagctgcacctatgattggttatccaatgccaacaggatattcccaataagactttagaagtatatgtaaatgtctgtttttcataattgctctttatattgtgtgttatctgacaagatagttatttaagaaacatgggaattgcagaaatgactgcagtgcagcagtaattatggtgcactttttcgctatttaagttggatatttctctacattcctgaaacaatttttaggttttttttgtactagaaaatgcaggcagtgttttcacaaaagtaaatgtacagtgatttgaaatacaataaatgaaggcaatgcatggccttccaataaaaaatatttgaagactgaattaagtggaaattgtactttattttatataatgtcatgtaaaactttgcttaagatggtctggttttttttttgtttttgtttggttttttttttccatgaaaacaaatgactgttcctttttatttaatttgggaggcagggggaatcagaaggcccttctttataatgagctattcatattgcaggagtcagaatgaattgatacaggtgaatttttagttacaggctaaattgcataaaagctttgtcagcttccagcatcaggggagtcatttaatagcctttttccttatttgctagtatggttaaatgagaaaatagtaaaatagatacaaagtcatctatatagtgtgagaacgtgggtgactttttcaaagtttataatttaaaaagctccaaataactggctttttcaagagacttatactcatgctcttggctatactgtgaattactgaaatgttgaacaaacctgtgaaagacatacattagccctttaagatggccaggagctaagcttgagtctcctttactgaatttcgttcttagtgcaggttacttgtagattctagtcttcacaggctccctggggctcttaactagtcacactgggagtcatgaatgtctttccaataattcagggaattctagagatcctcaaactgtaaggtctattcatactcaacacaaggaaaaaacctcattaaaattaatgactaatcaggaggcaacgtaaccaaaagcacagtgaatgaaagttttcatggtaggttcaacatgggtttattgctagaaagatccaggggatagctttaggtttaacttcggctcaccaacgtaactttctaatcatttatttcagtaatagctagaagtgggtctgaatgttttcccagagtctgatacgtgtttttttttgccagaagagaggtcttcaggagacttcatttaaattctgattattaaactgaggctttaattgatgttaatgccttatgtcaaatgtaaagttagaatttgctagggctgggatagggagtgatatttctaggacttagacattgaaaactaattcagcctgtagtaacctggatggttttcaatggcatggttagtcaaattcatggttttaaacttagaagcagctttcgggggagagggtaggttggagcatttattacatattttactgtttaatgtcttaaccgtgggccttttaatttgtaaacactgaaatgattgttgggctgtggaaaacatttacctatttaccttggaagttttaaaagacagtccactttttagcatgtgtgttgtgtccagcctgtggtcgtcttaactaataaatgtgatttttctccccattctctctttttatttatttgcgtataggccttttacctggtgtgagttcctgaatgtggaaaacacctggcagtagtacccagctttgcagttaattactatctagctggcctttttttaaacccttgtatacacttgtaaagaagaactatttcctgaacctggtacagcactttactaatgataaaactttactcctgaattacattaactcaattgctaagctgttacccctcttaatcaggtagtagtttggtagtctcacagtgaaatgtagattgttcctttttccctgaacctctttaaaggttttcgtaactgaggctggtataagaaatcatggactttggaatcaaacttcctcagtctgggtataccacttttccactttctgggtaggtcttaaggtctcgacctatttaaat

SEQ ID NO: 10920 - DNA, 2761 bp, Homo sapiens
tagattttagactacatagctaaagatgtaatcatttgtggtggttttatatagaggttagctcaccctattcagctggagctgttttgggtattggacaacacatgaagaaaggatctgctagtataataagttagcagtttaaaactagtatccaggtttgtgctgaaagctgtttctctttccttagtgtttggtgctggcaccaactcgggaactggcccaacaggtgcagcaagtagctgctgaatattgtagagcatgtcgcttgaagtctacttgtatctacggtggtgctcctaagggaccacaaatacgtgatttggagagaggtatgtaatgaaaagggttttatttgtcattggtgctaaatatcctaggtattgtagttacacttacgtatttaattaaaggtgtggaaatctgtattgcaacacctggaagactgattgactttttagagtgtggaaaaaccaatctgagaagaacaacctaccttgtccttgatgaagcagatagaatgcttgatatgggctttgaaccccaaataaggaagattgtggatcaaataagagtaagtgtcctttgaaatatgtgatcaaactgaattgtgttttcactcttaagagtctgatactaatttttccccccaaaatccattagcctgataggcaaactctaatgtggagtgcgacttggccaaaagaagtaagacagcttgctgaagatttcctgaaagactatattcatataaacattggtgcacttgaactgagtgcaaaccacaacattcttcagattgtggatgtgtgtcatgacgtagaaaaggatgaaaagtaagttttattaactctgttatatttgcttcctaacaactttgctgtaaaattgagggatcattgtttggtgagttgttttaggttatttcagttggtgtgatttcatttagttagcctactaatcctgaaaatttcttgaatccttcaaataatggctgtcaccatttatagctttcctatagaaggaattcatgtgtcccctggttgacttaaggaccaagggtcgaactgctcgataagtggattagcaggcgtttcctctttgacttccagccatgtaaattgaacttaatgttttgctgaccataaatgtgtggccctagcaatggtcttttaaaactcaggatttttcctttctctctcctattattagacttattcgtctaatggaagagatcatgagtgagaaggagaataaaaccattgtttttgtggaaaccaaaagaagatgtgatgagcttaccagaaaaatgaggagagatgggtatgtgtgagctcctccattgaagcagattgattaaaacagcttaggaaagggcaaacttggatcacgagcagtggatttttttcatatctgatagtgaatttaactttttcatttctggcgaaattaaagagatctgtgaccaaaagtggtcaagcactggagtctgaggttttcaatgtgagtttaataacacaacttgtcttttaacttaggtggcctgccatgggtatccatggtgacaagagtcaacaagagcgtgactgggttctaaatggtaaatatttcaaatgaagtatttttcccccttacttaacctagctagaattctgctcagataattgatcatgtatatgccttcctttgtagaattcaaacatggaaaagctcctattctgattgctacagatgtggcctccagagggctaggttagtacaaactcgcattcatggcttggtttcccagaagatctccatttaacttttttaaagaaagtttattgctttctttaacctgcattttttctaagttttttttcacataaaggtgctgtctttgtggcaaggcctaggcatgacaatcggaggactcgagggggatggaggactagtgatcggctggctgcttccagtcgattagagaggtgaaaaagctgaacgtgtgccagtaatcttcaaaaggcagaacatatcacctctgccccgtaaactgttctctccgagggaaaaaatggaagttatcctcacagttcactgccgtggtatttcttctgtcccatgctttgcatgactgccatggtacagccttgtttcaaactgttcactgtgatctgtgggtctttgagtttcagtgagtttgctgaaatgtcgaagaagtagttccaaacttcaatgttcaatgaaatttttgttcaagtttgaaatggagagagcagctttaaaaggtactaagccttttacaaattggtgagtactggcacatgagatctagagcaggagcaacttctcacacatagtaagtgggaaaagaaagtgctttgaaagttcctccctcacctacacagtagtcgtcatgtcgagacctgccagagagagacacattctcaagtgaatcctggcttcttggaagcgcttgcctagacgagacacagtgcataaaaacaacttttgggggacaggtatgttttcttgcagctgcggttgtaaggtcttggcaagacaagcagtgtggccagaattttgaacttctgatgaatgtgtaatgcaaaggaccttgtacatttttttgtttcaaggtcctcaaaatgagcacatgaagaggttgctgtgaaactttaagtggccctactgcgcagaagcattcagatgtcacttgatgatctgtaagggaacttgctgatttgggaatgtgcttagggaacacacattccttttgaca

SEQ ID NO: 10921 - DNA, 2761 bp, Homo sapiens; identical to SEQ ID NO: 10920

SEQ ID NO: 10922 - DNA, 1182 bp, Homo sapiens
aatagagctttaaaagaaagaaattggctgggcatggtggctcacacctgtaatcccagcactttgggaggccgaggtgggcggatcacctgaggtcaggagttcgagaccagcctggccaacgtggtgaaaccctgtctctactaaaaatacaaaatttagccgggcatggtggcgcactcctgtaatccaactacttgggaggctgaggcaggagaattgcttgaatctgggaggcagagattgcagtgagccgagatcgcaccactgcactccagcctgggcgacaagagtgagactccgtccccgcccaaaaaaaaaaaaaaaagaaattactctccataacagtctatgttatcaccaacatatataaaaacatgatttagatttccatttcaaagttacattacccgattacttccaaataggtgctaagcaaaaacccccaatgtattattgaaccatggacttgcacctcatgtttaatgtgaatatttatttccatgtccctcttaactggttttttcttgtcttccctctagctgtattgttatttcagatatgtgatatctgttttcatactcttgcctttccatcatgaatgcttagttatgaacagagattcctttgtagagctcataggcagtacagagaggtaagtcttgcctcagagggccttgtatcttggtgtagtttttaaatagtgcatagtgtatagtgtatagtgtacattttgttttgcacatagtttgttgccccgaatgggttttttaccaagcctttttttctttcatgtatttacagtccggagcacaagattctcttctttcaaatacaatgtaattcgctttactttacaacactaaatctgggctttgaatttccagtgcattggactgattggattgttgggagttagaggctgttccaaccatccttagtttgggagagtggctccttctgcttgttttctaagcgtacagtcaacgggtgccatttgtggtatttaacatgttaggatgattgttccaaatgctgagttgttttatttctagatgtaattagttcactttatgtaatattcttctctcagactgactttaaaaacaaagttttatcattttcattgtatttgtatttattacagagtgttttagctttgatattctttgtattttcatt

SEQ ID NO: 10923 - DNA, 1106 bp, Homo sapiens
tgacaataagatgtgttcaggggctccctgtttttaagagactcttttaaaaaaaaaaaaacctaatgtttttatcttgagtcaatatgattaggtattttggatttacttttaatcttaaaatactgcatttttatagcttctcagagcatgtggatgggatgggattttcgttattttgctgggtcagcttatctttaatatatggactattcctataaaccaaagtctctgacaagtgcacctaatttatattgtattttaactacagtgtaagtttccattaacaaaaccatcctaaagcgttaactgctcataattttaatcagctacagttatgaaaaaggaagaattttgctctaaagattattaataagcttagaaaatcctgcttttacctaacagaatgaagtggggttgaggggcggtagtatgaacagtgattctaactctatggcgtaaattactttgaagagttcattttggaagtaagggaatcccgcttcccttggtgttgaagatctgcatctgattttgaaacgtccagatttagctttcaaggtgcgtgcatgttgaatgatccagaagcaacgaaaactctggggtgagggattgaaaaaatctgaaatcacagttggatttttaaattcaaccatcaaaaatatgtactatcagtttttttttacattgatgtgaaataagcaaattttcatgataattaagctgcaaaatttaaagttatcaagtaaataggtcctctgtgttctgtttcatgtgatggagtgggtttcagtctgtgttcttggagccaaagggttcctcaggggtgcctcaggagtaatggtttaagagaagaggggcaatgagagggagcgagggggaaggcctagttggtatttgagcaggggccttaggctccatatccccaccccctttacccagaacagcccatttttcttatgtatattggaatttcaagtaagctttcatggggtgcagtggggcggggaggaatggatgggataaaaaaagtggagattttgctgctttaaaaaagttgagaactacttgtgtagtttttaagtattttaatgtatttcatttgg

SEQ ID NO: 10924 - DNA, 1122 bp, Homo sapiens
gattctctacctcctcttctcccgtaggcctccctcaaatagaaacaaaacacccaacacattcaaattacatttgcaagtaaaatcagaaaaataagtcatttttgagtgaaagagctctttattctagttattggcatgtatgctgtaagtttagaaagaaatttcatcaagactcagctctagtagacgtcctgtttcctgggagcttctctgatttgaagggttgctctgctgatgctgcttttgttagtagtttaccacttttcatcaacattgaactgtgtcacacctcagggttcatttatccccattagtctgagatttattgttagacttgaggctaaaccgttaatgttagatgcttgtaagatgcggtgttgctaaagtagagatttataataataattaccagatctgaaaatacatgtgattatacgaaatcctgccgaatgtttacaggctctatgtgaactggagatttttacgaggcattgaggctcaattcttggctctgcagaaaggatttaatgaagtaattccacaacatctgctgaagacatttgatgagaaggagttagaggttagtgcattagtattataacatcactagtgtaacaaggaaggattgggaattattttgttacttagttttagaggaaagcatatttctggtgctttctaagtttcatggttctatgcttgagaattcttattcacaggaaaagtctttcatgcttttgaaggcctttcatgctttggaatttctgtgagtgaacaatctgtctctctctctctttttttttttctgagacagggtctcactctgtcacccaggctggggtgcagtggtgcaatcatggctcactgcagccttgacctcctgggctcaaatgatccttcagcccctcaagtagctgagactacaagcatgcaccagcacccctggctaatttttttgttttttttggtagagacagggttttgccatgtttcccagggtggtctcaaactcctgagctcaagtgatccgcctgccttggcctcccaaagtgctaggattataggcttgagccaccatgcccagctgtgagcagtctctcttatattgtgaaaattttt

SEQ ID NO: 10925 - DNA, 1223 bp, Homo sapiens
ttttttagattgggaggtctgagggacctcttaggaggcaataataaactgatttgaatgacaaaaaagagccaggcctagggagagtaggagaaaagaatatgccagatggaaggaagagcaactgctctcaggtggaatgaccttggcaagttcaaggaacaggaagaatatgagtgtggctgaagcagagtgggagggagaatggtgggaagtcaggtctgagggagaggctatagctagatcaagcagtgttttgtaagccagtctcacatccacagatacgtatggattttatatcaaatgtcattaaagtcatttaaatacatagttgatgacatgcttatcatttgcatttctttggtgcttagagacttcaggtttgcttttactcagagttcttgaagtcattatacttgtattagtcattctgttttcagacatgataagtggttgttactgcagtatatatatattgtctagagaactctacttttgatatctaaattgataacatcttttccttgttaattttcaatagaccggcatccgaatattctagccctggcagacctcttagctgctttgttgatgagaacactccaattagtggaacaaatggtgcaacatgtggacagtcttcagatcccaggctggcagagaggagagtcaggtcacaacgacatagaaattacatgagcagaacacatttacatactcctccagacctaccagaaggctatggtatgacaactacaaaggaaaaataaaatgtggtttactgatttcagtttgctgaggaagtcagaaaatatattttgaaaaagttattaatctgagcttagggattctgcatgaaaataaatataaaacctcccaactttgaaaagtctttgaagtggtagatgactacctaaccaacagtttgaccttgtgctcatcattcagcctcagcgtttgtgctcttctataatgaagtgagatgactagtttataacaaaggtagtgtgagaagcatacgaaatgaagtgagactgttttgtaaataggcactgtatagaaaggtaagatggtattgttactgataacggtaatctgaagttcaacctatgacataattttttagacatatatatttagaaataattttaaaggcatatttctgatcatatatttgtattgtctgtaattttggattatctgattggattgttgtaaatgac

SEQ ID NO: 10926 - DNA, 4256 bp, Homo sapiens
caagacagacttgcttgaggagaaggtgcaaattgtgagcatcaaagactatttcctagaatttgaaggggatccccactgcttaagagacgtccaaaaattcctggtggaatgtttccggaacaaacgccgggaccagcaacagaagcccttataccaccacttcaccactgctatcaacacggagaacatccgccttgttttccgtgacgtgaaggatactattctgcatgacaacctcaagcagcttatgctacagtgatgtacaaaagacttgctgttttaatatctttttgtgtttttgatgttttctgtttgttttgttttttaaaatagcagtttacaaccagaattagaacaatcttaattctacgtttaacttcttgaaaatcttagtactttttctgcggcctttggtttgtggctgaaagctgttgagtgactcatcgccaagatttgctgtaatgcaggctttgatctgtttcaccatggcttctattcaagtccagttaaaacctcccagctgacctcagactaggcatatttcaggctttaaattattctactttccaaactgaattctcctgcagtgccaagtatcaaaggtgtccttaaatacttgtagggatgaggttaggaatattcagttccaaaacaagatatcttctgtccgccttacatatagcagtgacacttgttgcctaactttatggtgacctcctattttgtaagggctgttagaagttctatctaagaaatggcattctgtaggtttatagaaggtttagccttcatattttaattgcttgtatacacaacagctgttttgcttttagatttctgtgtttctgaaggtaatgttcttcctgttttcaagtttacataaggatctttggtctgatgctgatgaagagttcacaggtggtatgggagagcaaaaggcaagctaatgctgtttaccgtgttttggtcaaacgtaacgagtgaaatagaatttgcctttctcatatttaattatcatgtagtttaatgtaccatatgtgaaacattctggccatagcagcaactaaaaactgcaagcaacttggtaacagaactttctaaataaacttaacctgttccagaatgtcatgtatttgacttttaagccctatctcagttggtcagtaaagaccaatccttactgtaggaaatcattgttgtatcatcacaaacatctatcttttgctgtcctgtccagtcccatcaactccacactgtgccatttgtggcatcgttttgtttatttggagtttgctaagggcagtatttttctgtcaagactattcaagaaggcattatttgagattcctgttcattcttggtgtgtctctaacagatacagtatgtatacatttgtataattgttgttgttgaaagtccagcttttttgaggtatattttaaatgttttaaggatgcttctaaggatcagtagtaatttttttagttcgcacctaaagatgattacattgacctcccccgactgcttaccaaattaaaatgtgtccacgaagtagctttgtgatcgcagatacattcatagtgaactcatcagaatggctggtttgcagtactgaaatactatcttctaggctgtatgtagtgctacaattagagaaacagaagtccaaggctggcgacagcttgaaaagtctgacagcttttctacttttcctgaaaattttaagactgtgatatctgtcattttactgtatagctgactgtgtactcaggtattttattggtccttgaaagattggtcgttatggatcacccagcctttccaagtcagtggctgttgttctgtcttgctgtctgatacgagagtggggcttttcagtgaactaaccagggattgttcttgacatacctgacttttctcacatttgaacttccactatcattgtatccatataacttctagcattttcatgccatggtaatccatgagctacacatacgtagcccggcaccgtgatgcaagttcatggtatcgtgcatgttcgtggtatcatggtatcattcatgcgtgtttgaatagttctacatctagtgcttcttgccaaaaagaatacattgtttaaattcacaaaattagcataattgcagtgctaatgaatatcggaatatgtgcacagtaacatttggactattcattggagagtttacccatacatttagcaaattgaatggccaaaacatttgactccagtgagggctcaagttagatccctatagaaagaggacacttcatcttacttaagtcatagttaagatctgtgatacgaaccatagatattgcctgacaaagcagaaatcaccaagtttcccccttttgaattaccaccaagaagtgttgaaacaccaaatagatatcatgttattttgggcatttgcagttttcttccctgctgcatgtaatgtctcagaatcaacattcttttaaaatctagactatattttgaggcaatgaattacttatattcaacttaggcttgttttgacattcagtagaactttaagttcaatctaaaggcttcagtccacatttttttatacgttgtattttaaaaacgtttgaaaggagtcttacacctgtatcatgaaaactgaatccttttgaaataccactatatgaagagagagatgaaatttagtgaacagaattgaaaaggtgctcataatttcactatgcaaacttaccccagtctctaaaaaagtaatttagatttaaagttctttgatgtatttgattttctaaatctttatggttatgatttggaataaaatgtgcctaatcctgtgttacattctgttcttaaatctgaatgccttctcatttaattctgaggaaatatcacacaagtgtcttcattgaccttgaagaaatgtatatacagttgccttataaaacaacataaatttagaccataacttttatagagaaagggttttgtcaaatgttttctgaaaatctgagtaattcaaagcatgcctctgcccctttaatatttttaataacctgcattgttgctgtctgccaaatattaaattgaaatcttcatttcaattttattatctggaaagggcactggattgctctgcaaccaaagaaagcaatatggaatgaaaaaactcattcacttttgtcttattttcttttaaggtgtattggcatgtaatttgcatagagaaggtcctctggttagtctctcaaattgaggctgtttagggaaatccttattcagttggtggcagtggttggtttaaagtagaaggaaataagatcgccttaataccagaaatgattagaagtgctgatttagattcaacaaataccatatgtccttatcattttttgtaagaagaaattggttaagtcctaactttcaatgtgtacccaaatacttgtatttatgcttttgataaaatgtattttcagcattaatacacatccgattatgccttatttatatatgaagaataaagttaccatgttacactgttatgtcctaaaattcaaatcactatttgagaaaccctcaaattggtgctttcattatataatgatacatttagacaaaaccccaaactaagccatttgaaacaagattctctccattgcagtttgtagcaatgttatttctgtgtatgtcatgagaaggctaaatatcagtgttaatttcttgtttgaatccgtgaaatcatgcctgtaaagcccaaacatttgtaacaaactccctaataaatttagagaaagtcactctgttaccatttcatttattttagttttatttgagaaattaagaccagaagttttgctcatgtctttttcacttggaaatctgacttagtacctagttaatttgtctctctcccatcattttaaggcgttcgcttctgttaatcacagatgatctgtccttgtgttgtgctgcttgactaaaagcactgttttgttttgttttgttttgttttttaatgataggatacagggtggcttttcagtctagtaaacatgaggaggggagagattgtgggtgggtgtgggtgtgtccgcatgtcccaaatacagcacatgcccatttttttatggtacgaggttagggcttattaataaatgtatactagatcttgaagtgtaagtctaagtctgaacattttaaacaagttggactttatggctttttcaagttccatcaagtagatactagt

SEQ ID NO: 10927 - DNA, 1154 bp, Homo sapiens
gaggggaagggaaggagggagggagggaaggaaagggaaggaaagggaagggaagggaagggaagggaggaggggaagggaaggagggagggagggaaggaaagggaacggaaggaaggaaggaagggagagggaaagagggagggaaggaaggaagggagagggaaagagggagggaaggaaggaaagaaggaaggatggagtgcaatctaagctttctattccatatgttcatatttcatttattggccttttgcccattggttcttcttttgtgacttccctattgatatcttctgcccatttttccatttttaaaaacaaggttattgccgacatggaggcccaggttcacaagttgagagaagaattgatcaatgtgaactcacagcggaaacagcagctggtagagcttggtcttcttcgtgaagaggaaaagcaaagggctacaagggaacatgagattgtcgtcaataaactgaaggctgaatcagaaaagatgaaaatagagctgaaaaagactcatgctgctgagacagagatgacactggaaaaggtaagatatttaactagttttttaataggcagttgaaatccatgtttaaaatccattgccaccacccttatatttaatctccaaaaggtagtagacatggcattactctttaaatgtataaactcttcagtcgaggaatttaagtatcttgctcctatgtctaagtaccagtaaaataatctagggaatttcctaacttttcccttggctttcatggaagggattatatggaatatcctattccatagtaattaaatacacgttgtaataaagtgatattataatattgtccaatattattttgattagaaatactggggctgtatccctaaattttcctaaatgggactaagtttcagatcttccctcagttgtctaataagcatttctagattttacagctttttataacagtgtcacataaatgatgacttattttcccaggttgatatttcagtcgagataagaaaagtctttttagaagtatatattattggaataaatgtcaatataatgtttacacattttgattggacttatattaaaggtgcaatctcaaatattctttcttttgacgttcagaaaaagtataactatt

SEQ ID NO: 10928 - DNA, 1151 bp, Homo sapiens
ttggttacatggattcattgtacagtggtgaagtctgagactttggtgtacccatcacccaagtaatgtacattgtatccaatatgtagtttttagcccacacccccttttccaccccctgcttctcaatctccaaagtccattataccattctgtgttcctttgcatacccatagctcagcttccacttataagtaaaaacatatggtatttggttttccattcctgagttacttcacttagaataatggtgaaagatttcctcaaagcaacagaggactccttggaggggaatgatgcttgagaccaatacactgttacaattgtctagggagccagtaatgatgaatttaaccaaggctgtctgtggtggtagaaatcgagaaaaagagcaaggaataaaagatattttagaagaaagcattgagaagacttggtgaaaaattgaattacctactaactggtgcactaaattttatatcatcaaactctatgtacctagaattggtttaactatgttttcaaaatttttgacagttcagacactgatacgtgactgtcaagttatcagagagactaaagaagaccagattgcagagctgaaaaagatatgtgaacaaagtacggaatctctaaataatgactgggaaaaaaaggtaagctacataaaatactaatggaaaacataaaagtttatgcttccaagtaacatatttaattataaaagtaatagatttcacagaatatacagaaaagtttaaaaaataactaaaattccaggctgtttagaaatagctactgttcatgttttggtatattttcttctggaagtctatggtctataaaatagttttcatttagaaaatattcttttgactagctcttgaatttaattaatgttctggatttcttatcagccaacagattttaaacaaaattagttaaatagcactaaaacagtttttggaaattaagccattttaattttgtatttgggccattggagtatttctttcctgaaattttagaaaatataatatggactagaatttattgtataaacttattttatttttgattgacatgtaatgattttacattttttagggtacagtgtgatatttcaatacatagatactttatatactgat

SEQ ID NO: 10929 - DNA, 1210 bp, Homo sapiens
ttagcagtgtggccagaactaaatcccaggtttttcactctgctgttcccaccttatcaagggattcctaattttaattcctgggttgcactgtttgtgtttctcatcccactgatttctttttttgtgtatgtaaagtagttagtgattacagaaagagataggatggcacataattaaaaactttgtatttaacttttcatatttaactaatattcctttagtaatataaacattactatcagatttatctgttatgtacttctgtttattgtatttcttagacagtagagtgcaactaaaatgtaaatatgttatcacttaatgtattttaatatctcataattcaatgtacatttaattttttaaatgtttgaatgtaattgaatttgagtatttgaaaggctgttttcaaacttgaaacttgatggaaattttagtggtttattatagtacattttgaaagaataatttttctaattttaaaaaatcagtccatctattttgatgaaccaaatccagcacgagcaaaaggttcaagcccagagggattaccagcctgggtactgggtgagctggagacaagtgaacacaaattaaatgaatcatggaaactctcttctggagaagataacactttagtacagtcgccaactgatgtctacaggtatgtaaagagaatgggattttgaatgtgtttcatcatttagtctgtctttggaactgatttatacattctgtttttccttttttttataatggaagtagtttacttttcccttaactgcacattcaagattattttatatttttagccatttaatagatacctgttaacttcatatatatttttgattgcttgacaagtggtccctgagcatctttaaatgacacaattatgtattttcctttatgacaagcatacattaaaagcattatcaataacttgaacaaaatatcctgcaaatccaccttgaacaatatttgttttcacttaatgatataatgaatgtaagcgtaaaccccattagactgtgctttcttactagagtattaaacttaaataggtttttttagtgcaaataaaaataaatttccaaatttttgaaatgttcaaaaaggccattattgtggtagcatagtttttggctttagggaagggatagatttaaatttggacttttatcaaatttttacttttctgtttggc

SEQ ID NO: 10930 - DNA, 1304 bp, Homo sapiens
gatacccgatttatcctgatgcgactattatacattacatgcctgtatcaaaatatctcatgtactgcctaaatatatatatctactgtgtactcacaataattaaaaattaaagttatttaatgataatctagagattttatttttgagaaaatatttctttgcatttgtctttctcatttaccaattacctaataaagtgaaattgtagaccaggagttagcagacaatggcccatgggccaactcctgcccacagtctttttttgccaggttttattggaacatagtcatgccatttgtttacttatggtctctgagtgctttcatgctacagtggcagagtagttatgccagagatcatatggcctgtgaagcctaaagtatatactctctggcctttaacagaaaaggtttgttggtccttcttttagactaaagcaggtgctattataggtctttgtaattgaatgtttcattttataaaaaataaaatttctaatagttcttctgtatttatagaacggcagaggtgtgctctttggattagaaagctgtgcgaaccttcaggaacaggtgcaggaataatggggaggaagaatcggaacctgtatgcaaaattgttattgcatatgcttaaacgaggtgcgcttgaaggcccttttacacaccgacctgaacccgggacactaaaaattctaccttcatacatggtaggtatcaatgaacaaaaggtatatattagtttcatttaaaaaaaagcgtcaagttatcatccctttggggaatggtaatactattaggttgtatgtgctagataatatattaaaattgttttttttcttcctgattcaatttttttccacctttaataaaatacatgtattgcttataaggggagtatccttattgatttagttatgcctcagtattcaacagtatttctaaaaaactgaaaacgaaattttttatattgagctttactttttgctaattttcactggattgtaatggtaatttttacgtaattcagtaaattctagtttttaaactctttcatatatattatttaaacgtttatgagaggttggagtgcatgatttgtaaaagttcctttttactctaataaaatgacagtaatggagtttgaaagtcattttctgtacttaaattaatttcattgtcaaaatcagctttattgcaaaggcagttattattatgcttggtggataaattgtcactgccctggtccttgtaaccataaaatataccttggtttgtttggtatttgagtgcctgtactta

SEQ ID NO: 10931 - DNA, 1137 bp, Homo sapiens
agacaaaaagaaccattacaactacggctggtctttttactttggagctctgtctttcattgtggctgagaccgtgggcgtcctggctgtaaacatttacattgagaaaaataaagagttgaggtttaagaccaaacgggaattccttaaggcgtcttcctcttctccttatgccaggatgccgagctacaggtaccggcgacggcgctcgaggtccagctcaaggtccaccgaggcctcgccctccagggacgtgtcgcccatgggcctgaagatcacaggggccatccccatgggggagctgtccatgtacacgctgtccagggagcccctcaaggtgaccaccgcagccagctacagccccgaccaggaggccagcttcctgcaggtgcatgactttttccagcaggacctgaaggaaggtttccacgtcagcatgctgaaccgacggacgacccctgtgtgagccgcctgccctttctctccgctccagcctctccccagaacggctctttttgtcacacaggatggcatgtgatcctcaagacgacgaacaatgaactaaagccaaatgcagccctccctggcctccagaggtggcgtgggctggctttgcacgaaggttgtgctgggagaccggacccggggctgcagaagaagctgaaggctgactttgtcccctccccgaaaaagggtgttttgatgcctcagggtctctgaaatctcccgggaagccccagagctttcctgaggctgcctggccttgatcaacttgggaagacaaaattgagccattatctcctcttggaaacgaatcttgccagaaaaacgggatttcagggccttccctccctgcctgggtgtcgggccaccagaaggctctgccggacgccaagaagacggtctctgggctcttgtcagctgcttttgaacctgaggttcctgcgtcgttgagccagaaatcagaccaccgaagctcactcccttcctctccatctctccctctctccaagactctggcagtggcctatgatcctgaagacagctctgcagccaactggtgctttggcctttgcgctgtcccggggccagcttccctcgacctggggaggccgtggcctgtggaggaggcccagg

SEQ ID NO: 10932 - DNA, 1099 bp, Homo sapiens
tttttttttttgtgggggagggtggtgagggcaaaggatttgtttttcaaattatgtgtttctcaggttaacaaagttattttagattctctgccatgccagcaggtgttagagagagcctgaagtgttacatatggcagaaaataaatgtctctgattactttgctacctttaaaaaaatctatatgtgtttgcaaaacagcctagggggatctaccacctacacagcatgaattattcataagtcataggtgcacatgtatgagcaagttatttttgagaaagaaactgcctataatataataaacctgtcaggtctttgggtattgtttaatttgtgtgttgttgctgttttatctggactgcatcttggggggtactgggctctgcttctggtttttagtttgcctttgaatttactgagctactagaaagacaaaaaaaagctatttttatggtaatagaatacagaatgacttaggtgtaaaagtacacgtgaagaccatcgtagaatatacagctttggagttttcttaagacacagtccttcctactgaaaaggcttgctcacctttggagaggattgtttatattttcagcctgggttcctttatgcagtcccaacttagaggggagcttcggtttatttacactttgctttgcacgataacttgtatgcgaagacctctttatatctttcagtaggtcagagggctctttgtcctggttgaagtcccaaagtgtcagtgcagctgagaatgtttctcagcctccccctttacagaggaagggtcctggattttcataaatccagaccatgcctgcttcctataaatccatgtatatgacattgtactgtatctgatttctgtgccagtcatctgacctgattctttaaaccccataaaggtactggctatatgtagtagttgtatcctaggtaaatatggtgattaaaatacttctcttctaaattataaagataatgagttttgcattttattaaagggtcctgttattagtgacacaggatttttttttaatgcttcatacatatagttcttatctaaacttgttcagctaacttcatagatcagtt

SEQ ID NO: 10933 - DNA, 1324 bp, Homo sapiens
agttttagactatgtatgatgtgttgttgtaatctccatccaccataggatagagttaaaggcattctttgcaggcatattttgtatgccactgttttttgaaatgtgaaaaaaacgttggcatacttagttattttttggacaagctacacttcaagcttgtttttaatgttaatttgatagtgtgtgtttttttttttaaacaaatcaagaagctgaaaaatttttaggattgttggtgcttagtagacttgataactattttaaaaatgcgtgaatttagtaaaattctttttttctcactatgcatgtgtaaatgtttgtaacctggcttccctcttctccagtggtataaagaattgtgccgctttaaggtttgggtttttttctctccagtaaaaattttggtaccttatttgatgtttacattaaaatgtgacattatacgtggcaattcaaatattttgctagctgtcttgtttgaggaacaccattaaagaagaaatataatgtttgtcaaaaatgtatcaaaattcatcagaatctggggcagaaaactacccttgtttttcatgtctttcaattcttctaaaataccccttattgaacttgtacacaatataaaatttaaatagccatcttaaatattctaccatctaaaaattgctttgaatgaattttggtaaaatccaaaggaagatgtttaccctcttgaaacttatggtcttgtcacacatttaaagcaatatatgtccttattttcctgaccttgtaatactacttttatatttcagaggtatctcgaaactacaatataaacttttaaaaaaaaataagatgaggctggggaacctttcgaatgaacccaatcttcctgatgatccattcaaaaacaggtttttggaagaccactttcgataggcaatcctataatcaaagtacatttttaaaatcaggttgtaaaatggcaaaggtaaagaaaaattactgacatttcttctatgattggagtttagtttatgttggccagctacaaccccttttaatcctcagacagtttgggataaaagagtgcctttggttaatggttagcaagctccaggataagcgctgcgtgcctcttgtattcagctctacctttctgctaagagtgcggttcatttgtgtgtggctttgcgttccaggctgtgggtctctgtgtaaggtggcagacatagacttgtaaactgcagacgtgttaatggttagcataaatcacagctggaaaactgagccggcaagttacagcaccactctttctctgtatgatgtcagatcaccacat

SEQ ID NO: 10934 - DNA, 1145 bp, Homo sapiens
accccttattccatgttactcagtatataatacaaggaagggtagcattgtaaacaaatggaatcccatggcactattacttagctcagtaataaaagctgttttgaccaagagtctggatatgcagctcctttttatttaagagagagcatgtgcctgtttacaaactatgagcagttactagaataaatatcaaagtgtacagttacacaaactagttttttatttttcagcaagccttcagatttgaactttagtttttatatgttagctattccacttctcatggctgttttatgtgtctataagatagggacgtttggttggatgtgttgtgatttcagcattctatggcagaaggtgtctgtccttgtggctatactgtccttgagttcctggagatgagagccagttctgacacactgagtgaatgaggcacatgaacattgctgggctcatccttaaatctgtgtcactgttctctgcttttagcgccacccaagactgtcaaaccccctgaggatcaactgaagtcggagaacctcgaggtgtccagttccttcaactacagtgtgctgcagcatcttggccagtttccaccccttatgcctaacaagcagatcgcggagtcggccaatagcagtagcccccagagctctgcggggggcaagcccgccatgtcctatgccagcgctctgcgggcccctccaaagcccaggccccctcctgagcaggccaagaagagtagcgaccctctgtctctcttccaggaactgagcctagggagctcatctggcagcaatggcttttactcatattttaaataatcactttttttttccctcaagggagaatgttttaatttctgtttgtatcagtagaattaaggtagttggacttcatctatagatgcacagttccctttgttttaatattaaatatgttctcacttaattgctttgctgctagacttgcaactaatttttttaaagtatattccattattttgcatttttgatgtgtcaaaactttgacagcttttatgtagaataaaaaaatttttaaatttgtgtattgttacatatgtttgcatcaagctagcagccaagaggttaattgtgcaactataaaaaaaaaaaaaaaaa

SEQ ID NO: 10935 - DNA, 1217 bp, Homo sapiens
gagaaaacttataaggatttttaaatattttcttaggtaaaagtgatacaaataattccggacctgaaattaataagattcgaacaccagagaaaaagccaacagaaccaaaacaggtatgctgcttagttactgtgttgtcctagtggatttagtctgattggtcatcttggaatcttgatgttttaaagaaaaatacctccctttgtacacttatcctttatgtttattttttcacagggatatagtgagccatattgccttctctttcttcatcttttctttggctgtgctatttcatgtatcagtatacttttctcaaattctgttattcagtgataaaattgaatttagagattttctatgataaggtagtaaatgaagacagagctacaggtgtgtcattacaagtgtgtcattatcgtgaagaaggagaacttcttcctcagagaggggaagacttactcaggtccctcaccttattctctcatcatacccactaagcccttaattctttatctgtccattcatctattttctctgcttctgtgcttataaactacttagagaaaatcaagtcactggttgaattagtgccactggaagttcttgttttctaatttgaatggaaccatcagggctcccctgcatttctttcacacgtatctcacttcctttgcccagttgtctcagtgactcttctcaagcctgattaccttccacattctattatcctattggatggcttgcctcagactgacctcatcaggatttgctcttgttaatttgtaaccttaaatttagcacttttaccatagccctgagcacccttacttcctgatcaccagtctcagaggaagagttcccgttaagattaatctctacttggcggttgctcacgcctgtaatcccagcactttgagaggccaaggcgggtggatcatgagatcaggagattgagactatccaggctaacacggtgaaaccccgtctctactaaaaatacaaaaaaattagccgggcgtggtggcgggcgcctgtagtcccagctactcgggaggctgaggcaggagaatggcgtgaacccaggaggcggagcttgcagtgagccaagatcacgccactgcactccaaccagggcgacagagcgagactctgtctaaaaaaaaaaaattaatctctcctcttcaactaccacatagaccttgtcccttctc

SEQ ID NO: 10936 - DNA, 1164 bp, Homo sapiens
aaagttaacggagctaatgaattggtctcattttgtaaagtgatgttttcattttatctttttatttttgtataagtcaaaaactgttcccaagaaatacaggacacaggcttggattagtctagttcacttggatctaaattgatttgagaaattccacatcttgtgaaatcttaactactacttaaaaacattactctatcctttgtaagactatagatttttagaggccgtccgtcttgtatataaacccattttctctttctttagaatttttgaatattttgttaatttgctgacacgagtattttcaattcaggagttttagccttggaaacaatttctttcatttaaggcaagcactgtaatttcaggctgagatgatcattgccaaaggtttttggcaaccttgcccacactccagaatgggaaaatgcttagctgcaaacatttctcagccacgttggtcaggatagttcacaatcatgacagccaaggagaatgactgtaaatgagaaatacgtaattcatgcccactccccatagacttcagactttggattttagcagttatttcttccagacagcttggcaacactatacatcatctgctttaaatagtaagtcccttaggatttttatttcactttactaggtcaaagagacttctattttgtaagatttctgagagtttgcatttaacagttataataaaataataggagcagtagctcagatgtcattgtatttattccttttgtgttaatatgcagagattatatatctagacacacttaaacaagttttctgtttttgtattttaaggtggagttgaattaaaagcacagatgacctatttgaattttacctataataaatgaacattaaatgatgtggttactcatattaagttggaataccagttttttgagttgagactccttaggctaagttcttccttaacttttccccctgtctattaaactatgtttctatgcaattatgactttaaaagattatttttatggtaatctgacatgtatacattcatatggaggggaaacaagtaaatactataaaatgatttaatgcctcaaggaataattaccaattttaagccctcagtttcttcctaatctgaaaaatgatctattttccattaca

SEQ ID NO: 10937 - DNA, 1172 bp, Homo sapiens
atgcctttataaggctgaataatctattgtatgtatatgccacattctgttgatccattcctctgtccagggatactcgtgttgcttccaccttttggctattgtgaataatgctgctatgaacgtggatatacagatatctgtttgagtcactcctttcagttcttttgagtatgtatgtaagcatggaattgctggatcatatggtagttctctgcctaaatttttgaagaactgccacactgttttccacagcagctgtaccattggacattctcaccagcagtgcataagggtttcagtttctccacatcttcgccaatgtttgttatttagcaataacattttaaaaaatgcaatgcttttattatatcagtggttcagaatgacaatcttaagtcttttcttaaaaaattttctttgtaggaaagcaattcagagttttgtttcttagcacagtacgtacaagacatacttgtaaacataaacagacaccaattaaaaagaaagagcaacttctggaagattccacagaggacttagattatggttttttatctaactacaagcttctcaatactgccatcacaagagcacaatccctggttgctgtggtgggtgatcccattgctctgtgctctattggaagatgcaggtaattatgtgttaatgttgagacattaaaggggaaatgtgacatgatttgtatccctatgtgtatatttattcatatgaccttctggctaattaaaaacaggtttattgtagcctgatatccagtgggaacacaaaagcatattactttggatctatttattgtatgcataattgtgtattcattgagccattattcaagagatatttcctgagtgacttctaggttctaagcactcttccagcttctgaagatacatgagtgaacaaaatagacaaagatctctgcccttgtggggcttacattttattggtggggcttactttttactggtaaggagaggaagattaccgtaaactaaataggaatattatatagtattttacatggtaagttgaatggaaaggaaaatattaagaggaattaggaatgatgaggacggtgcagactagcttgtgattgtaaatagcgtggtgagagcagacctcactgagaagctgacttggaagtgagggag

SEQ ID NO: 10938 - DNA, 1203 bp, Homo sapiens
agcaggcagtgaattctgaaagtctttctctgtgatccaaatgtggcctagtcccagctgtggtttgttgtcaattggtggctgttggctggtctgcttagttatatcagtgaggaaggggacaatgttagaccttgtactgctgggacttagtgatgtcactgatgacaggaagcttctagttggttggttagtttcattggcctgatctggagagagtggactgagaattactggggctgtgagaacttgccttccctagaatcatggcctgtctttttcccacacaggaacttgagcttgttcctccctacacaggaacttgggggccaatagcattgtccctgattttcatgttttcactggttgtattattggagaattttactgtttaaaatgtaaatgaaaaatttatattctcattcagttcacatcagcaaagcattactcccatttaggggtagtttttttttttttttaaatgacatctgctaaaatgggatcctttataaatcagttttagttacgatattattttctccaaacattggtgataactttaatatgtatgtgtgtgtttgtttttaaaggtgtttgaagtggtggaacgtgtagaagagttaagaaggaagtggccagtagcgtgggggaagttagatgatggcagtattggtgtggtgactccatatgctgatcaagtgtttagaatacgtgctgaacttcgaaaaaagagattatctgatgttaatgtagaaagggtgctaaatgttcaaggtaagtgtcaattgaaatgaattcagtcattcaaatgcttaaatctaaagtgtgttcacattggatttttagtactcaagatctcttttctgaagttatgtgttcatttcatatcaagttctttaatgccaggtttggcaattaaaggttgaattcatttacatgtttattaagtttttatatccaaataaaataagtattaacaaatataccttttctgtgaccataattatatcaatgccacatagtatatgtatgctgtgaattacagtcataatagtatataacacattctgctgttatacggtatctgaggatgaatttcttcataaagatttttatgtatagacttttctaagtttatagttaacagcaactcttttaaattatgttcatttaattaattgctataaaatctgtgcttttaaa

SEQ ID NO: 10939 - DNA, 1151 bp, Homo sapiens
gacgttgcagtgagctgagatcgcgccactgcactccagtctgggcaacaagcaaaactctgtcccaaaaaaaaaaagcggggggaataagagaatacagattagtgaaaaaatattcccagagaatcccatggtagtccctctttaaaaataatacttatgctgggtgcggtggctcatgcctgtaatcccaacactttgagaggctgaggcgggtggatcacctgaggtcgggagttcaagaccagcctgaccaacatggagaaaccccgtctctactaaaaatacaaaattagccaggtgtggtggcatatgcctgtaatctcagctacctgggaggctgaggcaggagaatcacttgaacccgggagttggaggttgcggtgagccaagatggcaccattgcactccagcctgggcgacaagagtgatactccgtctcaaaaaaaaaaaaaaacttatttaaaaaacagtaagaaacatttaaaaataatgtatttaccctcctacaaaggcatgtctatagttccttgtctttggacatgtaagaattggaggcaaagaaatgtggacttggagaaatctggggccagcttgctctccgcaggctcaagatcaaccatcccacatagaagcagtaaaaacaataaattgttttggtttggtaatatgttattctaacgaaggattttaaacacttaagttggctattcttcatataaaaaataacttctttttttttttccttttcaagaaggcaaggtctcgctcaaccacactggagtgcagtgggaatcatagtttggggcagacatgaatcctgccctgaagcagtcctccccacttaccctcccaagtagctgggactgctggtacatgccaccacaccacatgaaaatacaatttttttttccttttttgagacggagtctcgctctgtctcccaggctagaatgcagtggcacgatctcggctcactgcaacctccgcctccagggttcaagtgattctcctgcctcagcctcctgagtagctgggactacaggcacaagccaccacacctggctaatttttgtgtttttagtagagatggggttttaccgtattgaccaggctcatctcaaactcctgacctcaggtgatctacccat

SEQ ID NO: 10940 - DNA, 1699 bp, Homo sapiens
caaatcattcacaaatgcagttatttattattattattattattatttccttagagatccttgttctgacactgttattttttaatcatgattacctgtgagcctgttaatctctctaggtaattgagaactgattataatttataatttttttacttctggtttataatctaatgggaaaactttgcatttagattttctatagatttaaaaattagagctgaatcattgcttcttcgtattattttaacttgacaattattaaagaaatgtacttatgtattttaggggggtatatgttcaaataggaaatttgtagaaatgatgtaatgtattgatttgtaatgatgtcacgtctttatctacaggtaggcgaaaaccaagagtacatcggcctcgttctcctatattggaagaaaaagacatcccgccccttgaatttcccaagtcctctgaggatttaatggtgcctaatgagcatataatgaatgtcattgccatttacgaggtactgcggaactttggcactgttttgagattatctccttttcgctttgaggacttttgtgcagctctggtgagccaagagcagtgcacactcatggcagagatgcatgttgtgcttttgaaagcagttctgcgtgaagaagacacttccaatactacctttggacctgctgatctgaaagatagcgttaattccacactgtatttcatagatgggatgacgtggccagaggtgctgcgggtgtactgtgagagtgataaggagtaccatcacgttcttccttaccaagaggcagaggactacccatatggaccagtagagaacaagatcaaagttctacagtttctagtcgatcagtttcttacaacaaatattgctcgagaggaattgatgtctgaaggggtgatacagtatgatgaccattgtagggtttgtcacaaacttggggatttgctttgctgtgagacatgttcagcagtataccatttggaatgtgtgaagccacctcttgaggaggtgccagaggacgagtggcagtgtgaagtctgtgtagcacacaaggtgcctggtgtgactgactgtgttgctgaaatccaaaaaaataaaccatatattcgacatgaacctattggatatgatagaagtcggaggaaatactggttcttgaaccgaagactcataatgtaagtaaatctggtcttaattttttgtatgcatttaaaattagactagtttccttcgtgattgatgtagcagagctatgctgttgatgtggtataaacctttgtaacttaatagttatacagttaaataatttcttaattgaaggaatatgtgcattaaaatagcttttaagaaggtaaaggaaacatatatgaaagaagcaaaattccattgttttttgatgcctaggctaggaaatagaatgtttctagttgggactgggcacagcagctcacgcctgtaatcccagcactttgggaggccaaggtgggtggatcacctgaggttgagagttcgagaccagcctggccaatatggtgaaaccccacctctactgaaaatacaaaacttagccaggtgtggtggcgcacacctgtaatcccagctactcaggaggctgagacaggagaattgtttgaacctgggaggcaggggctgcagtgagctgagatcacaccactgcattcc

SEQ ID NO: 10941 - DNA, 1323 bp, Homo sapiens
cacatgtaaattgtcaggagagttctcaagtagatgtggtcaatgttagtgagggttttcatctaaggactagttacaaaaagaaaacaaaatcatccaaactagatggacttcttgaaaggagaattaaacagtttacactggaagaaaaacagcgactcgaaaaaatcaagttggagggtggaattaagggtataggaaagacttctacaaattcttcaaaaaatctctctgaatcaccagtaataacgaaagcaaaagaagggtgtcagagtgactcgatgagacaagaacagagcccaaatgcaaataatgatcaacctgaggacttgattcagggatgttcagaaagtgattcctcagttcttagaatgagtgatcctagtcataccacaaacaaactttatccaaaagatcgagtgttagatgatgtctccattcggagcccagaaacaaaatgtccgaaacaaaattccattgaaaatgacatagaagaaaaagtctctgaccttgccagtagaggccaggaacccagtaagagtaaaacaaaaggaaatgattttttcatcgatgactctaaactagccagtgcagatgatattggtactttgatctgtaagaacaaaaaaccgctcatacaggaggaaagtgacaccattgtttcttcttccaagagtgctttacattcatcagtgcctaaaagtaccaatgacagagatgccacacctctgtcaagagcaatggactttgaaggaaaactgggatgtgactctgaatctaatagcactttggaaaatagttctgataccgtgtctattcaggatagcagtgaagaagatatgattgttcagaatagcaatgaaagcatttctgaacagttcagaactcgagaacaagatgttgaagtcttggagccgttaaagtgtgagttggtttctggtgagtccactggaaactgtgaggacaggctgccggtcaaggggactgaagcaaatggtaaaaaaccaagtcagcagaagaaattagaggagagaccagttaataaatgtagtgatcaaataaagctaaaaaataccactgacaaaaagaataatgaaaatcgagagtctgaaaagaaaggacagagaacaagtacatttcaaataaatggaaaagataataaacccaaaatatatttgaaaggtgaatgcttgaaagaaatttctgagagtagagtagtaagtggtaatgttgaaccaaaggttaataatataaataaaataatccctgagaatgatattaaatcattgactgttaaagaatctgctataaggccattcatta

SEQ ID NO: 10942 - DNA, 1355 bp, Homo sapiens
tatcatgattcctgtaggtaaaagtacaagacgacctctagatgtcttttctttctatgaaaggagctgctatgtacacatgtgcacacacacacaactgggaatcaacaatgagtttattgttcatggtagattaaaattaagcttgcataaaggttgggctaagtggtcctggactacagactctgttgccttgaatataacagtacaatttgtcaattactctgcaccaggctaaaatgagtaaaatctatttgaaggtatcttgtttgtaaacatttgtcagattctaatttttttcttttgtattaaaattcaactatggatgtatatgaaacaaaataaatggagataatttttctcccacagacagaggtgtctttgaatgtgcgctaatgattatctgtaagcctttgtggggagggaggcctgcaaggtcatgaaaggcagaagagtctaattgtgcctggatttctccaggacagcagtggcccctcgttttatcattcccagtccattgtcatcacgtcagagaaaaatcttcaggggtgctaatcctgttgcatcagttgatcatactaacgagaacggtaatgcgacaagatacacattgccttcatctgtacattctgtgataccaggcaaattaccaattacacacagctacttatattttatgaagggcattttttagatgacctcatcctctgtgttatttgttgattgggtttgttttctgtttgttggtttgtttgtttcttccacgtaaggaaaagtagtgtaaacagtagcgagaaaatggaaaccacagaggaagatgtattttgcatgtttttcctttcagtgttcttacacgttgtatcactgcattgtggtaatagcttctataaaatctgccatagttggattatgcagctttgcaaaaatttttactagattttgcactaactcatattagctttgtcctaccaacttctggaatttatctaattattgtttttcaaagtttctttccttttaatgtttccctgctatgcaaaacctttcccagacctcagtttcttaaaagaaagatgttgctacagttcccgattctttcttattacaggctcaggtgtacaggttattctgggttaattttatctaatgaagcccattcctttttgtacataaagatgtcacttaaacttatgcttacaaactaaagactaatcgctcaatatgaaaacatgaaaaaatttttgcttaaagtattaagatggaagtagttaaatatgggttattttgtccttttacttttttaaaaaatgttacatattgtatgcactgtgctgatgcaagaattctacatttta

SEQ ID NO: 10943 - DNA, 1188 bp, Homo sapiens
cttctgccattgtttattacagtgaatttttcacctcttctttgtcttttctttgaattggttacatatgctttgtgttttggatagtagtttggcctttgggaataaaagttattttctagttctttttcataaagtaaaccaagaatttaaatagattaaattatttctatgaaactttggaacgatatggatggggaaactatgacttttgagtattgtagttgtaggtttgatttgcattgatggcaatcttcaggaatacttaaggattacattttcttattcccttgccatttggtacagttggtataaattaacctagccactgggctaccgaagtaaggatctaagggctatctgcaggcagtatgagaatcctgctcagactagaggtaattgaagacaggtaccacttttaatctgagacactactagaatgttgaatgggcatggctatttggttgaatctctttatactttctttttacctttataacagcaccaaataatacagagcagttattttgattcttgtctttcagagtctctggacaagtgggaacgtcttacggtagctgatgcattggaaccagtgcagtttgaagatgggcagaagattgtggtgcagggagaaccaggggatgagttcttcattattttagaggtaaagaactcagaatttaatacttgaattttagaggtaaagaactcagaatttaatactttaaaaagttgtacgctctaagagggaaagagtgggctaattctgaactatagctttagtttttaagaatacctgaccattttattttaaaattatcttttactttgaaatgctgttgtttggttttctgccaggtcactatatttttaaatgagtttgagtcagaattcttgaagggccctagacatgaaaagccaaattctaaaaaccatttaacataacaaactgtgatgattctgcactattcttgttaaaatgcaagtgtttgggctatttggcaaataaggattaaaggtaattatttaaatttgaaaaattactgtgtttgtatatctccacattccatggaaatgtatagcagatactcttgctaagcggatccaagtggcagatttctatgaatgtggctccatagttgctaattgattttatttaaatcaggggtcaggagactgtaaagg

SEQ ID NO: 10944 - DNA, 1516 bp, Homo sapiens
gctacaacgtcggtcagaaaatgaagagtttgttgaagtgggaagattggggccttctgattattttggtatgtatgaattccctcacaataaatacatggtttctttaagtcacctctcagtgagatattgtagtcttccataattttgtcttctcctgaattttattttctaactgcagtcttttttggctctgagagggaaggtgtgagattttgatctttactcatttaatgaaattactgattgtctcatatctattgtcttctttctcagaagtgcactgctttaaggaaatgtttttcatagaagttagcctgttacccatctttgctttctccaggtgaaattgcactactgatgaatcgtcctcgtgctgccacagttgttgctcgtggccccttgaagtgcgttaagctggaccgacctagatttgaacgtgttcttggcccatgctcagacatcctcaaacgaaacatccagcagtacaacagttttgtgtcactgtctgtctgaaatctgcctcctgtgcctcccttttctcctctccccaatccatgcttcactcatgcaaactgctttattttccctacttgcagcgccaagtggccactggcatcgcagcttcctgtctgtttatatattgaaagttgcttttattgcaccattttcaatttggagcattaactaaatgctcatacacagttaaataaatagaaagagttctatggagactttgctgttactgcttctctttgtgcagtgttagtattcaccctgggcagtgagtgccatgctttttggtgagggcagatcccagcacctattgaattaccatagagtaatgatgtaacagtgcaagattttttttttaagtgacataattgtccagttataagcgtatttagactgtggccatatatgctgtatttctttgtagaataaatggtttctcattaaactctaaagattagggaaaatggatatagaaaatcttagtatagtagaaagacatctgcctgtaattaaactagtttaagggtggaaaaatgcccatttttgctaattatcaatgggatatgattggttcagtttttttttttccagagttgttgtttgccaagctaatctgcctggttttatttatatcttgttattaatgtttcttctccaattctgaaatacttttgagtatggctatctatacctgccttttaagtttgaaactaactcatagattgcaaatattggttagtatttaactacatctgcctcggctcacaaattccgattagacctttatccagctagtgccaaataattgatcagatgctgaattgagaataagaatttgaggtctacattcttggttgttaatttagagcgtttggttaaagtatgtccttcagctgactccagtataatctcctctgctcattaaactgattccaggagattggatttgctgtgactagatacagatggagcaaatgtcctaacagagaaatagaggtga

SEQ ID NO: 10945 - DNA, 1202 bp, Homo sapiens
ttgtgctgtcccacaaaagtgagaggagtacttctctttttttaaatcatcagtaaatttcaattttaaggggcctatgcaaaatgcctcctttctgatgtgattttcttgggttgctggccctagttgaatttatgggccctgaagcctctagtggaaatcttgtcttccctatagaacgagaacagctatgtaatttgcttcaccttctgttaggacttgcaccctctttgccatacagaatgctataaaaaggacagtctgccagtgaccgaagctttctcatttttttttcttccagaacaatagcacacatcttggttaaagctatagtctccttattattcagaaatattctttttcctgctgcaccattaggcaaacatacattatgcttagaatgatacttggaaactccttaacagggcatattgaagtatttgatccagcaacttacctaaaagaatgtttgctcttcacctagggaaataaaacctgaatttcagagccttcaaaatgaaattatccttccaggggaagcacattgccaccaaatacatcactcactacctgttcctggtgactacatagaagatgtgttatttttctgaggtttagaaagtcactgtttacagctatgcaaatattgtactattacagatttttctaatgaagtagtttgaaatcaaggctttagtggaaggtaatcttttcagtttctgacccagatttctttttcaagcaaaactcctctgaaagcctctttgctatagaggtgatgaaggcacttgctagcctaagcagaaacataaagtaaaaaattttgtagtagggaatttttgttggtaagaaatcagtatcatcttgtaacacaaacacgtgttaatagaacttaaaaatactcagcctaattccttgggactttcagtatcttgacatcacttgtattatcatttgaacttggacattgagccctttatttttgggagtttacagttaaattttggaagaattgtgttgtatttctttcttagatgttgtcagtatgaacagaatttttttgtgaacagttaatcttgatgtgctccatagctttctccagtttacacttttgcatttctgagattcagggtctttttcaaggaaggaggctaatgtttaaggcctggaggctgaattcagggagcgtattggcaagttta

SEQ ID NO: 10946 - DNA, 2314 bp, Homo sapiens
gcctctcaaagtgctgggattacaggcttgagccactgctcccagcctattttggtttttatagaagaataactctgaggctagtttaaaaggccagattaagtaatatctttaagaaataatcacccctcttcattactcacacatggaccacagaacgatcataggtgaccttgggcaagtaacttctctttgcctcagtttccccaccagtaaaatgaggataattatgatactgacctcatgaggttgttgtttggggttccatggttcattagtttgcctggcacatagtaagccccagtaaatgttaccattattaatggtagtgtgctttctcttggaattggacattgcagaggatgccttcagcctagccgtggcctcagggatcattaaggtcttacttttcttcctgtccttctcttccagtggtaatgggaaactggcatcctgggcctccatcctgggatttgtagtgatgatgtcactggacgttggcctgggctagggctgagacgcttcggaccccgggaaaggccatacgaagaaacagcagtggttggcttctatgggacaacaagcttctttcttcacattaaaacttttttccttcctctcttcttcatctcattatcctgattgactctgattataatagaaccatttttactttgctttgagggagatttttgatttaatggggaattttaaggtgtcatggaaatacagattctttgttttggccactgaatggactctctcttcagtgggattatcaaggaacttcagatcagggaaatctccacttcgggaccttctatctgcctcccaactcctcaaggtcacctatagaagcgagctaccaaaagacgtctcctaagcattttggtggcctagtgactcagggcagagtggccagcacacctctcatccgcccctcctgctccatcactgctgagcctctccccatctagaatgttggaactggagcatcataaagatagcaagctaccttccaaggccgagccagcccagagaggagcatgtcttcctttacctccccctaaggagatactacatgggagggggacacagaaaaagggaaggaaattggctagtctggctttttttttttttttttttaaaggcaaagattgacattattgaaggaaaggggatgaggacaactgtgaactcacagtgagccctgtggaaagaagagacagacagagtgtgggtttgttcggaggcctctgctgtcaatggattccaggagcaaggccatttgtcgcgctttccaaatttcttaggcatttattttgataagtttatagccatcatgtttctaagagacttggagacaccagcaaactgctagaactcaaactcttcaattactcaaagaaggagccatttcagttaactcaagtgaatgaaagagttttggaatctgctgtgggtccttccctgttgaccatttggtaacttataatctgacaaaaactcttgagctgcaacaggccttgccagagggctcaggatgggaaaggaagaaggggataggaaaagaagaggtaattttacatttcccctttaaagtaaattttagccaactcatcattctgaaatgtccctataaagaatgagtcgaactagaccagaagccagcctactccttcttacatagcttctccaacaggggtagcaatgacctgtccacttcaaacacagataaggcctgccatcctcattggttaaaggcacacgtgagactttcagtgggctctgctgagaaggaaggcagcccaggagtcaggtatgcaggcattgcattgtcagtgtctgctctcagagtttacacattcaattgcttccaagggtgaatctcctgctctgtgaatgctatcagaccccaaaggccaaccttgggctgggtctatgtacgttcttccgaagcactgatgatcaaaattgaagacacattcagaggtttgattggttgagattaactggtgtggtggttggtgtatgtatgttttatttttatgtctttgtatgtagttctacataatgcaaattgtgctttctgatggacaagacctcataactgtgattaatatcaataaaaaggggatgttgtggatgacctgtgttacgttcagtacttctcaaagctgcttctttgcaaggatgatcataaaagagctaactaaagttggaactaacacctccctgatccaacactaggagaggcaaaggaaagagctcagatgggaagggctagtcagattcttggttgcaacaacagcat

SEQ ID NO: 10947 - DNA, 1241 bp, Homo sapiens
tgaagatggaatgcaatacattgttttccagcctcggggtcagacgcctctccttcttgcccctcattgtttactaaggacacttggctagtttaagggccagtgagcatgaggagagttggatgcctttttttcccctttggatttatatagaagttccccatttaatcctgcaagaccccggggacgaaaaccatgccaggatgctgtggagaatgggcccctcctcgcttatgtggagtgctctcctgagtgaattaaggaaaaacaaattggtgaccagtcactgtgttcacaggagtgatttcagggagaacagtcctttcccatttccatgctggcattttaattgaatctttttgccatctctatgctaagatgatctctaccccttagggagagcaaatgtacaaaagttaaagctatgctgcagccagggctctggtatctgtgttcagattatgtcctgcatgaattattcatggagaactcaaatgtcttctccatttgggttaatcctcactgccgcccacaacttcctacgtgggatggaaccaggaaataaaaatttcatccaatgtgagcttaaatcatagagggttagaatgacaaatcttcctcctgcctccaatcacacttgtcacttatacccatcagaacgctttaggtatcatcttctctttttactggaacatagtcaaggactgtctggtgacacagtagagcactgtattcaagtaaaacttgtcatttttcatgctgagttctgaacacaaggccacaggccttttctgtctattttcactaacatgactgcgctgggctcctgggttcccctttgaagaccttatgatcctgattgtgagtcttctctagggtataaaagttggccagactttatctgatttttctatcttcagggccatgggctggtggggtcgggggaaggtggtacagtgaattcagtgcctgtcagtcaaaaaaggtaaacattggcaagcccttggatggacattttccaatggagtcacagccgggacggggtcaggggagttggctctgcaggacagcctctgggtactgctgggtcttcttggccaacccagagttaagtggtagcggagtgaggtgtgtgggagggagatgtaacccagtccccctgctcaagaacactaggcacagcctgttaccgggttaccaagcaacccttgtaaccgttgctagctgttcagctgcaaaag

SEQ ID NO: 10948 - DNA, 1184 bp, Homo sapiens
aaataaataaataaataaataacctttggttcctggcctaagttttttattctttaccattctgtccttgaataacgtgtttaagggtttttaaacaattttttatactcatataatgactagttgacttgctgtaaccgtaagtagcaaacatctagcttgttccaaatgaatttaaaagatacaacacataagtaaaatattggtatgtacaaactatgtgcttctcataatctcacatttacctttttcaggaataggatgagtgataatccacccagaatggaagtgtgtccttactgtaagaagccatttaaacgattaaaatcccacttgccatactgtaagatgataggaccaaccatacctactgatcaaaaagtttatcagtccaagccagctacactcccacgtgctaaaaagatgaaaggaccaatcaaagatttaattaaagctaaagggaaagagttagagacagagaatgaagaaagaaattctaagttggtggtggacaaaccagaacagacagtgaagacctttccactgccagctgttggtttggaaagagcagctactacaaaggcagataaagacatcaagaatccaatccaaccatccttcaaaatgttaaaaaatactaaaccaatgactactttccaagaagaaaccaaggctcagttttacgcatcagagaaaacctctcctaaaagagaacttgccaaagatttgcctaaatcaggagaaagtcgatgtaatccttcagaagctggagcgtctttactggttggctcaatagaaccttctttgtcaaatcaagatagaaaatattcctcaactctacctaatgatgtacaaactacctctggtgatctcaaattggacaaaattgatccccaaagacaggaacttctagtaaaattactagatgtgcctactggtgattgtcatatttctccaaagaatgtcagtgatggggttaaaagggtaagaacattattaagcaatgagagagattccaaaggcagggatcacctctcaggagtccctactgatgttacagttactgagactccagaaaagaacacagaatccctcattttaagccttaaaatgagctcattaggtaaaatccaagtcatggagaaacaagagaaaggacttaccctgggagtagagacgtgtgg

SEQ ID NO: 10949 - DNA, 1228 bp, Homo sapiens
ggagggggagggtggttaccatggcgatgagggcgccgctggcaccatcacccaggctcccccgtacgccgtggcggcccctcccctggcaaggcaggaaggcaaggctggcccagacttgccctccctcccctcccatgctctggaggatgaggggtgggcagcagcggcccccagccccggctcagcccgcagcatgggcagccacaccacacgggacagcagctccctctccagctgcacctcaggcatcctggaggagcgcagccctgccttccgggggccggacagggcccgggctgctgtctcaagacagccagacaaggagttctccttcatggatgaggaggaggaggatgaaatccgtgtgtgaggcggacagtgggtggccaccgggagctcttggctgcatcttctccctgcccccaccccactatgacctttgaccctacggcgcaggggcagccaggacccttgattcagaccatggaccctggaccttgtagatgagggacactggcctggccctcgggtcttcggaggacgtagggggctggcatgggtgccgactggctgcctgacttcatcatgctccctgcacttaggctgcgtgggacaagggctgtgttgtcacagcaggaataggttttcctctgttggcctccctttcctccaccctggcctcaaatggatgccagatgccaaccccagttctggccacgtacagccagcgggtcagcccagaggcagcctcagctccagggctaaggactctcggctcccattttctctgctggcgtttctgctgtgcccagcagtggctgctggggaagcagctgcagcaggagggagacggtcttgcctctcagcccctccctgccccaccccagctcctgccctggaaatctggagccccttggagctgagctggacggggggccagctgcgagcatgtgcactaaacgcagccctttccaggggaagagaacaggatggagaatggaaggaaagccccccaggcttcgtgaattgcaagaagggacccttccaggatgacactaggaacagggctagggcactcgctcagtccctaggggcttgtttgttctttattattgtgtttaaatccttatagagcaatatcaggatggtgttaataggtctgcctcagaatgagaatcaatccttttagaaaacctttatactaagcctcctcttcaaaattcac

SEQ ID NO: 10950 - DNA, 1221 bp, Homo sapiens
caaaggacattcttgggagatttccagctatcttaacacagggagcccagagcctcgacaaaattgtgcctccaggggcacaattctgaggttcttcagagacacacaggagacacatcacccctaccccacctttaatccagaggctgcagcccctgcagagagaccctggctggccccccgggtagaggcatccaggggacaggcggaacaccccgcacagatgcgctgccggcttcaggctagagtcagtgcagagcccctgggaccgtggatgagggaggggctcctgcttccagtctcccacggagtttcacaaggtgacttctctgtcatctagggcaacacattcctcccagacttcatgagattcaacaagataagggtcccctgcctgaccccaaggtctcaacaccatccctaaggctgagtctggtgccagatcctttgggctggagatgaacaaaaaagcaaaagggctttgctttgcttcctcttttctccaggggtcctgcctccttctggccctccctccccactcccatcaccaggcctggagtctgtgctccccctccgcagaccccagtaattgctgattgagtggctttgaggagctgttaagagaccagggagacgaagcagtcacttgattgcctggcggcctggcaggacagcccctgaaaggccccctttgtgctgggccggtccctgggaagctgcattcaattaccgaggcccgtgagaattgaaagctgcaataggagcccctggtctccccctcgctttcttctcttctcgccctacccccactccgaaaagaaacagatgttcagggagatggaggcgggagcagcagtcgctgatgcaaagccctcctgccttggctttggaaggcggagcgggggaagaggcagaccagactctcgcctgcctggcccctcccgcagcgcgggctctgtttggctccctgctctcccttctagtgccttccatccccgagatgctgcccatagagtgcctgggatcagtaggcattctgcagatagtagctggtaggacggggatggtctagatgagtgggctttgggatctgggcccctaggagggctagagaatcccactccccaccttgcttccagtccggacatgcctctgtcttggagtcgggggttagtgggtggggtatcagctaaccttctactcccattccacctgcctgag

SEQ ID NO: 10951 - DNA, 1158 bp, Homo sapiens
ccggatttgttcctgtggggcagttcagcctttatgtccaggcccagtggctggtctggcccctctgcctctcacaaggcaatgtcagttctgcccccagcttggctgaaggcccaaggctctgccctcagctgcccaccaagagtcactgcttgcctgggctcatcccaaaggaaaacttccaccccaggtctaggtttcttttcaaagacatcccttgggctccccagctattatttctcaggcctctgtccaatgcatagcaagggctcagccgaaacaaccgtatctaggaaactttctgtccgggagtatagagcctatccgtcctccagagaccctagaactatcactatgtctaaaaagggaaagcagtagagaactggatccctgaaccacatcatattggccccagtagagttgcctttatgcatcttgatctgatttacatcgtcagcctagattgagagctgttttaagaagcagcctcataaaatgaaacagaccagtgctttcctggacagtcttttgacagaatgcctcaagaaggcctaccttttgtcccaggaattgtatttctaggaattctgtatctaggcctaccttttgttccaggtacctaggcttaccctttgttcaaggaattctgtgtcctaaggaattgggcggtgatttgcacaaaacgttttgtacaacaaagttaattagtttcattctttttttttcagagatagggtcttgctttgtctcactggaatgcagtgttgcaatcatagatgactctaatctgaaactcctggactcaagcagtcctcccacatcaacttctctagtagctgcgaccacagacatgcaccaccatgcccggctaattttacaatttttttgtagagatggggtctcgggtagggcgcgatcccaacaccttgggaggctgaagtgggcggatcacgaggtcaagagatcgagaccatcctggccaacatggtgaaaccccgtctctactaaaaatacaaaaattagctgggcgtggtagcacgcgcctgtagtcccagctactcgggagggtgagacaggagaattgcttgaacttgggaggcagaggttgcagagtgagccaagatctcatcactgcactccagcctggcgacagagtga

SEQ ID NO: 10952 - DNA, 1167 bp, Homo sapiens
ctgcatcgtgttgtattgggatggggctgaggaacatgctccctccctccctcccataaaatgcctgctcttcacctcccacctttgtggggggcttttgaggacccagctgcgtcaggagttttgcttcaagatgtcagaaagtcaagttcagctaagagacacccaggtccccagcttgccctgagcagcccttcagggcttctggttccttctgccgcccttcctgagaccttagaaaccagaagagccatacagtcagtggaaggcgggggggccctggcctctgcaccgggatcccagtgggaaccttcatgccttatttatttctaatgggtaaaggggttttcttaccaagcatccctgacctcctggagacaccacctgctttccgggcggcactgtgatgggagctggtggcgactgagtccttctgtacgtgcaactgggaaacttttgtcctttgaggctaggcagctccctgccctccgtgtgtgtctgttatctgggggagaggagtgtggaagggttgggggaagagctccagcctgtctgctccccagctctgtagtggcagaccagcgtcacctttgaagtatacgtgagagaaatatatttacaaatgctttattctcttctttaataaaaaatgcaccagtattctaaaagcaaaaatggcccatctctgtgcatctcacacacctgcctcgcgtcacgcccagccatgggagagggtaacatcctgtgtcccacttccctgagactgaacagctccaaatagcaggctctggcagaagtttctatatttattgagggccagctagggatacatggtgaacaagccagcagggcccctcttcccttggagtttatattctggtgtggggagatccacccaaaataaacaaacaaaagatacggcatgatggaaaaatcggggcaagagggtagtgctacctcagctagagcacgtgggcccaacagggtgaaccaagttaaaaaaaaaaaaaaaatcggcctggcgcggtggctcatgcctgtaatcccagccctttggaaggccaaagtggattgctagagcccagaagtttgagaccagcctgggcaacatagcaagaccccctttctacaaaacattttttgaaaattagcagagcatggtggtgt

SEQ ID NO: 10953 - DNA, 1695 bp, Homo sapiens
cttggccaggatggtgaaaccccatctgtactaaaaatacaagaattagccgggcatggcggcaggcgcctgtaatcccagctactagagaggctgaggcaggagaattgcttgaacctgggaagtggaggttgcagtgagccaagactgcaccattgcactccagcctgggcaacagcgagactccgtcaaaaaacaaaacaaaacaaaaaaaaacttcatgtccttatatatttgtgtaatttagaaaagaacataaacaacaaatatgggaaaagatgaacaatggttaattctgtggagtgggagcatggtgggtgattattttgtttatgcttttaggtatgtttccaaccatcaaaccaaaaaaaaaagaaaaagagaaacagatccttgatcttaacaggaaatggctgtcattatgagtattatttctattccctgttttcatagaaaatgtggacacagacttgccaggcagcctggggcagagtgaagagaagcccgtgcctgctgcgcctgtgcccagcccggtggccccggccccagtgccatccagaagaaatccccctggcggcaagtccagcctcgtcttgggttagctctgactgtcctgaacgctgtcgttctgtctgtttcctccatgcttgtgaactgcacaacttgagcctgactgtacatctcttggatttgtttcattaaaaagaagcactttatgtactgctgtcttttttttttttcttttgaagaacaggtttctctctgtccttgactcttgggtctgtgggccatggcatgagtgttttctagtagtagattggagggaaagctttgtgacacttagtactgtgtttttaagaagaaataatttggttccagatgtgttagaggatcttttgtactgaggtttttaacactttacttgggtttaccaagcctcaactggacagaccataaacagtccacaggcaccgttcctgccaggccccaacccacagggagtctctccgcagagccttcttggtgttgccctaacttgccagtggcctttgctcagagcctcctcctgtgacatgtgaacaatgaagaggcctgcgcctcctgccttgccgcctgcaaagcaaagaaactgccttttattttttaaccttaaaaagtagccagatagtaacaagactggctggctgatgagcaaagcctttgctctcacgcagaggaaggcttggatgtacaatgaaactgcctggaactaaaagcagtgaagcaagggaggcaatcacactgaagcgggtcttcctccaggaacggggtcccacaggcgtgttgttttaaataacctgatgctgtgtgcatgatgctggtgcttgaccatgaaaggaaagtctcatccttaaaatgtgttgtacttcacaatcctggactgttgcttcaagtaaacaatatccacattttgaaacactgtgtactgtgtcttctttttgagatggtttcagtgttctccctggttagatgcttttctctttgtcactataaatcctgcctactgattggaggagtcatttgaagttaaatagccagatgtgcctgtaattagctacttgggaagccaaggcaagaggatgcttgagcccaggagtttgagactatcctgggcaacatagcgagacctccttaaaaaacaaaatcttaaaacag

SEQ ID NO: 10954 - DNA, 1152 bp, Homo sapiens
ggtcacaggctataatggactacagctggctgtttgaaaaacatagtggaggtgacaaagccatgagattggatgtgatagattacttctggagggaaagagccatcattcttcccagggcagactcaggtgcagaaagaagcctgtgtgtgaagagttaaaaagccaaagtgtggggtgaggggactggcctcctcacgcctcggcagggccaggcctcctgccaatgcttatgggcccggatctcctcccaggtgaccatcttggtgctgcagggccggctggatgaggcccgacagatgctctccaaggaagccgatgccagccccgcctctgcaggcatatgccgaatcatgggggacctgatgaggacaatgcccattcttagtgtacgtgggggtagctttgctctgctgggtcacaggagatgcgtgattcactaaatataaagggtgtggatgggatgacgtctcatggctggtctctcccttagcccgggaacacccagacactgacagagctggagctgaagtggcagcactggcacgaggaatgtgagcggtacctccaggacagcacattcgccaccagccctcacctggagtctctcttgaaggtctgggaagcagttcagattgcatccatgttggcttcctatgggggctgtggcatccagtgcagcagtggcaggagcttggtcctccttggatagggctgtctgtcgctctgccgtgatggcgagagctttcagactagttgaaatccggtgcccttagctgagagcaggagcattatggagaaggtacccctgagaggaggacagagttcagcacaaatgtctctcctcagattatgctgggagacgaagctgccttgttagagcagaaggaacttctgagtaattggtatcatttcctagtgactcggctcttgtactccaatcccacagtaaaacccattgatctgcactactatgcccaggtgagtgagctcggggtgggcaagggtgggggtaggagtcctgggggcgccctgatgggtcattctctttgaattcctccctgaggaacaggaagaccctttcctttggcccttagtgaaagaacaaggcaccttctctggggttcgttatacagcagccctgcctgcccc

SEQ ID NO: 10955 - DNA, 1178 bp, Homo sapiens
tgggggaatatgcaggttactcagtgctcttgtttcgccataggaaagtatcgcgagttccaccgtatgtacggggagaagcgttttgccgacgcagcttctctccttctgtccttgatgacgtctcggattgcccctcggtctttctggatgactctgctgacagacgccttgccccttttggaacagaaacaggtgaaggttgcagcagcagtggttttctttgcttgtcagtccctgctagagcttagttgtatagctgttgccgatgtgcgtgtttcctcctttgtcgttctgcctgtgcgcgtgtattccccttagcgccctctctgggattccagactcacacaggaaacaaacactgcttgatttgaaatgaggtattcgtatacaaagcacactattgcgaagggtatgaaaggaagaacgtccgaacatgggcccctgccccaaccaatgcaggccagggctgggggcagccaagcaaggcaggctctcttccctaggtgattttctcagcagaacagacttatgagttgatgcggtgtctggaggacttgacgtcaagaagacctgtgcatggagaatctgataccgagcagctccaggtcattttcacttttgggttgatggttccacatggaggtgggaaaaggctccctctatctcaggcttccccttccctccagaaacactggctcctatggacacatgtgcctctgttccccttaacctgtgtaattcacacaccaccttcttttaggagaaaatcagggattctagtgttctcatctctacattttgttctttgctgttcatcatttccagtatggccctttggtattgctttcttttacatcgataatttgctggaagctactatgaatgttaagtgccctctacctttggattagctagacccttcgggagtgtgaaagggctccttcctgctcttagctcatgctggcgctctctgctttgcaggatgatgacatagagaccaccaaggtggaaatgctgagactttctctggcacgaaatcttgctcgggcaattataagagaaggctcactggaaggttcctgagaactgcttcaatgtggtatctttgtatggcaatgtatatagatttttttaaaagaataaatgttgttttgcaaatgtaggttcttagagtc

SEQ ID NO: 10956 - DNA, 2241 bp, Homo sapiens
gtcccagcctgaggccccagctgccccagattaggacgtcaggcccaccacctcccagctggaagtgttttgactgtaggattgacacatccctttgctgccttaggttaagtgtctgagcatggttgggggttgcggggaaaagggaccattcctctagcacagagagggtagcagaatagagggcgtcctgccaaggggccgcctgggctggatctcacttgctgccctctgtcacaggagaaggtgcggcttcggtataagctgaccttcgccctgggggagcagctgagcacagaggtgggcgaggtggaccagttccctcctgtggaacagtgggggaacctatgaccccagaggacgctgtgatctccaccttgaagccaggcaggctgccctgagacgaggagggctctggtcccgtcactctccatgccctgacaacagtgcttgtagctttgatgtggaacaggggccctgggcatttctgctgagaaccaaactgctgctgtgataacctctcctttggcccctaaaaggacctgtttttatctacctgtgtgacttgaagtggccatatgctgtcaggggtgcggagtggcccctgacttcactgctgtcccgggaacatggacccccaggcttggcgtaggtgtttgcttccttctactggcattcactgaagccactggggtgggggtctctaaagagagactgtcatgggtcattccccacaagagccacatcctcacacctgacagatgcacggcccaaggggctgcagccctgttgcaattccatgcttcccccgccaaccagctcctgctgccatccccagggaggtggcccaggaaggtgcctggcccagaataaggaactggcatactgcaaagtccccagccctgcctctggtggacagcatcgtcctggaatggccacggagtgatgagttgtgtgcttgtccctggcagtggcaggctgtgtcctatggacatcttggcaggacatggaatttggcctcatgacaggcccaactagggataggaaggaaaatgaagagagccagtatttccccttctccagaagcaggtactcagctttctgggaaaagcgtgcctccagccgtggggacaggccatcctactgactacctcttgcttggcatgaaataaactgctatcctccccttggaatctaccgccactctacatcctactgctttggcctccctctcctctcaccagatggcatgtggtgtggcacctgtggctggacacaggaggcctcaggatcacaaatgttacactagacatatgtcctaatgtgctgcccagaaacctcaactgttccccagctactgaggggcactgtcagcgagatgttgggtctggaggtgatgagatcgggccacacttgagctgagtcaccagaccctattgcttcaacagtgcttggcccccgccagcttgtcccagccactctagctgctggatgtgatcctgggacatgtactccaagcctccgtcacaaaaaaaaaatcaccagctgccatagacacgggggaagcttgcggagcccaggtgaacaagctcagcaatcggacatctctggggaaaggaaggtggcacagaccatgttccctggttcctccctgccccttgccaggcttccttattccttactatgggaagaggtcatatcccttccctgcccctcgctgtctttagcaagcaggtttcactgcttcattagaagaggacaagtcaaaagtgaatcatttttcactacttaaggaataaatccaagagctttccagagactggctgctgcagccctgggaatgtctgtggaattactatgtggaaatggaactttgtgttatgctctagacattacagttatttgagtgttactcgttactgttgaggtcagtgcttcgtggcaaatggctgtactggatatcccagctctgctgcccttgttttgctgcatgttaaataaaaccattttcactgtacttggaatcttcctagtatagacgccattcaccctgatggaggaaaaggtaccacctatgaattctagatatacatgaggacagcctatgatagaactgcccaaggtttttgttaaaagtgcgggttcctgtacgcttatattttaagggaactaaataaccaaaatgttaagtgttccagaagaggtgaggcaagatttcagaagcacaagtataccaccaag

SEQ ID NO: 10957 - DNA, 1178 bp, Homo sapiens
ctgagcagccacgccattgctgtggagggagccttacactttctctgcctccgaactgcacttactaggtcctcattttcttttgccatgtagtacctgggggacagggtgtctgagaaagtgaagaccaaggttattgagctgctgtacagctggaccatggccctgccagaagaagcaaagatcaaagacgcctaccacatgctgaagagacagggtacgtgtctgcctgcccgcagcctccaggcagccctcgaaggctggcccaggcaaggagagaagggaaggtttgggatccccagagtccctcctgaagagaacagcatttgtccccaggcaaggctgagtcggagttggatgggataaggtgtagcagcctgccctccaccctgctaccctttgcaggtcttgatcacagggacgtggcccttggtgtatgaggaggggtgacaaggcaaccacagcctgagtgcacgtgctgccatgtcccctttcaggcatagtgcagtctgacccaccaattcctgtggataggacgctgatcccctctccaccacctcgtcccaaaaaccctgtttttgatgatgaggagaagtccaaggtaaaggacaccctgggcctgggattttctcatacgagagtgggtggcagcaggggaatgtggtttgcactgtgctgcggggagcctctggggtttccctggggtacgggtgctgcctcttcccttcacctctgatttcctcctctctcagcttttagccaagctgctgaaaagcaaaaacccagatgacctgcaggaggccaacaagctcatcaagtccatggtgaaggaagtgagtgggccccggtccttcaggcacggggtggaggagcccatggccacacagcagaagccgctttgccccggacacgggcctgttttgttctcccctgctgccagctgccctacctgtgccccggtggctgagagtgggaggaggagcacaatagcttccgcgggagcacggaagagaggagtgggttgggagcagtgttgtgaaagcagaagtatagactgggccccaggcaccccacactgaaaggagcttccgagcgtctgtacttgtgttgtggggtaaggtgtgacctggtggaagtggaaagacagtcaagtgacgctctctttctcttgaacttct

SEQ ID NO: 10958 - DNA, 2161 bp, Homo sapiens
gggtagaaggaaagcatgtctctgcttccatggcttcctgagaaagcccacctgggctgggcgcggtggctcacgcctgtaatcccagcactttgggaggccaaggtgggcggatcacaaggtcaggagttcgagaccaacctagccaacatggtgaaaccccgtctctactaaaaataagaaattagccgggtgtggcacgcacctgtagtcccagctacttgggagcctgaggcaggagaatcgcttgaacctgggaagtggaggttgagtgagccgggaccgtgccattgtactccagcctgggtgacagagcgagattccgtctcaaaaaaaaaaaaaaaaagcccacctgaaagcctgtctctttccactttgttggcccttccagtgggattatcgagcatgttgttttttcatagtgcctttttccttatttcaagggttgcttctgagtggtgttttttttttttttttaatttgttttgttttaaaataagttaaaggcagtccagagcttttcagccaatttgtctcctactctgtgtaaatatttttccctccgggcaggggagccagggtagagcaaaggagacaaagcaggagtggaaggtgaggcgttctcctgcttgtactaagccaggaggctttaagctccagctttaagggttgtgagccccttgggggttcagggaactgcttgcccagggtgcagtgtgagtgtgatgggccaccggggcaagagggaaggtgaccgcccagctctcccacatcccactggatctggcttacaggggggtcggaagcctgtcctcaccgtctcgggggttgtggcccccgccccctccctatatgcacccctggaaccagcaagtcccagacaaggagagcggaggaggaagtcatgggaacgcagcctccagttgtagcaggtttcactattcctatgctggggtacacagtgagagtactcacttttcacttgtcttgctcttagattgggccatggctttcatcctgtgtcccctgacctgtccaggtgagtgtgagggcagcactgggaagctggagtgctgcttgtgcctcccttcccagtgggctgtgttgactgctgctccccacccctaccgatggtcccaggaagcagggagagttggggaaggcaagattggaaagacaggaagaccaaggcctcggcagaactctctgtcttctctccacttctggtcccctgtggtgatgtgcctgtaatctttttctccacccaaaccccttcccacgacaaaaacaagactgcctccctctcttccgggagctggtgacagccttgggcctttcagtcccaaagcggccgatgggagtctccctccgactccagatatgaacagggcccaggcctggagcgtttgctgtgccaggaggcggcagctcttctgggcagagcctgtccccgccttccctcactcttcctcatcctgcttctcttttcctcgcagatgataaaaggaatctggcattctacacctggaccatttgattgttttattttggaattggtgtatatcatgaagccttgctgaactaagttttgtgtgtatatatttaaaaaaaaaatcagtgtttaaataaagacctatgtacttaatcctttaactctgcggatagcatttggtaggtagtgattaactgtgaataataaatacacaatgaattcttcacttggtatctttttttccccttgcctgccttaaaaatttaaaaaccgcatcggggagtcaggaatcttgggtccttatttcagacgtgatcacccagcttacatccccctaggggagcatgtggggctcacaggccttcctgggagcgatgcctgcagttggctgtcaggaactcctggggagcctgttaacaatacagaatcgcaaaccccgccccacatcctcggacattgcctttgaggacacagacacgcccgctgtttctgatgtagagaaaccactgaccacgctttgggaactctggtctagaccaagggctttgggaagataaagagcttggcttatttggttctcctgttttctgtgttaaacaagaagaaggacagaaacacctgtgaagaaacggttttaatatgctgagtaactgaaatatacttgtttgc

SEQ ID NO: 10959 - DNA, 1447 bp, Homo sapiens
gcccctgctgacatggctcctgggctgcctgtccctggtccttgtggtggtgaccaatgagatcgtgaagctacatgagattcggtgagctgtcagcagggcgcctccctctgggctcaggcatgttccctaaacctgttactcccttggcgacactcccccacctttccgctgcccatccctccctcctcctctggtgtcctgccccggcccctggtctaaggatctttgccaacctgtactttaatctcctgccccaccagggtccgagtccgctaccagaagcgacagaagctgcagtttgaaactaagctgggcatgaactctcccttctgagccactggctgtggtggctgtagttgcccccgtccctggggctaaagccagacccatttctgaacaggggagtttgtatcatgaatgtttccaggtttgctcctgcacccgtggcactggaaacccagctccccgtgtcagaccccgctgtcttcctgagccctggggctcactgtggaggagctgacggcctgggcccttggccagtcctggctcttccctgggcctcaccagggacactcttgaatgtatggcctcaggcgctccctagaggggccctaaaccccctcacctgtgagctaccccctttagggatcccttgcccccttggagatcccttgccccccagtgcctctgctcgtgggtccctggacacggccttgaagccaaccttctttggaggagcaacagcagcagccttggccgacgcgtccaactcccaaggctgccgtggagggcaggggggtggtgcttgcctggatgtggccccgagtgcctcccctccctccctctgtgggggagtctcccgcctgaacctgaagatggagcagggcccccgcttcgccctggagcctcttcctgtgcctggctcaagctggctgcctgtcagtcttggggaatctggcccaggtctcctcagcctctgccccagttctgggagaagtttctactggtgtatattttttactggaaatgagccttttaggaatgaatgtagactggtttgtattaaaatgtgtcaattgctaagaaatacctgtggctggtctgtaaggccactccagggtctgcccacccccggcggtggctggcaaagggaggcctaaaccttcctccatctacgcgggtgggtccctcaggtctggctcaggcgagacccctagggtcaggggtccccatgtcacagaggcaaacacacagcccagtcacgtggaatggtgttttcattggtgttagttgggggaagaggttaatggttacagagccagggcctgggccaatggggtcaggctctccctgccctcaggtgggcagtcggggctcctgctgtggtccgaagcccctcccccattgtgtcctctcaggcagttgatagaataaattccattta

SEQ ID NO: 10960 - DNA, 1201 bp, Homo sapiens
aattagttaggcgtggtggcgggcacctgtagtcccagctactcaggaggctgaggcaggagaatggcgtgaacccaggaggcggagcttgcagtgagccgagattgtgccactgccctccagcctgggcgacagagcgagattccgtctcaaaaaaaaaaaaaaaaaccagcatggtggtggacgcctgtaatcccagctctactcgggaggctgaggcagaagaattgcctgaggcggaggttgcagtgagccgagatcacaccactgtactccagcctgggcgacagagcaagactccatctcggaggaaaaaaaaaaaaatccagatagggaagtcggtgacctcggcatcctcccaggccatgtctgtgcatctgagagccaagggtttgtcaggacaccgggaggcatgtggggaggggagggcccagcagcagcagcacagggcaggagaactggtttggccatgggcatgaacaaccaccccacgcccccaggtgttcacgctgcccaaggtgagtgccaagctgaagttgaagctgacggccctggagggctcaagagtgcggcgggtcagcgtggcccacttcggcagtcgtcgagccgaggactacggggagcaccacctggcagtccttaccaacctgggcgacatccaggtggtctcgctgcccctgctcaagccccaggtgcgctacagctgcatccgccgggaggacgtcagtggcatcgcctcctgcgtcttcaccaaatatggccaaggtgtttgagccgggctgggtgggtgtcggggccccgggcactgcacggacgggaagggtggccaggggtgttgtggccacggccagactggatgggccttaagcggagaactgcgagggagcactagcccctactcccccaggtggggaggcagccttggcagccgccaggccaggccgctagcattgcccccactccccaggcttctacctgatctcaccctcggagtttgagcgcttctctctctccaccaagtggctggtggagccccggtgtctggtggattcagcagaaaccaagaaccaccgccctggtaacggtgcgggccccaagaaggccccgagccgagccaggtgagtgaaagggccagaggcctctcccgcccctcccgcccctccctgccctctctgagataccgaggctcccactgctgcct

SEQ ID NO: 10961 - DNA, 1226 bp, Homo sapiens
tcagccccaggagctggatggttcaggtcccatgcagggacgtggacttgtgcctgctcagcgccggcactgttctttcagcatctacgagaagctgatccagttctgtgccattgacgagcttggcaccaactacccaaaggtgcgtctggcacacggggctggagggtgatggggacacccagggtcctttgcttgttccatgggatttgacctgcagccacagaaaggtccacgtggtggcacggctcgttgaaagcacagtccctgtctcttttgtttgagtccctattgttctgaaatagtccaataaagagattccggtggccggcctggtgcctggcccctgactggtggggacatgtgtggacctgctgctcctggggttcgctggatgggggcttcgtgctcccatgttcttcagcacttgccagccgccccttggctaaagaccaaagatgacagccgagccccgggtaaggggaccccagaccaagaagctctatgggaagacttgggccaggaacttgggtttctgagtcatttgtcatctgagtcattcgccttttcctttgcaggatatgtttgatccccatggctggtctgaggactcctactatgaggcattaggtagcctttcgtccctcctcccatataccttgtccgcccacccgactgtccctttatccagtcagttggttatccaggtgacacatatttcagggtctactctatgtcaggccatgttcaagggggctgggtacaggcctgaatgagacagacccacccctgccttaagaggcttatgccacagcaaagaagatggaacgtcacgccagtaacgccagcatcgatgagtgttggtgatgacggagttgctgggtacaggggagctttggcaagcagggtcatctaatctggccaaagggatgggaaggcctcactgacaaaactgtgttcaagctgaggtttgaagaggcagaggggccaggcaggtgtaggcagaatgttctgaggccagtgagaggatggctttttcttaagataccagtttgggagcactgggagaaatgtcaaagggcccaaacccctagaccataggtcttaagcctgcagcccatggcccagatcttggcctgtagaggtgctttgtttggccttcatgaattttgtcatcttttaatttgaattcattgccaacattttatataatctctgattccagc

SEQ ID NO: 10962 - DNA, 1308 bp, Homo sapiens
ggcgtctttcttaggtgaaagaaaatggcccgaaccaagcagactgctcgtaagtccaccggtgggaaagccccccgcaaacagctggccacgaaagccgccaggaaaagcgctccctctaccggcggggtgaagaagcctcatcgctacaggtaggtcgggcgggggaacaatggcccggcggtggccggctttgtgcggcagcgtccgctcactcctcccctgctcgctgcaggcccgggaccgtggcgcttcgagagattcgtcgttatcagaagtcgaccgagctgctcatccggaagctgcccttccagaggttggtgagggagatcgcgcaggatttcaaaaccgacctgaggtttcagagcgcagccatcggtgcgctgcaggtaagacaaaggcctggagccgggggagggctgggcggtttccgctccccgagtgggattaatagtgcggctctcgtcctcaacaggaggctagcgaagcgtacctggtgggtctgttcgaagataccaacctgtgtgccatccacgctaagagagtcaccatcatgcccaaagacatccagttggctcgccggatacggggagagagagcttaagtgaaggcagtttttatggcgttttgtagtaaattctgtaaaatactttggtttaatttgtgactttttttgtaagaaattgtttataatatgttgcatttgtacttaagtcattccatctttcactcaggatgaatgcgaaaagtgactgttcacagacctcagtgatgtgagcactgttgctcaggagtgacaagttgctaatatgcagaagggatgggtgatacttcttgcttctcatgatgcatgtttctgtatgttaatgacttgttgggtagctattaaggtactagagttgataaatgtgtacagggtccttttgcaataaaactggttatgacttgatccaagtgtttaacaattggggctgttaagtctgaccatacatcactgtgatagaatgtgggctttttcaagggtgaagatacaagtcttaaccacagtgtaacttacagtttcctttaaaaaaaaaaaaagtaaacctggcagctatagaatacactatgtgcatttataatagctattttatatattgtagtatcaacatttttaaattaaatgttttacattcacaagtggtggggagtcttgtcattaaggtgtgtgtaatttagagtccagttggttttcttctgactgcacttgttctcatagtagtaaaatgctatgcgcatttataccttgcataagtcctcattctacca

SEQ ID NO: 10963 - DNA, 1187 bp, Homo sapiens
ggtcccccagagcaggcctggcccccagctgtgagggcctcagggaggcccgagggggagtgctgggggtctcagctggcttagctcctaagtttaccaaatgttaatttagtcttggggagaacagcaagggctggaggccagtgctgcagggccagccccactcctgacacctgggcccttgaagctccttgaggggcaaggcccaggagttccagccctcaggttcctgagggtccaccctcagtccttccccccgccgcccctccccggactccccacaagagcctccctggccccagggccgcctaccaggctggtactcattctatgaccaccgcccccaaccagctgcccccagctctccctgccccctcccctctctggcagctagcagggcaattggcggggaggagtgcggactgaggactgaggaccaagggggcccaggccctgccctcctacccggaggggctccgtttgcattccttggtgctctctgagtgcagctggtgtcccgccctgttctgggcggacgcctgtgtgcgtgtgtgtgtgcctgtccagtgtatattgtgtcttagcttccattttaaaaattgttctgtacagagagagatgcagcaggggcgggagggcagagtgggcggaggggagcagccgcacccccagcaccgggtgtctgcggtaggaacaagagggctgagagggtctggtcctggcccaggctcccccttgggctcagcacgaaagggctttcaatgaattaagtgaaaactttttccttttttacaaaaatgcaaaaatcaacaaagctccaaacctattggaaataaaatatgaacttgcagtggtagcttgtttacatgggggtgagggggagtgggtcccaaaagagggcctctgaactatgaggtgggccaggagccttgcctcagccatggaaacggctgctgcccacacccctgagctgtggtaaggcagctggagagggctggaaacttcctgggcccatcaggccccaagacagttcaagtgctctccgacctaggcctagcggttgatgacacagggacccttagccttggacacagaggccccccaggccctaggactctttagggctgtgtggtcagcggtgactggcaatagggcccgtaactgtttctcagaggaacagtgtcttc

SEQ ID NO: 10964 - DNA, 1913 bp, Homo sapiens
actcagctggtcggtcacagtggcacctggggcattggctcaaggattagatgaggtgagacatgcgatgggcctggaaaggaccgtgccagcgcgtggcatgtgctcaggaaacctcacctgctgctctcattggtggaactggacccccagcaccagctgccccgagccatgggggcccggggtctcttagctgagctcagggggaggagaacttgtcaccgacaccaggtgtgtttgctctcacagccgaagccaaggccgcagaagcagccgccagcgcctattacaacccaggcaatcctcacaacgtctacatgcccacggtgagagggcttggcagtgccggtgcagccccacagccgcagatgctgggagccgcagggggatgaccgcaccatgttttaaaccttctaatgcaagtctctcctttctcccttctttagagccagccgccgccacctccctactacccaccggaagataagaagacccagtaggccctcctgcctccctgcctcccaccctcatctctctaccctacccctcccatcggggctgtgctggggcttggggaggggagggggcgccttgttctccctccaggtctgatcataaacaattaccaggaactagcattgtgggacattagggcccccggcctcgggagaggtgccgcccagcttcccatgccagcccggagcccacagtgctgcccagcgtacctccctcaccgtctggggctcttctgggagcacggagcatcccctgttcctgtttcactctcagcttctcccctcgaagggactctctggccacctcctccaccgcagtccagctccctcagtctggcacccactgctacactcagcctcatgagccacttcagaccagccaggtgtcttcccgggccctgccagaccctgctcacattccctctgctggtctgtgctggtctcagaaggccaccgcgcccgcattccactcagccagggtccagctgcagcccccgccacccttccttcccttccctgtcctgggtcatgttgttgccaccctgtgtgacttttgaagctgtaaaatgagcttccagggcttgggtggcgtcggggcagggccgccgaggctgggaggaagcccttctgccttttgctggtgtttctggaatttgctttccctcacctctcacttccttctagaaggagcttcctgactggaaccagagaatgcatgtctgtccacttggtggctgctgggtggggccgggaacaagggcccctgaccctgtgtgctggccgggacctgccaccagccccccagcctgcttcttccccttaagctttgtgcccctggatgcgctaacattcactcttgtttgtccctggactggccatgaagtgaggagatggttatttaaagagaattccctatttatttgacaaaaaatccagttaatatattaatgtgaaataaaccctgtttgcacctcgatttgtttgctgaaaatgtgaaatagtaaaaatgaaataactggaccctttctggctctgcgtgtggtgacccgggggtctcttccggaaggagagccgtctggccgctgagggccctggagacttctgggacggttccctcccatgggaggatccccattctcacggcccagccagcctgtctggtccccaagacagctctggcctctggagctggttcttaacggttgtcgctcagcagctgtgtccctcccccactgagtccccagggcctggctgggacagaggtggatgtggcccagagttggccttgaagggaggagttggggctgccaccttgtcccctgctggctcctcgaggaatggcagccctggcctaagtcctggttgctggagggaggaggccgagtcagccctggagca

SEQ ID NO: 10965 - DNA, 1181 bp, Homo sapiens
aggctagaagagaaggaatggcccacagagcaaggacgtaggaggaagaaggagggcaggaaagtctcccccaagcagggaacactatgtgttccaggagccagactcttccccctgctgctctgaggcccctccctcaggggcacctccagagcacacgtatgcccggcctggatacagacgcaccagcagatgtcatcctattgcttctgctttagcgctggccatcgcttgggaagtgttggaggtgtgcatgtggacctgacggctcccacctggccaaggagcttgaaggagaaggtggccgccaaggctgcgtccgtcagctcttgcaccccagcccaagggggtttggagtgtcaccaactcagttgatgacttcagtgcttgaggctctagagttaccccttgtgattgtttctcccatagaatatttgcttctaagaagtgcggtgtggccaggttgtttcaccgacattccctagcccgtggaatggatttgttttcttctctctgtttcactgagaaaaaaagaggggagcttgataaaaaacaacttttaaaacttttcccttcccttcttacatgtctgtagatttctggttagccacttaaaacacactgaaaataacaactcaggtctcataaagaaggaaatcataattttgtgaatgtagtcattctgatttgatatgcaaaattatggaccctaagacctttagttgttgtttcatgtacttattttgcagagccatgtggtcctaaacacacccagctcacacccaaggcagatgcaggcatgagcaggatgacctccccactggcgctccctagcttctgctggttggtcgcagcctcaccagcctggcctctgcccagctctgctcgctctagtattctctgttgagcctgtgtcccacagccctcctcagtgatctgacttgttagggagcagcagacagaaagggctctagggaaacagcaggaaagcgcgagaacacagacatgcccacacaacgtgattcctttcttgtccactctttatccgcttaattattgtcttttttttaacatatgatttgattttttttgtctccatccttaagatttttattttaaggacagcaacgcagagaaaaacacagccagcccctctctaactgcattaactccgttacagg

SEQ ID NO: 10966 - DNA, 1195 bp, Homo sapiens
gtaaatgatgaagacaaccataaacctttggtgaccccaaaataactcttggctcacatgttaaagagctctgctttatatgatcagctgcaggggaagtttgttctttactgtttgcaaacttcagctctgtacacatgatggggccctcttttatttgcggtccctaaactcctgggataccgcatggcctcaccgaaggaaagggcttgcaggtctggttccctgtcgtctgaggtcagatggaaaagccttttgtgattaactcggccacagtgtgtcctttggtatttggaacttcagcggtttttttttttattattaattctccaggttttgaacactgaccgaaataagcttcatataatggaaaaagaagataaatctggctctttgggccccaaattgcatcccagttttcccgctagctgtgaccttgagcaggttgactcagtatgtcggagtttcagtttcctcacttaattaggagagttgtgccttcctgcctcacctcttagggctattcttggcaaactgtaaagcgagggacagctgtgggtctttttaaacacaccaccttctcctgctttgtttctgacacagtttccttacgccgccccacctccccaagaacccgtgaagactctgagaagcctggtcaatatccgaaaggacacactgaggctcgtcaagtaagttcccagaggctggggccaggtcccaggcaccttcctttggggaggctgggggctgggggacagacttcccaaggaactcatacagcagtttccggcagccccagagcttgcttctctgggcctcagacaggagtgcgggcgctactttctgctgagatcaggccgtccacacccatgttgttcagcactggatgcaatcgtctgtgtttgtgaaaaactttcgcttgcctagaaatgcttagtatccttattttatggatattttttaaaagggaagaagaattattaagggaaaatgggaatttttgcagctactccaacaagccaatgtaaaaatgggaaatttgaacttagaatatcaaatcctttattttattgctatattttctttttcttttctttttttttttgagacggagtctcgctctgtcacccaggctggagtgcagtggcgcaatctcggctcactgcacgctccatctccagggttcacgcca

SEQ ID NO: 10967 - DNA, 2100 bp, Homo sapiens
agtgtgaaaccaaagaagcggagaaagagctaccggagcttcttacctgagaagagtggctaccctgacatcggcttccccctcttcccactttccaagggtttcatcaagagcatccggggtgtcctgacgcagttccgggctgccctgctagaggcaggcatgccggagtgcacagaggacaagtagctgccaggcacagaggaaagagcatcaccgtgggagaggccagccgccgcctgctcactcccccccggaatcacccctcttcccatgcccctctgtccccactgcaaacccactgccctcttctccccaaggtgagtttgatgctgaagtgcaagaagtgtgttgagatgctgccgtttctattttgaagcgagctttcaacaggcgggtcccctgtggcaaagaaaatcggaaccctgttgccgattttccatttgtcaccccagcagaatgtccggcacttgctcccttgctgccccttctcaggtcagaggcgggtgttccagggcctgccgcggggctctctgggccggttccctgcagacccgcaggagagcacatgtgccttgcatgaagtgtgggttgcgccaacaattcccctggtccctttcaacctgtttagttcaactcaagcctccctgtgtcccagaccctcctgctgccaccaccacccaggtcctccctagtcctccagcgtcaacactatcccttgggagttgtagctgctgtcactgactcccggctatacatggcctgtcgaccacgttatagccctcaggcctgttgaacttgctctctaagagaggttgggaccaggctaggttccgggtgacgcccaggagaggtggtggccttcacacatgcacatggagttgaggaccagggagctgcagggaaagcaacagctataggtgccttgctcttctgtcggaggctgctgggggcaagagcagctgcacaaggccagggcaagtgctagggcccctcccccatcacatggtcacactgggacaggcgtgcagctcactgaactccaagcgagccagccctctcttggactagaaggcctactgtcagcccttcgcttacaaactgcaggctcaatccgaaggggacggccggcgggggctctcctagtgcccagagacaggcccagaggtttacaagttttctaagcttttgataatgtgaagctccaggccgagaggatgctgttgagcacattgcagctatgtaatttttggtgtatgtatgtaatatttaaggttggaaaaaaaactcaaaagcaaagatattaactcttattagaaaaaaagacaaaaaaaaagccaaagcatgatgcgtcttgtcagccttaagtgggctccacacctgtgctgtgctgtgaccgcccagccagcagagctgcgggaggatggagccggaccacacaccgtggcatttggaaccgagtcggtatcttgtttgagaaacacccggagtgactggtggggctgtgcttcccagtgcattgtacatgtggagatgtgaatgcctactgcttacgatatctgtataaagtgctgtgtgattaaacttttttttacttgcatttttttttttttttttttttgtgttggctcattagcaagacaaggtgacaccattaaacctccctctgccattcatctgggctccgttgcctttgtgtccctcacacacacccttcctggggaaggaaagaccttgtttgttgccagggaaggcatgtggcagtgggtcctggctttcctggccaggtgggggccactgtgaacagcacccccacccgcccacactgccctctgcctgccagacctgcttgcatgccttttgtacttcttgtcctggagcagtcctctggcctcctcctggccggtggtgtgcccctcaggagccagcttagagcagcctcccagcagctgtagtctccagagacctacaactgaccagttcagctccttccaggttctgggagagccgacgtcatagcacctggcggtggacaggtgccacaactcctggacgctaagccaaaatggttgcccagtttagacttggatggatccttcc

SEQ ID NO: 10968 - DNA, 1250 bp, Homo sapiens
acaatgggtatcctattcagacagataaccacacggttaagagaacagtggagggatacttggcctctgagggaagtttgaaattcttagggagccaggaacatccaaggaggtggctatgaaggctacattgtggagctgtcataatgactgctttgcatttgggagaaagtgaccaatatctgtgctgtctcccgaggtcagaggtttgtttaatgaagaagtgggttgcatccaggttgactccttgttttctgtcctcctgtgtccagtgcgagtctggatccgagggcgatgggacagtgcaccgcaggaagaagaggaggacgtgcagcatggtgggaaacggggacaccacctcccaggacgactgtgtcagcaaagagcgcagctcctccaggtgacccagcaaggctgttgtctgtatggaaggacacgctcgcggcaagggcagggcctggggagggtggcctgtccagtcctgcagacaaggggaggcctgacagagcccaagaatgaggacaccctcggcacgggaacccattcacttagcgtttgctccagtagctttccctctgctaccaatgcagataaacgcggcttgttttactcaggcaagagaatgtgaatagtgccaagaaaatcctttacattatttaataaaaattgaatccattttctatcttggaaatgttttcctttgagaataccagaacattcccttattgctcttctcctcatggtggtcttgggggaaagcagtgactcctgctgtgcatccttgaccacagagtcgtcgtcccagcagcgtagggagagccattggaaaagtcacccggcatcttctgcagaacctgaggcgtggcctcttgctttttctcccagtttgccgttgctgcttgagtgctcagccaaatcagacagcagcagaaaactctgatttgtcaaatctttttttttttttttttttttgagacagggtctcgctcttgcccatgctggagtgcagtggcgtgatcatggctcacagcagcctcaaccttccaaactcaagcaatcctcctgcctcagcctcccaagtagctgggactacagattcaccccaccatgcccagcttattttttttttattatttttttttgagacagagtctcgctctgttgtccaggctggagtgcagtgatgcgatctcggcttattgtaacctctacctcccaggttcaagcaattttcctgcctcagcctcccg

SEQ ID NO: 10969 - DNA, 1285 bp, Homo sapiens
gcagagtagattcataaggaatgtacttttgtcatgtttatagtaatgttcagttacggtacattttatacaaacccagaaagactgactctatgcttatttaaaaatgcaagaatataatgaaaaagtactaagattcccaattatttgcagttccaagtataattgtgaaatgccatctttcataacttattagattggagctggagtgagccttccaggaattttggctgccaaatgtggtgcagaagtaatactgtcagacagctcagaactgcctcactgtctggaagtctgtcggcaaagctgccaaatgaataacctgccacatctgcaggtggtaggactaacatggggtcatatatcttgggatcttctggctctaccaccacaagatattatccttgcatctgatgtgttctttgaaccagaaggtaagcttttttggctcaatagtacatttggccagtgatgctatatgaaaatctattcataaatcctttctcctcagattttgaagacattttggctacaatatattttttgatgcacaagaatcccaaggtccaattgtggtctacttatcaagttaggaggcaagtatggatgacccttactttttatatgtaacttaagccttactctaccctacccatgcgatacataatttaagaatagaatacatctgaagcaaaacagaaaaggcatgactttaaaagaacaactttttttttttaagtgctgactggtcacttgaagctttactctacaaatgggatatgaaatgtgtccacattcctcttgagtcttttgatgcagacaaagaagatatagcagaatctacccttccaggaagacatacagttgaaatgctggtcatttcctttgcaaaggacagtctctgaattatacctacaacctgttctgggacagtatcaatactgatgagcaacctggcacacaaactatgagcagaccacttcagcttgagaatgcagtgggtctgaagatggtcaagtctgtttgccttagattttgatgtcacctagacaacacttaaactcatatgaaacaaaaattaaaatacgtattacaagtacttggattgttccttagtcattaaataggatataaattaggttgagaagggggtatcacaacctcaagaaaagtgccacttaaagcattgcttttaggtgttcaactggcatttccactttaacttaggaaatgataggcactaaacattccacttccatactatgcagtcagccacaatcacaaa

SEQ ID NO: 10970 - DNA, 1825 bp, Homo sapiens
tttggatacagcccttttttttttctttttttttcttccccttacctttcttcaccttggttatttggccaggaatacgtaaattcaaacttgtacatgctgatggtagcctttgtgaaattttcctaattgggccttttaaaaacatggctgggtggaacatttctgtaccctactggtttgaccagagccttagtaagtacgtgcctgaaactgaaaccatgtgcactttaatggaaggtaagctgaacttctttcttttcaaacctagatgtatcggcaagcagtgtaaacggaggacttggggaaaaaggaccacatagtccatcgaagaagagtccttggaacaagcaactggctattgaaaaggttattttgtaacatttgtctaactttttacttgtttaagctttgcctcagttggcaaacttcattttatgtgccattttgttgctgttattcaaatttcttgtaatttagtgaggtgaacgacttcagatttcattattggatttggatatttgaggtaaaatttcattttgttatatagtgctgactttttttgtttgaaattaaacagattggtaacctaatttgtggcctcctgacttttaaggaaaacgtgtgcagccattacacacagcctaaagctgtcaagagattgactcagcattgccttcattccttaaaattaaaaacctacaaaagttggtgtaaatttgtatatgttatttaccttcagatctaaatggtaatctgaacccaaatttgtataaagacttttcaggtgaaaagacttgattttttgaaaggattgtttatcaaacacaattctaatctcttctcttatgtatttttgtgcactaggcgcagttgtgtagcagttgagtaatgctggttagctgttaaggtggcgtgttgcagtgcagagtgcttggctgtttcctgttttctcccgattgctcctgtgtaaagatgccttgtcgtgcagaaacaaatggctgtccagtttattaaaatgcctgacaactgcacttccagtcacccgggccttgcatataaataacggagcatacagtgagcacatctagctgatgataaatacacctttttttccctcttccccctaaaaatggtaaatctgatcatatctacatgtatgaacttaacatggaaaatgttaaggaagcaaatggttgtaactttgtaagtacttataacatggtgtatctttttgcttatgaatattctgtattataaccattgtttctgtagtttaattaaaacattttcttggtgttagcttttctcagaatatgtctcggtctttttttcccccatttatttgaaggacctattcaattttgtgattgtggctgactgcatagtatggaagtggaatgtttagtgcctatcatttcctaagttaaagtggaaatgccagttgaacacctaaaagcaatgctttaagtggcacttttcttgaggttgtgatacccccttctcaacctaatttatatcctatttaatgactaaggaacaatccaagtacttgtaatacgtattttaatttttgtttcatatgagtttaagtgttgtctaggtgacatcaaaatctaaggcaaacagacttgaccatcttcagacccactgcattctcaagctgaagtggtctgctcatagtttgtgtgccaggttgctcatcagtattgatactgtcccagaacaggttgtaggtataattcagagactgtcctttgcaaaggaaatgaccagcatttcaactgtatgtcttcctggaagggtagattctgctatatcttct

SEQ ID NO: 10971 - DNA, 1112 bp, Homo sapiens
gccctgctgtgtccatcactggttctcaaactttagcatgcagtggaatcttcaggagactttgctaaaacagcttgcttgctccaccccagagtatctgattcagtaatttggggtctgggcccggcattggcatttctaaggagtctcaggtgatgctgactgctcgtctggggactgcactttcaggactgcagctgttaatgaaccagctctgcctggaggctagagcccgcctgcctcatgcctaagtgtgcgtcattctgccttgtggtttctcgtgtggctcgaggccagcatcttgtagttgagctctctttatcctatagtgggggggccctcctgggtctggagctcagcccccatcctttcattctcccttgcttccttcactcatgcactcattcgtaaaacatttgtgcagccggtacgtggtggagcgtcagggcacgatggcccttcctgccctcctgacccgcctccttcctctccgcaggctttttgtcctgggcatcggcttcttcactctctgcttcctgatgacgtctctgggaggccagttctcggcccggcgcctgggggactcgccattcaccatccgcacagaaggtaccttggtggggcaaggggagtgtgagatgagtgagggcgtttgtgggtcaaagaggaagtgcctctgagcctagccctgtacctggctttctggccgccctgtaggtggatgtgagtggagggggcctgggcttgggccgtatgaccctccatgcactttggctctggtctggctgtggtcatcaggtttcctctggcctggattctcaggccaggctagggcctttaagccagggtcttccaggcctcagaagaggctgccagtgttgcttctttagttgggtgtcaggggtgagaggtctctggatatgacacttgtctccttgaggcacacatttccttgcctttggcccaggctgtggccatgtgggaacgggcctggccatgggcttaaatgtcttatctctgagctcttgggacacagctccctcccaggccccatcactccttgcccacacgatatttgcaaggcagtggaatggagatcagagcatgggctt

SEQ ID NO: 10972 - DNA, 1229 bp, Homo sapiens
tggccggtgccccgggggggcggggctcagagctgctgctcctctctgctgaccctctgtgttccgcccacccagatcctggtccacatcggcttcctgacggaggagtccggggacgtgttcagccctcgggtcctgaagggcgggcccctaggggagatggtgcagtgggcggacattctgactgcactctatgtcctgggccatggcctgcgggtcacagtctccctgaaggagctgcagaggtgagtgctggggaaagccactggcattaagtggggcagggaggggatgaaggggaaccccacccctccctcccaggggctgtgggagcacctgctctgcctgcaggtcccacggccctgagaccctgggagacatcctggtgttccgcaggacatcaccactcctaatccccctcctcctgcccggtcttgggggatgtggcagggaagtgtatttgcatagcgctgtctggccagggcctggctccttctctggtgtttctgctcaggggctgacacgtgttggcttgtggaattgagccacgtctgcacgtggggtcccctctgcctgccgtcctggaaggcttggtttctcttctgaacctgggctccttcttgggtctactttagggtctggagaccagtaagacatggaggatgaaggggcgtggttgggtgggtggtgcctgtcccttacccagtgctgggcttttcacggtcccttggatgctgtgggaggtggaagggcagtgattagaggctcccctgagtgtttgagggtaggatgggggtgaggctgagagtgtggggatgtcaagggggtaagagtgtgtgattgggtttatttttaatcactgtttctgtgggatgtaggaatacaggagattcttctctttattaatatttattgtaagatatatgatgcatacaaagtctatgtaaagtatgttgtgaaacacaacagtcaaatcacctcccatgtgtgaccatccatttaagatcatgctgtcaccaaggactctgggtttgcctgagagtgtctgccaatctctctgcctcctccccagatgaaaccttaacttgaactttgtgtatattattcctttgctttttttttttttttaatggagtttctctcttgttccccaggctggagtgcagtggcgtgaccttggctcactgcagcctccgcctcccgggttcaagcgattctcctgcctcagc

SEQ ID NO: 10973 - DNA, 1165 bp, Homo sapiens
aggcatttattctagaaattgaggcctgtctgtaaggaagaggactgggaacgaccggagggccgagttcccgttcctcttcctgcagccgtgctggcagccagcggggtgagtgtgtggtctcctccagctctcctgggagcatggccctattcttagcactgagtttgcttgctaggaaagaacgctggggaagaaagtgccagctttggacgccagccccactttgggtctgcagtgttgaggatacgctgctccctcagtttccctttcggaggctcccccccaacaactgcacgccttgtaccgcacccccacccccgcacccatgctttgtggtagcttcggctaaagagcacccagactgtgcctccatctgcctttggactcccttttcctctgagccagggaccctgagggggcctggcagttctcagctgtagccctgaaccctcgagggcacagggtacatgctggggatgctcaagggcatcgccttttcaggagatgggagctgagggcagggccatcccagtgactgcgtaaagcaactctgggctgcttctgttgggtacagggaggtcagtccatcctgggcaggaagaaaatgctgcaggacggtgtaattctttcctcattagtgatcctaacccctgcttcctaaagcagctcattagatgtccagttcaacctctgagtttcttctttctgcccccatctggtctgtcagggaccagacagtggcctgttgtggtaatgggccatggcagggttgggggctgcccatgatacttgggaaacgggcactggtcaggtttggaggatttcagggccctggggagacagaacgtcccaggctgccccagctgtgtgttccccttgagaggcacccagtgaagttgtggatcctgcctgcacttcagcccctggagtcaaagatctctgactactttgcaaggattctttttaattaggtccctcccacacaagagaaagagagagagaatagtgtgttccacaatttgagcactacctggagagattatttctagccacagaccaaaggcacagagagaaataaaaccagggaatttttagcttagaagagaccgtggagatttgcctgagcacgtgtcccacatgtggaggcggacaccagagcgat

SEQ ID NO: 10974 - DNA, 1196 bp, Homo sapiens
ctcagaagcgctgccctcccaaagacagcccatgggcagtgcctgggaccctgccttttgcatcctggccctatagactgggcacatccaggggtgtcaggctcctgagaagaggggctatgactccctacccaggcagatgcaaattgtatagaggacccaggggacaccagagagggaccccctctccaagcagtgcctcccttctgggtggcagtaatggctacaattcctgagtgctaaccaaggaccatgggtcaggagcttccctacaaccctgagacaattgggctgttgtttttcccactggacagatgaggcagcacagagaggtgaagacactcacctgtggtcacacagcagggcagtgtcctagtccaagtgctaacacacactgtgctactctgactccaccactggctggtgacagtgctcgtggctggggcaacttcagcccagggacacacggggaggttgctgaccctggttcctggtcccctgggggggcaggtgccgaatcagggtcatcgacaccttcgggacggaacctgcgtacaaccacgaggagtacgccacgctgcacggctaccggaccaactggggctactggaacctcaaccccaagcagttcatgaccatgtttcgtgagtgccccacagggcaggggtggggtcggaggtcctcctcatggttctcagaggtgacacgagaggcggccagggtctcgctcctccctctctttccttctccagccagtggggttggtgggacccagcaagcatcgccttctcctgctccataagtgtgtgaaccaggaaggaagcctctggtgctatttggggagcaggaagcatggagggggtgtccagggcggggtgacctccccgactccagcagatgtagccttcaccctccaggagggaggttgggcacacagttccagaacacgggggactccgcggccttccagaaagagaggctttccagagtaagctggagaacttccctgggtagaaaggagcaggcaggcagtgggaacagatgcagtaaagagggatgtgggaagaactggaaggttctggaaatgcaggattgggcttggcttccagggctccaggcaaggaacgtgagtggagctgggcttcagctatttgtttgtttgttttttgagacaggatctcgctctattggtcagg

SEQ ID NO: 10975 - DNA, 1182 bp, Homo sapiens
ccgcatggcccaggagcaggtggtcggaggcccctggctttgtgcaaggccggatctgggccaggtggcgaaaggggcccagtcgttcttgggcccaggatggggcctctagacttgcaagggagaggaacagggaccaggctgccccacggtccctgaagggtccaaggaggggccctccccatggccctggagagtgggcctgggtggtacctgctccaggcagggaaactgggggctcgcccttctcctgtgaggggagccaggcacacagggcccattggtgtttgggatgtggacagaggggcagggggctgggagaaggctaagccgaggggtcctgtttgtgcctccccttagtcccttccctcccgatttcccgattcccccaccctccctctacacttgaggaccacagttgggggtgtagggaccacccagaccctggttgaattgtttctctctcctgcttgttccaacccttttcactctgggcttctcccaaaacccatcctggcatgacctgcaactccaggtggtggatttgttccaaagcctcaatccctaccccctccaaggggcaggtttccagtccagcctcagagatcaggctctgggacccctgcctggggggtggccttcatgcactagccacttccgcaggtgctgactcccgcactccctggcattttttgcagacaagggcttgggatggaccctcagccccatggtacgccctgcccagtttccagttgccctgtccacttaccctaggtagccccccaccccatcagtgccgagtccttgtccctacctccagcttcctccagcctcaaaccgcctctggatctagctgtccttctccgagtggcacgcctgccccaggatgccccctttccctcccccccatgcccagagccccgcctgcctcagcgggtcaggccttcagaacactgccacccacccagttttataatcccgctccctctccaggcaaccccacccaccagcctaggcctgctcctccacccttcccgggaggcagccccgggatgctgagagttggtggaggggccaggctggacgcttcctgtgggagtcccctccagacctggctggcccctgcagccacagaaaccacgatggcaaaaaatctcattggttctcaaggactaacctgtg

SEQ ID NO: 10976 - DNA, 1183 bp, Homo sapiens
caacatggagaaaccccgtctttactaaaaatacaaaattagctgggcgtggtggcacatgcctgtaatctcagctactcaagaggctgaggcaggagaattgcttgaacccgggaggcggaggttgcggtgagccgagatcacgccattgcacactccagcctgggctaaaaagagtgaaactccgtctcaaaaaaaaaaaaaaaaaaaaaagaaagggaaagatgaggttaggaagtccttgtgatgtctttgagtaggaggtgaccagcccttggctcagtggtacctgtagacttggaagaatgaggggtggctgggggcccattccccgcagggcagaatcccagggtacctcccatgtcatgttctaggtggaaggtggattttagattttagagagtatctcatggagctcacagttttaaatattcagacttggtaaagtagaataagaactgatgcatatacttttctttgcaggtcagtttctggaagacttgtgtgtgtgatgaatgaatatctggttttgtctctgctgggcctgtgtgcctggaaaggaattgttttggcctaggatcatccaggtttgtttggtttagttcttgaccacatattttttgaatggtgactgcttaagaccctgttgtgtatggctataaatagatacacgccaaggtgaccacatactctgtggttcctgtgcccgccggccatgtgtctgagtgtgtagcctctcatcatctaaaggaactttggctgcagaggggaggcctggtcccatgggaagttttgggagcgcagcagcaggtgggttcaaacgacccagcaagtgcctccttagcacttagaggcggaggccaccacgttgtccacgtggggtttctgatcccagctccccaccagcctgctggacctcgggcaggtccctccctgtttgtacctccattacttcttcagtaagatggggacactgaagatgaccatgcctcccaccagattggtgctttttttgttttaataagggacagagtctcactatgttgcctataggctggtctcaagctcttggcctcagttttcctgcctcagccttcaaatatgctggggtgacaggcatgagccactgcactggcccagattggtacatttgagggttaaatgagcaaatcctataaagcac

SEQ ID NO: 10977 - DNA, 1183 bp, Homo sapiens; identical to SEQ ID NO: 10976

SEQ ID NO: 10978 - DNA, 1460 bp, Homo sapiens
tagggctagtaggtagggttagtaggtagggctagtaggtagggttcgtaggtagggttagtaggtagggctagtaggtagggttcgtaggtagggttcgtaggtagggctagtaggtagggttagtaggtagggctagtaggtagggctagtaggtagggttcgtaggtagggttcgtaggtagggttcgtaggtagggttcgtaggtagggttagtaggtagggttcgtaggtagggctagtaggtagggctagtaggtagggctagtaggtagggttagtaggtagggctagtaggtagggctagtaggtagggctagtaggtagggctagtaggtagggttcgtaggtagggttcgtaggtagggttcgtaggtagggttagtagcgcgtctgtgctgcttccacctggtgcttcctgttcccaaatcacaagggcctgaaggtggtccctgctttctctttctctttctctgtgtctcagatggcgattttgctgacagctgccaagaaaatgcttcactcaacagtcctcatgtgcccagagatgtttatagaactgtttgaattgcagccatcccctgccccctcccaggctgaagatctgttctttttaagttgattcgggagtggcattcttttatacccaaagactgtagtgcatcttgaagagctcaaagcacatgaccgcacaaatgcttacagggtttcctcccgagtaatccaatctcactccccttgtaagggaattctggggcagctatggtttgagtatgcagtttgcatcgtgtttctacctttagtaccttgccactcttttaaaacgctgctgtcatttcccatttcttagtactaatgattctttgattctccctctattatgtcttaattcactttccttcctaaatttgttatttgcatatcaaattctgtaaatgttttgtaaacatattacctcacttggtaatacaatactgatagtctttaaaagatttttttattgttatcaataataaatgtgaactatttaaagaaaagaatgtctttttcttattgtgaaacaacagtttcccttgaagagtttgagattcttaggagaatttagagattgaagaaagaagagagcttctgaagccagagtactgatgctctagaagttcaagaagagctttagcttgtgtgggagtgtttcacaggtgagcggtccggcctcagaagagctttagctcatgtgggagtgtttcacaggtgagtggtcgttcaagaagagctttagctcctgtgggattgtttcacaggtgagcggtccggcctcaggtcacagccgtatgtttgctgatgcagaagcgaacccagtgtttgtcctcgcttctgtaagaagacatgatgtggtttttcttaaacgcagccagatctaacatcactgtgatggggcgatccctgctgtgatgtttccgtt

SEQ ID NO: 10979 - DNA, 2483 bp, Homo sapiens
gcgcccacctcactgacccgcccgccccccacccccacaggacgcacatgcagaacatcaaggacatcaccagcagcatccacttcgaggcgtaccgtgtgaagcgcctcaacgagggcagcagcgccatggccaacggcatggaggagaaggagccagaagccccggagatgtagacgccaccctgcccacccccgggatcctgcccccaagtcatttccgtccccccccaggccctcccaccaccccattttattttatatgattttctccatttgtcatcgttccccaccccttcgacatgctgccaggaaacaagggaaggggcctccctccgagtgagtcagtgatgaggccgcggcctccccgaggttgtggggaggctgcactggagccacaggcaggggtgagagcacccactgaattgacatgaccctctgtccccaggcctggctccccgagggctcagaagagcagcttcggtgtgcagatcatccgtctgtgtggggttctcagtgccggaggccttggggtgggggccaggcctcgcacttgcagaggagcccagtgggctgcacgctcccctccatccccatcggccctgtcccctggagtgtgtcagagcccaggggagaatgcagcccaccaggagcacctggaccccctgcccgccacatggtgtggccatcactcagcccctacccctgccctgctcctaagggtagaaaactccagggtcccctgccaccgactgcccagccactccaagccccctggcagctgcccctcctggagcagaaagtgcctttatctcagccatccgcagactgcttggccagatgcggggacaggctggaatgagggaggcgtcttcatctccctgccatccccctctcacgccacccccgcccccaccgggctgcaggtgctgctgatgcgctgggatctgattgaggataaaaaggaaggagagatgacccctaccccctcatcccccagttttgaaaaggtctaagcaagtgagtctggtggaggagctgagggagggagccatggaaggtgccagaaggaaggttggcgggggcacgtgtgggccgtggcttgggctggtcagagtggcgtgagctgcccggcgcctgccctgcccaagtgaccagggaagtgtgtgtgtgtccatgtgtatgcgtgtccgtctgtctgtctagtgtctgggtttggcccaagactgggctgtagttacattaatgcccagccagccacccctgccactcacccttcctggcccaggccttgctgactctctgagctggggaggtgggaggccaggcgagcctgactctgttgatctacccgtgcctgggcccctcccctcagagcccatggtaacgaacccctagaaaggagagaacgggcgtcaggggtgcacagtccacagctgaagagcaaggtttcgtggcagcacggcccggcccctcaccctctgtccccacgaggggacccatgggggctgtctttgcagggcacagatgaccaaagtcccttcctgcttcctgttacctgtcttgctcctggggagaaagaggggcctgatgagactccactcaggtgcacacatcaccaggtgcatctgcaggcaccgggctggctgcttgcagccaggagaaggtcagcgagaaggagtgtatgagtgtgagtgtgtgtgcatggaagttggggcactgggcgtctgactccctccccacccaagagaggaaggacccctcaccacccccactggtgagacagtttactttgccaacttgccatgtttttgccaaaaccaagattttgaaggaaatgagtggccagcgccagggcccaggccatgtggcctgcccagcctcaatgtcacttggtggcggggtggggtgggggtgggcagcagcatcccagccttgagatgcttcactttccttctctgtaaccagactttgaaaaattgttcgtttcatcaggctctgttcctcaatggccttttgctacgtgcctcccgagaaatttgtctttttgtataaatgacaaagtgttgaaaatgtatttcctgaaataaatgtttcaaatgcagaaacccagaaggctcctgagtgagaatgttttttctgcccctgaagtgcagttctttgggcctcgggacaggttggggtcagctgcaggtgggcaagaagcatgggcaagaaaaggtaggccgggcgcggtggctcacgcctgtaatcccagcactttgggagactgaggcagttggatcacaaggtgaggaatttgagaccagcctggccaatatggtgaaaccccgtttctactaaaaatacgaaaattagctgggcatggtggtgggcgcctgtagtcccagccactcgggaggctgaggcagaagaatcgcttgaaccccgggaggtagaggttgcagtgagccaagatcatgccactgcactccagcctgggcg

SEQ ID NO: 10980 - DNA, 1120 bp, Homo sapiens
agcgtgcagagagaacccatcaaggaggaggcggggggaacgcgtggctctgcatccaggcaaacctggagttgggccccatctgcccctactctccttcctacacctgtgacacctcaggcaagttgcttcatctccctgagcctcccgtgaaatgcagaagatcccagccacccactgttattgaaggatgggatcgacccattagggcatggagctgtctctgtgtcattttggtgtgccaacccctgccttggctttctgggggctgttttgagtgttctctccccttgaactttgtgtccaactctccccacctcaactcagatgaggctgaaggaaggagagattccattcctacaatagcacaaaaagattttctgtgacatttgaaaacaagaagaagcctacaggtttgttaaccaaattttgaacttggtctggctctgagggctactaatgtgggggccacattggttgcttcctgcagtgagctaagggctatgggcaactctgctcatgaagagcttaaggtggcatctcacttgcaggacagcctccaggtctcactggagtcagggaaagtgatggttgtcctatctccttgttgctttaaatggtagctatctctgaagatggctgaatgtccctgtgcccactggggactttgggaacagaaacatgccaagatgctacaaccggccctgggcacaaagccacctctccagctttccatgcccagcattagtcctggcatggagctgaacacctgtgtctgaggcaggcctaggccctgatgcaaaatgtaccacccacctccttctgccaaatgtcaactcgacccagctgcaaggcagagaaaacttggcagtgttcccaaaggggacaggagattgtctcttttgttaaatgaatggatggatggatggaggatggatggatagatagatagatgggtggatgggtgaaagggtgggtggataggtggttggatggatgggtggatgattggatggatgggtggatggatgggtgggtgggtgggtggtgaatgggtgggtgggtagataactggatgggtggatgggtggttgaatcggtggatgactaggtgaaagaa

SEQ ID NO: 10981 - DNA, 1099 bp, Homo sapiens
agtccatttataaattttcagcttatacataactttttaggaatataattacttaaaaatgtaaaggttacttgtcagaaataactatataaccttgtgcagaaagtgtatatctgaaattgaaactgagaaatgtataatcttagccagtgaacttgtttgaataacccgattaaaataatggtacagtttcctattgtacagatcgtgcatttgaaatgttaatttatttaatgaaaagtaaattatgtaattttaaaaaatctccacctgggatatatataacaaggttttacatgtttaaaacatgctgaaaatccatatcgtttgttccatttttggagttttactaaaaatgaattcttttcttagctttagatgttttcagagaatgaagaagctattgcaggaatggagagctgtttgttaagaatgcattcctcctctgtagccttcaaaagactatagagctgtgtgcagagctagacaatctgggcatccagccataaaacatcactgctgtagcacagatagttgttcgcactctcctgagccctctgtggctgcaaaccacaacagaagtaatggtcttgggaaaggaacactcaatgttattttgaactcttaatattctctgtgtctctctgagttccagctatgcattggaactttggttttctaaaatatagtagtgattaaggatgagcaataatatagcttcttaagtatattcctcttgtaagccagtggatttaaatgtttgctctaggaaataaggggtgtctaggaaataagagttgtctgtcccaccatcttcctctttatttgcctctttgttgcaatacttcttttctgttggagaaccactgccctaagacccatatgatcactgggccacacacagtgcacatggcccaaagagtcatctggaatcttccagatattttgtgggatggattggtctaatttggcccagtttccactttctcatgaacctttttggcataacaaatttttaatttttttgcacaaaaatgaagaagagtgtgactggcatctatttgtataaatccaaatggtttactctgaagaccctctc

SEQ ID NO: 10982 - DNA, 1212 bp, Homo sapiens
ccaagaagacaaatggcaataatggcaccaatggcgcactcgtccaaagcccttctaatcagagtgcccttggagcagggggagcgaacagtaatggaagtgcggccagagtgtggggtgtagccacaggctccagctctggcctggctcactgctctgtcagtggtggggatggaaaaatggacactatgattggagatgggagaagtcagaattgctggggtgcttccaactccaatgctggcattaatcttaaccttaatcctaatgccaacccagctgcctggcctgtacttggacatgaaggaaccgtggcgacaggcaacccttccagtatttgcagtccagtcagtgccataggtcaaaatatgggcaaccagaacgggaacccaacaggcactttaggtgcttggggaaacttgctgccacaagagagcacagaaccacaaacgtccacttctcagaatgtgtctttcagcgcacaacctcagaaccttaacactgatggaccaaataacactaaccccatgaactcttcacccaaccctatcaatgcaatgcagacaaatggactgccaaactggggcatggctgttggtatgggggccatcatcccgccccacctgcaaggccttcctggtgctaatggatcatcagtttctcaagtcagtgggggcagtgctgaaggaataagcaattctgtgtggggactgtccccaggtaaccctgccacaggaaatagcaattctgggttcagtcaggggaatggagacactgtgaactcagcattaagtgctaaacaaaatggatccagcagtgctgtgcaaaaggaaggaagtggaggaaatgcttgggattcaggacctcctgctggtcctggaatactcgcctggggaaggggcagtggcaacaatggcgttggtaatatccattcaggagcttggggccaccccagccgaagcacctctaacggtgtgaatggggaatggggaaagcccccaaaccagcattccaacagtgacatcaatgggaaaggatcaacagggtgggagagtcctagtgtcaccagccagaaccctaccgtacagcctggtggtgaacacatgaactcctgggccaaagcggcatcttctggaactacagcaagtgaaggaagtagtgatggttctggcaaccacaatgaaggaagcactgggagggaaggaacgggag

SEQ ID NO: 10983 - DNA, 1291 bp, Homo sapiens
agcggctccgcggcgggagctgagcggaaggcgcgggctgcgatctgctctctgttcccctggatccgcctatgcacattacccttgtttcattactttttcatgtcatttttttatcccaaaaaatattttttaaaagttaaaaaaagacatatcaaacatgcaaatacttgaatccagcaggccaatagtgaaatgtgaacactttctaattctacacttccaggttgacatcagtacacagaaacaggctctaggaaaaatttctaagttcatagcctacgtgtgtgtatgtgtgcgtgttgaaacagaagtgtgtgtgtgtgtgcatgtgtggcgcgtgctcctgcacggcgtgcagttttctgtgtttgtgtgtttgaaagcgtgtgaggatttaactgtgggttttcccttgtattcagtatacgctttttttttggcgcattggtcaaacggttgttattattagcttctaactttgcactgagtgtcctcgcccttcctttagctaatcctatacattacagagaattcctaggacagggctggcgacaattcatgtgtaaatgtttactcaaggactctgtgactgcgtttaaaaagtacagtgtatatctctggagaaataacatgtatacctacctttagcagctttttattgtggactaatgcaagaaaattattaccagagtattgcaccatttttccatttggaatataaagttaaagagaaaaaaaaaaaaaactgttgttgaactgtggccatagatacttgtaaagaatggatggttccgtggaaggaacagaaacaagcacttgggcgtgggttgtgactgcttttgggggagcctggggtttgggctcccacctgtttacagacctttttttctccttcagactttaaaattttaaaaatttaaaaaggaattaaaaaaaaaaaaagacttccgtcgtaaagaaacctattttcagaatgcagatgcgttccttcagagctctgggacgggacagtgttgttccctcggccatcgtcgtggactctgtcgattgctttcgccccttcgtcaaggtgacaggcgttgtggccactgtcttgcacatgccggacgcgctctcaggaaagccagggctcccgagggcagctccacaccatttcatgtatttttaaacccaactcctagcactgaagatgttatttaaaaaaaaaaaaaacaaaacaaaacaaaaaaatgaaaaaaaagaaaaagaggaaaaaaaaacacaaagaagaaaaatacctaatctctaa

SEQ ID NO: 10984 - DNA, 1101 bp, Homo sapiens
atgccgtggcgctacgccctgaagcgcatcgggggccagttcggctccagcgtgctctcctacttcctctttctcaagaccctgctggctttcaatgccctcctgctgctgctgctggtggccttcatcatgggccctcaggtcgccttcccacccgccctgccgggccctgcccccgtctgcacaggcctggagctcctcacaggcgcggtgaggaagccctaggactgggggacggggggtgcctgtcttctgctaccctggtaccgtgttcccttcttgtcccagctcccctggggcccccaacccttgccccgctgtgactccaggtggccacagccagctccccgcctccccctcaatgaccctggatgctcatcgtgctggggttcccatggggctggaggcccaagattgctgtggccaaggcccctccctgtttccctcactgcccctgcctggcctcctcctgctctgcccctgtggctgtcaggcctgagggtcgggtggggcgtggggaaagtccctgactcggctggatctccctgtggcagggttgcttcacccacaccgtcatgtactacggccactacagtaacgccacgctgaaccagccgtgtggcagccccctggatggcagccagtgcacacccagggtgggtggcctgccctacaacatgcccctggcctacctctccactgtgggcgtgagcttctttatcacctgcatcaccctggtgtacaggtaatgcctccacctcatgacccaggctccgagctccactcatccatccattcatctttcgacccattcattgattcttccctcttcctttcttccttctgtccatctacctgtctgctctcatccactcacctatccaactatccacttacccacccatctacccatccatctacctacccacccatccacccattcatccatccacccacccatccacccactcaattcacccacccatttacccattcagccatccacctacctatctacccactcaattcacccccccatccacccactcaattcacccacccatccatctacccacccattcacccaatcagttcacccac

SEQ ID NO: 10985 - DNA, 1118 bp, Homo sapiens
tgcgggagcccgcgggggtgcagaccttgcgctggcagcggtggcagcgccggcggcagacggtggaaaggcgcctgcgggaggcagcgcagcggctggcccggggccttgggctctgggagggggcgctctacgagatcgggggtaggacccgcgcgacccgcacctccccttgccctctctggagccccactgcccagatcggaaaaaggagagtggcatcatcccacctgccttcacccgggtcccccgaccaatcggcccctcccccctcccaccccttccgcccgcaggcaccgcaaacctcgggcccacgcagcacccccaggtgactgtcagcggtacctccggactcgggcgggtgggagcctggcgggcaccccacgccgtccggtgggcccgcccttggactctcagcgcggccccagccccggccccggcctccctgacccaccctgctctcccactgcaggcctcttcggcacaggaattcggtcctacttcaccttcctccgcttcctgctgctactcaacctgctgagcctgctgctcaccgcaagcttcgtgctgctgcccctggtctggctccgcccccctgacccaggccccaccctgaacttgagtgagtgtgaggcccaccaggggaagtgctccggtgcccacctgcgccatgggggggctggcccagggcccagagcgtggcgacaacgctgggcgtggtcctgccgtgcaggccccggggctctctctccctgacctcgccttgtgtggggcacgcctttggcacatcctcagccccctgcccaggcctccccagggttgggggttatagagcagtagccgcagagcctcacctatgccttggggatccctctctattgacccccttcctcctcaacagccctccagtgccctggtagccgccagtccccgcctggcgttttgaggttccacaatcaactttggcatgttttgactggcagggtgagtgaggtctgtcccggctatggtccagagtctgggagacccagggaactggcttcaggggacacaagtctaagaggacctctgctcctccagggacatttcggctcctcaggggatggtcttacctagac

SEQ ID NO: 10986 - DNA, 1195 bp, Homo sapiens
ccgggcgtggtggtgggcgcctgtagtcccagctactcgggaggctgaggcaggagaatggcgtgaacccaggaggcggagcttgcagtgagccgagattgcaccactgcactccagcctgggcgacagaatgagactccgtctcaaaaaaaaaaaaaaaagaaaaaaatctttacagtggattacataacaattccagtgaaatgaaattacttcaaacagttccttgagaatgttggagggatttgacatgtaattcctttggacatataccatgtaacacttttccaactaattgctaaggaagtccagataaaatagatacattagccacacagatgtggggggagatgtccacagggagagagaaggtgctaagaggtgccatatgggaatgtggcttgggcaaagcactgatgccatcaacttcagacttgacgtcttactcctgaggcagagcagggtgtgcctgtggagggcgtggggaggtggcccgtggggagtggactgccgctttaatcccttcagctgcctttccgctgttgttttgatttttctagagaggaacataaaaagcattcgtccggttgcgctttcctttctgtcaagaagcagtttgaagaattaacccttggtgaatttttgaaactggacagagaaagagccaagaacaaaattgtatgtattgggaataagaactgctcaaaccctgttcaatgtctttagcactaaactacctagtccctcaaagggactctgtgttttcctcaggaagcattttttttttttttctgagatagagtttcactcttgttgcccaggctggagtgcaatggtgcaatcttggctcactgcaacctctgcctctcgggttcaagtgattctcctgcctcagcctcccaagtaactgggattacagggaagtgccaccacacccagctaatttttgtatttttagtagagatggggtttcaccacattgcccaggctggtcttgaactcctgacctcgtgattcgcccaccttggcctcccaaagtgctgggattacaggcgtgaaccaccacgcctggcttttttttttttgttctgagacacagtttcactctgttacccaggctggagtggggtggcctgatctcggatcactgcaacctccgcctcctgggctcaagtgatttgcctgcttcagcctc

SEQ ID NO: 10987 - DNA, 3076 bp, Homo sapiens
gcccttgcagtgcgcgcctgggaaggggctgcccggggccaccctgccggcaggggcgggagccgtgcgggctccgtgaggcgcctggatcggagcgcgggcccaggagagggcccccggggcagtgggtgccccagtcgctcggcgaaggcaggggagccggggcgggccgggcgcgctggagggttccgggcactcaacgcgctcgcgccttcctctccgcagccccccgggatgcggtagcggccgctgtgcggaggccgcgaagcagctgcagccgccgccgcgcagatccacgctggctccgtgcgccatggtcacccacagcaagtttcccgccgccgggatgagccgccccctggacaccagcctgcgcctcaagaccttcagctccaagagcgagtaccagctggtggtgaacgcagtgcgcaagctgcaggagagcggcttctactggagcgcagtgaccggcggcgaggcgaacctgctgctcagtgccgagcccgccggcacctttctgatccgcgacagctcggaccagcgccacttcttcacgctcagcgtcaagacccagtctgggaccaagaacctgcgcatccagtgtgaggggggcagcttctctctgcagagcgatccccggagcacgcagcccgtgccccgcttcgactgcgtgctcaagctggtgcaccactacatgccgccccctggagccccctccttcccctcgccacctactgaaccctcctccgaggtgcccgagcagccgtctgcccagccactccctgggagtccccccagaagagcctattacatctactccgggggcgagaagatccccctggtgttgagccggcccctctcctccaacgtggccactcttcagcatctctgtcggaagaccgtcaacggccacctggactcctatgagaaagtcacccagctgccggggcccattcgggagttcctggaccagtacgatgccccgctttaaggggtaaagggcgcaaagggcatgggtcgggagaggggacgcaggcccctctcctccgtggcacatggcacaagcacaagaagccaaccaggagagagtcctgtagctctggggggaaagagggcggacaggcccctccctctgccctctccctgcagaatgtggcaggcggacctggaatgtgttggagggaagggggagtaccacctgagtctccagcttctccggaggagccagctgtcctggtgggacgatagcaaccacaagtggattctccttcaattcctcagcttcccctctgcctccaaacaggggacacttcgggaatgctgaactaatgagaactgccagggaatcttcaaactttccaacggaacttgtttgctctttgatttggtttaaacctgagctggttgtggagcctgggaaaggtggaagagagagaggtcctgagggccccagggctgcgggctggcgaaggaaatggtcacaccccccgcccaccccaggcgaggatcctggtgacatgctcctctccctggctccggggagaagggcttggggtgacctgaagggaaccatcctggtaccccacatcctctcctccgggacagtcaccgaaaacacaggttccaaagtctacctggtgcctgagagcccagggcccttcctccgttttaagggggaagcaacatttggaggggatggatgggctggtcagctggtctccttttcctactcatactataccttcctgtacctgggtggatggagcgggaggatggaggagacgggacatctttcacctcaggctcctggtagagaagacaggggattctactctgtgcctcctgactatgtctggctaagagattcgccttaaatgctccctgtcccatggagagggacccagcataggaaagccacatactcagcctggatgggtggagaggctgagggactcactggagggcaccaagccagcccacagccagggaagtggggagggggggcggaaacccatgcctcccagctgagcactgggaatgtcagcccagtaagtattggccagtcaggcgcctcgtggtcagagcagagccaccaggtcccactgccccgagccctgcacagccctccctcctgcctgggtgggggaggctggaggtcattggagaggctggactgctgccaccccgggtgctcccgctctgccatagcactgatcagtgacaatttacaggaatgtagcagcgatggaattacctggaacagttttttgtttttgtttttgtttttgtttttgtgggggggggcaactaaacaaacacaaagtattctgtgtcaggtattgggctggacagggcagttgtgtgttggggtggtttttttctctatttttttgtttgtttcttgttttttaataatgtttacaatctgcctcaatcactctgtcttttataaagattccacctccagtcctctctcctcccccctactcaggcccttgaggctattaggagatgcttgaagaactcaacaaaatcccaatccaagtcaaactttgcacatatttatatttatattcagaaaagaaacatttcagtaatttataataaagagcactattttttaatgaaaaacatgacttgagccttttctgcacccctgcccccccgccccccgccccgtgccttgctttctctttcacccacacccacactctgcatcggagaggaggaagagagccgcagagggtggaatcgaatacgtctcagccttacgtcagcacgcctgcctcgtgtgtcactgacaagctaaggcagccacctagacttaccgagaggggtaattcctgcaagtctgattcagatctgaccagaatatgcaaagcaagttcgaaggaagcgcttcaaagggcttgcagggagcaagctgagctgtggtcaaagcttttagaggctccaggctattagaggcgctctggttccttggcagggagtcgttccgagaaagcccagacatggggtcctagtggtgacctatgacctcagtctagccaggttcactggaagtggggggaggggt

SEQ ID NO: 10988 - DNA, 1309 bp, Homo sapiens
gaagagctctcagctctgcccactggaaccaggcaggttctggcgtgagtgttctggggcatttgcattcctgtgattcctgcggctgtggctcccccatggcctttagagagctgctgctggatttgcagcagtgtctgaacttggggaggaggagctgaagttggaacttgttgggagaagagctctctgcgtcttgtggacctagaatggaagcatttcagtgggccgtctggtggaagccctgtccttgtgtcaggggagccctgggcctcagaccccgaccgtgatggtgtgatgctctgcctgccgccatgcactgttcctactgttgtattttgaatttcatctgtaaagagcttgtggagctctgtatctctcttgctgagtgcctacctagcatcctcagctttgccttttggcccagaaagcctaaaatatttaccatctgacccttaaagaaaatgtgtgtggatccctggtctaatgtaacgggccaggcatggatatgagagaaaacaggccatgcttaggccaggatgagagccagcacgctccgagcaggagcggggagactcgagcccagctgtgcttgggagaatgagtccacagagaggctcagggtgtgcgcagggccccccggtgctcctccctccggcagccctgtccagcatgtggcagtgtgactcctttctcccctggagggtgttggcatcaacaggctagactcctgcatgggatggtccttctctttgttctgtagcccagccctgaaaggcactgagtgtctgttcctgcccccagctcagaccatgcaagccagcaaggatgacctgggacagccctccttccctgtttcacttccctgatcagccttgccaaagccttgttgttttatcaatcgtttatcagacaatcaactttggacagttgatattctccatttttgtatcattttcattctagtaatttctattcatatatatatatatatatatatatatatatacacacacacacacacatatgtatgtatatatttttgagatggagtttttgctctcgtcacccaggctggagtgtggtggcacgatctcagctcactgcaacctctgcctccgaggttcaagtgattctccagcctcagctgcccgagtagctggggttacaggcacacaacaccacacctggctaatgtttgtactcttggtagagacagggtttcaccatgttggtcaggctggtctcaaactcctggcctcaggtgatctgcccgctcctgcctccgtaagtgctgtgctgggattat

SEQ ID NO: 10989 - DNA, 1776 bp, Homo sapiens
ggctatcaggagagtgggggatggtggccacatgtcccccaggtggtctcccggtgcatagctggtggctctgggcaagccatcccttgcttctcggggctgacgccaccgttgtgtccgagcccgccctcccctgcttcctcagcgggaccccttcatctgttggccttacctgtcctcagaaaggaagaggtgaccccacccagccacctctcccttttatggaactcgagagggtggccctactgtgcaccccttccttgtgagtagctctcaactgtcctggagagcagaggctatttggggtcggaggagccctcgatacctgcgaatacatctgctttccaggctgctgtttattctgagacgactgtgctgtagcttcccttgcagctgcaataacccgcaggtcttcactgaggtggaggctttggggtagaattctccatttattttactacttaatacaaaacatttatttttgaccagtcctgtggcttccattagcaatatgtttcctttcccaaatatgcaaatagtggctttgtttgctcaattttgtgagtgctttggaatttaaatgattgtataactcaagaagattacttttctatgttgctcaagctgtgcctgccaacttgtaacttaataaatacaggaaatcctcagagaaggtgatattttcaggaaaaagacaaatgccctcatagtagtgggaagtgtgaaggtgaccgtgaacatccttcctcatcgggtctgtccccgtcatttcctcccggagtcgtcgcaggtggagatggacaacgtggtgttggacttagacctccttcagtgtggctctgctgggccagaggcatcctgctgtcccgggtggctgcctcgctgtctgcaccccctctccctggggcagctttgcttcctgcccctgtgctcggggcctgggtggttactggcgtgtagatggaattgcttttttaatatgggaagatacatttatttttttccatgtgggtgggtgtctctttttggattttcttctgtttttacgtttctcttcttagaagggtgggagagaatcaagctcctgtggccacctgtgtcccagcagcagtgagtggagctgctcagggtgccctctcctgcggaccagtctctgaatgttcaaagatgagggcctggcttccgtgctctggctttgtaacttatctggaagggaaagcacatgccttcacgggcagggtatgttccttttcttctcggggtgttgacttgcattcctgtgtgaactgttccctctgccatgtttaccgtgtgatgttctgtagttgaaaatgttagttgtctgctggcacagaatttatctcgttcctttctctcccttctctcctccaaatcagtctcttcccttctccactagataactgtaaaaccttttcctggggtacatacattcgttaactcttgggcagtggtgagcacgagatgactttctgcagcgtttatcactgttgggtggagtcacgtcccttccctccaccgaagtcatcaaccagatagggaagggaaagatgaggcccagaaaacgagttcaaactctaggtcttgtacacgtatgtaagtaaatgtcaataacccaagcctttgtcatagcagtcacttggttgacttaggatctgggtctgttgaattttgtgcttgggaatggagctggagggagtggggcctgtgtacagcagctacctctcccaggtcctctcacttgcctgccccgcgtcc

SEQ ID NO: 10990 - DNA, 1224 bp, Homo sapiens
cttcttagaaaccaggagcacccacaccctggacctctccagggagctctcggaggcccttggccagatctttgacagccagcggggctgcgacctgtccatcagcgtgaatgtgcagggcgaggacgccctgggcttctgtggccacacggtcatcctgactgccaacctggaggcccaggccctgtggaaggagccgggcagcaatgtcaccatgagtgtggatgctgagtgtgtgcccatggtcagggaccttctcaggtgagccgtctcgtcctcaggctctggggccgccaggggctttgtcctcctcccctcttcaaaagcacagccccccacacacacacctgcacatactcatgcatgcacatgtacacacgcagtcacacatgcactcacgcagttgcacacacacgcatgctcactcccacactgtgtgcactcaggtggctgtgttggacagttgggcccagggctcccctgctgtcctgtggggccggcatctgctctccttctttctccccaggtacttctactcccgaaggattgacatcaccctgtcgtcagtcaagtgcttccacaagctggcctctgcctatggggccaggcagctgcagggctactgcgcaagcctctttgccatcctcctcccccaggacccctcgttccagatgcccctggacctgtatgcctatgcagtggccacaggggacgccctgctggagaagctctgcctacagttcctggcctggaacttcgaggccttgacgcaggccgaggcctggcccagtgtccccacagacctgctccaactgctgctgcccaggagcgacctggcggtgcccagcgagctggccctactgaaggccgtggacacctggagctggggggagcgtgcctcccatgaggaggtggagggcttggtggagaagatccgcttccccatgatgctccctgaggagctctttgagctgcagttcaacctgtccctgtactggagccacgaggccctgttccagaagaagactctgcaggccctggaattccacactgtgcccttccagttgctggcccggtacaaaggcctgaacctcaccgaggatacctacaagccccggatttacacctcgcccacctggagtgcctttgtgacagacagttcctggagtgcacggaagtcacaactggtctatcagtccagacgggggcctttggtcaaatatt

SEQ ID NO: 10991 - DNA, 1166 bp, Homo sapiens
gcagcactttggcctccccctagtcaggatggagtaggccttaggtgcctgaggttcaggaggaagtgactgagtctgtgcctggggccccagacgctgtctcctcttccttgcagcctcaaggcagcctccccgccgatgcctccccacatccaatgggggtttgttccctttccttgggttcctctggatcagccccgaggaggctccgatgagcccaaatccctgatgcagctcacaggcagctctcggtggaacgggaggaggcttcaagggagcgggtgctgcaggttccctgcatgggataaccgagaacacagaaccttccagaatcctggagagcagggaggggcgggttgctgtgagctggtgggccctggtggtcgcagccccttgcctgctactgcgcacggcctgatggtgtggggctgggcacaccaggccgcatgcgtgtctgacccgcggtcacccggttcccaggctacctcatccatgagtctgcctgctggagtgacacgctgcagcgctggttcttcctgccgcgccgcgccagccaggagcgctacagcgagaaggacgacgagcgcaagggcgccaacctgctgctgagcgcctcccctgacttcggcgacatcgctgtgagccacgtcggggcggtggtccccactcacggcttctcgtccttcaagttcatccccaacaccgacgaccagatcattgtggccctcaaatccgaggaggacagcggcagagtcgcctcctacatcatggccttcacgctggacgggcgcttcctgttgccggagaccaagatcggaagcgtgaaatacgaaggcatcgagttcatttaactcaaaacggaaacactgagcaaggccatcaggactcagcttttataaaaacaagaggagtgcacttttgttttgttttgttctttttggaactgtgcctgggttggaggtctggacagggagcccagtcccgggccccatagtggtgcgggcactggacccccgggccccacggaggccgcggtctgaactgctttccatgctgccatctggtggtgatttcggtcacttcaggcattgactcaaggcctgcctaactggctgggtcgtttcttccatccgacctcgtttcttttctttcctatgttcttttgt

SEQ ID NO: 10992 - DNA, 1537 bp, Homo sapiens
tagacctcctcgtttgcttctcacggccgccgggtagtcgggaggaggagagcttcacctgtcggcttggagagatccaggtgatgcttcccagaggggctcgggctgggctggctgtttgtccagctggagtgggggtggaggccgccccaggccgcccccttcttgggttcagcggggaactggggtggaggagtcagggaggggaaatgtgtgcgtgggggcaccctctccccgcccccgggcgtccagccgtgctgagccttctctcctgccaggtggtggacgctgccagcctgctggcccctctgccccaggtgcaggccgtcaccatctctcacatccgctggcagccatccgcctctgagcgggaggggccccctgctctgctccagctcagctgcaccctgcactggtccttcctcctctcacaagtccgttgcttccgaatccactgctggggagggatgagtgatgactctccgggcagggagctgccgaggccagagatgcccatgttcctggggttggcttttgccacccagtaccggatagtggacctgctggtggaagccgccgggcccggccaggatcgtcgcatggaatttctggtggagcctgtccccaaggaagggttccgggtacctcaggccgagtggggcagggcagttctgctttattcagcccctgcatgagcggatgctaaggccgggtggtctcctggcctcgggctgaggcctcttcccggctgtctgcccctggcctgcgctggacctgctaagtgcccacagtggcagcgaggtcccggtcccggggctggggtgggagaccccgggctgagtgctgtggctttctggtggggggcgatggaaacaggaaaccaagcagtgggatcgcagcgttggtcactgcgaggcgagtggcgggctttctgtttctgccttgtccctccccacggtacctggttcccaggtgaaaatgaaaggaggggagaagttgagaacagaacattccataaaggatatttcctaataggctgcaagatgctgatgccgagaatgatgattttctttcctgcagatgaaactattagaaagggtcttagattgtggcaggtaggctttggagcaggcgccgagacatttctgagcatgaggacgagctacagcagctcctggggtggggctgcctgcgggatggcgggagaggatgccctggagaaccgtcctcccagtgtggaaggcccttttccctgaggagtgggcattctgggccagccggcgctggcttcgtgcctccacgtgggccagccccagctgctccgtgtttcctggcgttggcaatttactgtgctgctgagtgtgaggtcatctccggagcgttttcagcagcccctggctctgcggcgtctcttccgggctgtgggcatgcagggaagtggctctgaggcagtctgcgctgtggccctgcctctgcccagcgagaggccgtgggctctggacaagccgcccttcaggctggggtagcaggtcagtcc

SEQ ID NO: 10993 - DNA, 1276 bp, Homo sapiens
gtgttccagaaaatacaaagagagagaagagagatcgtgaacagtcccctcctgagaggatggacagaaatcatgaatgccccagggttaggaggaaaatgctggaagaaaggaaggttcaggaccaggaactgcagcccaggcagacttgagaagcccaggagggctccctagccctggaaagccctccctgagctcacagcaggccacctgcttctcggtattctggcagacagtctgccactgccggggttctgggagcaaaacatcctctggtttccctccctcccctctcccacccaggtcatcccccacattccctttttaaagtattcagaattccctctctcagcccattactttctgagccaataagagtagatctattccaacctggagaccaggagagagcagcccagtgggcggacggactctgtgtgtcagggcaatgctgaggcctctggtgtggatctggttacagctccatcggatccggatgatctgatgcacctcttgttgttgttgttgtcgttgttgttgttaagaagtgatggctaaaaggacacacaaggagagggtgggaagagaggagagaaggagtcgtggggagaacacagacgtgtgggaatggctgaggaaggagctgagggcagtgaagggctgggagggacaggctcatattgagggaattgggactggccaggcccagctgcccgccgcacacagagacgaggacgcaggagggggtgaaaggctgggtggatttcttctgtcttggcttcccagatatggcctaaggaggggacttgtcactacatcaggtaggggggaccaggggtccaggtgcatcccccatcagttttgtggatttttcccctccccagcaaagctgtaccctccatgcaaagttctcgtttgcttttattattgagttcacgtcagggttcctggcagcccagcagagctctcctggcgtctcaactccccagagacgtgacctgagacacctcatgtcccaacccaccaaggccctccctgaacagctctcctctggcgctgcaaggagccaggtggtgtggggtccctggcttctgctcggccaccgctgtccctccggcggcacctctgcccctcttggctctgtgctgaggccactcctgtcttgtgactctgtctgtggggctggtttcttctttttcttgtatttgctcttagactaggtgggacacctgagtgacagctggtggcccccctgcctgctgcctgatcaagaggc

SEQ ID NO: 10994 - DNA, 1189 bp, Homo sapiens
cggacctggccctgctctgtggtctcttgcatccctcctgcaggccagccatggcacagccaaaggcacggagggagagacagcaagtgcctttccaagccttggtggacaccacacctgcagctctccccttggccacagcaagtcacgtggctgggctcagcattaaggggtgggggacaggcctgccactttattgtccgctctgcacagtcgggtggcagtaggctgagaatttggagggctaaacaactgggactctggagagtctgtgtcctaataatgcctgctttggagcactccttccccacccgcctgctccaggggaatagcgtccctggtcctagcatttcactagatacctcgtgcctttgaaccgctgtgtttgggagggaggaagaggatagacaggtccagggctcccctcacttgggaaggtcctagtagaaggcattccttctgagtctcctggccctacagcttctcacccctgctgctccccaagacctgacccggaccaatcagctgcatctctgcaccaagtgccacccccaccgtgcactgctcgcacctcacgctccccatgggctggcccggaccccagtgaggtctgcacctctcggaccagccaggacctcggaagccatgagctgggtgttcagggcttggcggaggagacgctgctccgcgggggatggagaagccccgcccctccacaactcccttaatctggatgcaattagaggaaaccagccaaaaaccccgcggcagctgttgccccgggattattcccagccagcgagaggcattagggcgataattcagtcattagacttctagccttcccaccgccagaacgtgcaaataggggataatcagccctgcacggccatcctcagcaatgctgcttatttaacccattttttaaaatgacacttaatgttattggctggcgtacgtgtgtgcgcatacttaaaagttgatgcgtggtgcagctctgctgctaatgtctgctgacagcgtcgcccgatgttgctcagggcctctgggaagaggggacacctttgatgtgggcgtgctggcacccaagaggcaacgtggtcaggctcgatgcttgccagccctggaaggtcccgccagggttggggggtcgggtgagcactcagagatctggggaggaagcgaggag

SEQ ID NO: 10995 - DNA, 1249 bp, Homo sapiens
aatgagaggcccgggcttagaagaagccggcgtgtccagaagctgggggggttcccagacccagagccacattccagcctttcatctaagggcagccggggctgggctgacagcactgacggatgtttactgagtttccctggagggttctcccagagttccacccacacgcaacgaaggaggtctgttcccaggaggttctcttagcacatggcctgccagggctcagaactggattccagggcactcagcgttgggacccaggtctcccggactgcagggaccatgttgccgggcagggggtggtggggagaaggccactctggcaggtctccagagaggagctccagggccccccaggaaggagcagttttgccatcttcggcaaagggggtggtggtttttgttcggtgtagttctgtcccctcccgctagcagccaactccactgggactcactgtttcctgcttctgaggttggcgacagtggcctctgattatacttggaaataaaacccccgtgtttacatattcatcgggcttccctctcccccttccaatggcccttcagcgacgaggcctgcaccagcggccagctggtcgttgccagccgagagagccagtacaaggttttccacttccaccacggcggcctggacaagctgtctgacgtgttccagcagtggaaatactgcaccgagatgcagctcaaagaccaggtagcccagcagacggccccagaatgcccagcggttgacactccccaccccccacgggccccatctccctcctgggtcctgtgtctggggtccccgggccccgggggcttacggggtgtgacccacggtagtttttggccgtcagagcagcaactttgggtttgaaacctttgcccagggctttcggtaaagtcagtgccctgcacttgaaaaatcatgttttgacaagacttcctgccatattttgctcaatctacgtacaaatgtaataagagctctttaattatctgtttaaggtactgtatgtgcttattagaaatggggccgattttaaaattcccttccttcccgcagagcctcctgctggcttcccttattacagtagcatggctttttttccccctacattgaacaacctttgatttttgaattaaatgtcagctgcagttttgccctggattcgtgactgctcgcggaggcaatctgacaggctggctccctgctcgcagaacagcgatccctttgtatgtg

SEQ ID NO: 10996 - DNA, 1274 bp, Homo sapiens
cagtgcctctcagcctcttccctgagatccaggggcgcaacaccttcacgccgtcccttttcaggcgtaggtctcgcctcctcttcggcatttcctggaatctgagtttgtggggggccagcaggtgtctttcttctggtttgcatagccctatatggagtctcttttcctacccagaacctttcagagatcgtggccctgcagacacgccttaagcacctgcaggctgtgaaggaggggcgctacgtgttcctgttccgctccaagcagtccctagtgctggagcgccagcgcctggacaagcgactggctctcatcgccaccatcctggaccgcgtgcgggacgagtacccccagttccaggaggccctgcacaaggtcagccagatgatcgccaacaagctcgagtcaccagggccctcctagggagcagcctggactccgccttgcaaggcctccaggaagagatccggaattgtgtttgtcatgagggacttggaatcttttgtgttcctaaaaaccacatgtaccctcagaagggcatcgtttaagagaaataagccagccccacccataggaatctttttagccactcagcaatttaataaaccaggtaaaatcctagcgtttcccatggcatcccatcgcaaagacagagcctgtgactgcagacccacacacccacactcccacactgggcttactcgtccaggtaacactttggtttgcagcactcccaaatctgcacgtgcctctcacaacacaacgctgccacaggtccacaagctggtgggctgagcagaggtgggaaagttaaggcagctccagccagcctggcccgggaggctggtccccccagcacttccctctactaggtgcatctgaaaacccacaaaccaccttctttaccagttttcccatccccaccccttagaactctcaggtcccttttcctgcccccatgtccccatttgagttaaattcagatccacagcttgcaggagaaagtcagtggccccagacacacgtaacagggtgagcactgaaataagagcacgctggggcgtccacaccaagggactacgccccagtctgcccacctatcttttctccatcattaacccagcgctctttctccctggacttccaagtaccaatgaccttggggcttctttgcagtttaaagggaaaatgctctacaaaataatttcactttcaaacatttcagcagaagaataaaatcttttttctgaatatctagtaagcctttctga

SEQ ID NO: 10997 - DNA, 1182 bp, Homo sapiens
gtgattggcccatctgtggggtgcagagccctccaagtgaagaatctgtcccccaaccccagagctgcttcccttccagatgtggtcctgcagccgagccctgcccttagctggaggtcgacaggtgggatcctggatgtctacatcttcctgggcccagagcccaagagcgtggtgcagcagtacctggacgttgtgggtagggcctgctccctggccgcggcccccgccccaaggctccctcctccctccctcatgaagtcggcgttggcctgcaggatacccgttcatgccgccatactggggcctgggcttccacctgtgccgctggggctactcctccaccgctatcacccgccaggtggtggagaacatgaccagggcccacttccccctggtgagttggggtggtggcaggggaggcaaggggctggccgggacgcgtctcctcaggccccagcagacggtcccgtgttgtggctgcaggacgtccagtggaacgacctggactacatggactcccggagggacttcacgttcaacaaggatggcttccgggacttcccggccatggtgcaggagctgcaccagggcggccggcgctacatgatgatcgtggtgtgtgcccccacactgtgggtctttgggaagggggccgcccggtgcccagtggctccttctctgtgcagcgtcatcctcgtgcctgtgtggtcgccgaggatgttttctgagggtctttgtgatatcgagggaatatcaagaagtttgcaggcttggccccagctgtccagggaggtcgggtttgagggtccccagaaatggccgggtgctactcagggttctgtcagatgtaggttacttgaactgccttaaagcaaaaggccaggggcatgataaactgatgtcacctggtcctggaaagtggagggcccggtgggcctgggcatgggtatcgctggaactgtggaggctccgtgtgccttctggccgtgcctctccttctggccggctctgaatccctggaaaggacggcgtgagtgagggcagcttccagccctcatgctggcaccacagagcggagacttcttcccatcagctcccatagaaaagtcccaaagcaggactcttgagtcacccagcacaaagaggcccttccctgagccagtcccacagccagaagga

SEQ ID NO: 10998 - DNA, 1221 bp, Homo sapiens
ggcagcctggtgctgtaccagcctagcattcccgggccctggaggcctccacctccaccagggtggggatgatgacatcacgtgtccttccctttccagggccctggcctcacaaccacagagtcccgccagcagcccatggccctggctgtggccctgaccaagggtggggaggcccgaggggagctgttctgggacgatggagagagcctggaagtgctggagcgaggggcctacacacaggtcatcttcctggccaggaatgtgagtcctggggctgctcaggctggtgggcaggggccggctcggggttgagaaggggtgaggggacctgggcttgggggtcccacgatggctacctgccactaggacactctagcaggtggcctggggtcctagagtgagcagtggggccgtgcactctgccctttcgtgtacacagagggaggtcacctccctgatgccatcatgagtccctgttctcatgggtgttcctgccccagctgtctgctgacacctccacattctctgccttttcatctctctctgctcggcccagaacacgatcgtgaatgagctggtacgtgtgaccagtgagggagctggcctgcagctgcagaaggtgactgtcctgggcgtggccacggcgccccagcaggtcctctccaacggtgtccctgtctccaacttcacctacagccccgacaccaaggcaagagggcccagagtggcacagggatcgcgtcccccagccgtggtgcagggggcagaaggtgctgggcgtcctggtgaccgatgccaggaacagaggatgctgggacctcccaagggggtctttggggaggagtgggaagggtcaggccacacaggctgtgcctttcctcctcctgtgtctacacgtgggtgatggggccacaatgacgacctctgagccgtgttgaagcagcaccgcgtttctggcgtgcgttaaggtgacccgcactgagagccggggtccccctgcgcctgccggggaggaaccgggtgcgaagcatcccagggccagacggagctgccccctgagcgccgggcctcgctgctgctgggatctcggggccagatggagccgccttctgagcgctggggtctcactgctgctgggatctcgggctgctccatttgtgctctctcttttccaggtcctggacatctgtgtctcgctgttgatgggagagcagtttc

SEQ ID NO: 10999 - DNA, 1160 bp, Homo sapiens
accgcgcccagctatatttttgtattttttgtagagacggggtttcaccgtgttagccaggatggtctcgatctcctgacctcgtgatccacccgcctcagcctcccaaagtgctgggatgacaggcgtgagccaccgcgcccggcctatatgtaactgttaaatggatctttaaagggaaaagtcagaaacaaggaaaaatgacctatgtctcataacttacctgtttttgcaagccaggtgctttttctgcagagtgggaaaagagactcttttaaattttagcctttggtctactggtggggggcagggaggacatgctttgcgtgggccaggagaagcttaaaattgggggaaacagtaaaacagcaggaaagtaaaaatgatgaaagaattttcatcccatagagcactggagcgctgcatccgaaagctctgaaaccacccccctttgatttttgcaggaggaacccctctcccagatcactgcctactgcaatagttgctgggacaccaaaggcttagaggacagtgtggccaagaccttcgagaaatgcatcattgaagccgtgagctcagcctgccaggtgaacaatctctcctcctgggaaacggattcgggctcacagctgtgttctgccatgacccagctaagggctatgaagcacccgctgggtctcagctcctccgctaactcagagattgggaagtgggcaccctcctccctcgccaagggcaatggcgctgaaatctagttctctccggattcctcagtgtgctgcacagtccctgctgctcgcaccatcctgcatgtgttccatatggaatcacggccgtgcgcgtgtggcacaagtcacacgggcttgcaggccgttcctcagatggccctgtcatcactgtggctgctggtttgattgattgttaacacttgctcagtaggtgtgcgggaagagactccaaaggttgacagaacatttatggaagcaaaatatgtgaaatggaaaattgtatcaatttatttagctcttttcggcaaaggggaagagattgtgcccccctgtctcccaggaacagtctcgcaggcaatgccacatgaggaagctccctgctggccacggctgccctgctcacatttcctaattggacacttaacccctgta

SEQ ID NO: 11000 - DNA, 1151 bp, Homo sapiens
gtaagtcaagtgcccccatgtgccagccggggcaccaggcactggaggaaacgtggaacagcgagtacaaagcagcactgagtgacagatcatgttgtcagggtggcacctggtccagctggggcgctgggtgggcgactgcgtcctgagccctggggaagcgtggggagaaggctctgcagcgaggcagaggcgggaggccgaccacaggagggagaagggcaagatcctcgctccaaccgtggcccgtgttctctccttttgtccccatagtgtgactccgccaggaacttggaatggctgaagactgtgaatgagagtcatgggtctgtggaacgctcatccctgaccctggccacggccatcaaccaaagaggcatctatgtgatccaggcgcccaaaggtggccaaaaggtgagcggtccccagccctcggcgcagctgcggcccttctgcaggctgctgccagtccaggtcttctggccccaagaaagtgacttctaacctatgctcttcacagatttccccagacacggttctgcacttgatccttcctgagagccctggcagccacgaggagtcacgagagtactctttagaggaggtgaaggagcttttgaacaagttgatgctgatgtctggcaagaaggatcgtaacaacacggaagtggagaggttttcagaggtgagggcgcatctttgcagtggcgctaagctggtggtgtcatctcgtccgtgagggctgtgtactcccaagaaaacggaaaggatttgacttgggatttgactgataagaagggctctgctcttaggcccatggagagtagagttggcacatttgtagggtgcatggaactctagtccgcggccccagagaggtcttaaggcaggcaggcccctgggttagcagtccctccttacgatccgtaggatgaacgctgaagctggcagcctgtccaccgcactgagaaggaggttggtcacccagcaaatagcccttagaaagacacttgaattgcctctctcactctgtaaatcagcaagaatccaaataactaagatttagatggacaaaacagaagtaatcatattgagaatggtgtaccggtctaagtaatagtctctcaattttattataggttctttctcta

SEQ ID NO: 11001 - DNA, 1197 bp, Homo sapiens
caggtcttctgcagtgtgcagaggctcagccaggccttcatcgacctgcactctgctgggaatatgctgttcaggacgtggatcgccatggcctactgctcccccaagcagggtgtgtccctccaaatggactttggcttggacctggtgacggagcttaaagaaggtggagatgtcactgagctgctggcagccctctgcaggcagatggagcacttccttgacagctggaagagatttgtgacccagaagcgaatggagcacttttacctgaacttctacacggcagagcagctggtttacctgagcactgagctcaggaagcagcccccgagtgatgccgccctaacgatgctatccttcatcaaaagcaactgcaccctgagggatgtcttaagggcctctgtggggtgtgggagtgaggccgccaggtaccgcatgaggagagtcatggaagagctcccgctgatgctcttatcagagttcagcctggtggacaagctgaggatcatcatggagcagtccatgaggtgccttcctgccttcctgcccgactgcctcgacctagagacccttggccactgtctggctcacctggcagggatgggtgggtctcccgtggagcgttgtctcccgagaggtctgcaggtcggccagcccaacctcgtcgtctgtggccactccgaggtgttgccagccgccctggctgtctacatgcaaaccccaagccagcccctgcccacttacgatgaggtgctgctctgcaccccggcaaccacctttgaggaggtggcactgttgctgcgccgctgcctgaccctgggctccctggggcacaaggtctacagcctgctgttcgcagatcagctgagctacgaggtggcacgccaagcggaggagcttttccacaatctgtgcacgcagcagcaccgagaagactaccagctcgtcatggtctgtgatggggactgggagcactgctacctcccctctgccttcagccagcacaaggtcttcgtcaccccccaggcacccctcgaggccatccaagcctacctggcaggtcactaccgggtcccgaagcagaccctgtcggcggcagccgtgttcaatgaccggctgtgtgttgggatcgtggcctcggagcgagcaggtgttggtaaggagagcggcagggtgggcaggccccgtctccca

SEQ ID NO: 11002 - DNA, 1220 bp, Homo sapiens
atacgttttcttcaatgacgaccacacaaccatgacattcatcggcttccatctgcagcccaacatcaacggcagtgtcgatgccatcagtcacttgactgggaaggtcatcaagagagacgtcatgaccagggacctgtaccagggcctgctgctccagagggtgcccttcaatgtcgactttgataaactgcccagacacaagaaacttgagaggctctgcctgaccttagggatcccccaggccaccgaccccgacaaaacgtatgagctcacaaccgacaatatgcttaaaatccttgccatcgagatgcggttccggtgtgggatcccggttatcatcatgggagaaactggctgtgggaaaaccaggcttattaaattccttagcgacctgcggcgtggtggtaccaatgctgacaccataaagctggtcaaggtgcacggaggaacaactgcagacatgatctactccagagtcagggaggctgaaaatgtggccttcgccaataaggaccaacatcagttggacaccatcttgttttttgatgaagccaacacaacggaagctataagctgtatcaaagaagtcctgtgtgatcatatggtggatggccagcctctggctgaggactctggcctgcatattatagctgcctgcaatccataccggaagcactctgaggagatgatctgccgtttggagtcagctggtttgggctacagggttagtatggaggagacggccgacaggctgggctccattcctctgaggcagctggtataccgggtccatgctctgcccccgagcctgattcctctggtgtgggactttggacaactgagtgacgttgctgaaaagctctacatccagcagattgtccagagactggttgagtccatcagcctagatgaaaacgggactcgcgtgatcacagaagtcctctgcgcctctcagggtttcatgaggaaaacagaagatgagtgcagctttgtcagcctcagggacgtggagcgctgtgtgaaagttttcaggtggttccacgagcacagcgcgatgctcttagcgcagctgaatgcctttctctccaagtccagcgtcagcaaaaatcacaccgagagagatcccgtcctctggtcgttgatgctggccatcggggtgtgttaccatgcctctttagaaaagaaagactcatatcggaaagccatcgccaggttct

SEQ ID NO: 11003 - DNA, 1148 bp, Homo sapiens
gaagacggatgcattgaagacgatcccgccccccacaaaaaggtcggcttcgtgggcatctccaactgggcccttgaccctgccaagatgaaccggggcatttttgtgtcacgtggcagccccaacgagacagagctcatagagagcgccaagggcatctgctcctcagacatcctcgtccaggaccgagtccaagggtactttgcgtcctttgccaaagcctacgaaacggtgtgtaagcgccaggacaaggaattcttcgggcttcgtgactactacagcctcatcaaaatggtctttgctgcagcaaaggcttcaaatagaaagccttccccgcaagacattgcacaggctgtccttaggaacttcagtggcaaggatgacatccaagctttggacatctttctggccaatttgcccgaggccaagtgctcagaggaagtcagccccatgcagctgatcaaacagaacatctttgggccttctcagaaggtgccgggtggagagcaggaagatgctgagtcccgctacttactcgtgctgaccaaaaactacgtggcactgcagatcctgcagcagacattcttcgagggggaccagcagccggagattatttttggttctggtttccccaaggaccaagagtacacccagctctgcagaaacatcaatcgtgtgaagatctgcatggaaacaggcaagatggtgttgcttctcaacctgcagaacctctacgagagcctctacgacgcactcaaccagtactacgtccacctcggcggccagaagtacgtggacctcggtctggggacccaccgcgtcaaatgtcgggttcaccccaacttccgcctgattgtcattgaagagaaagacgtcgtgtacaaacactttcccatccccctcattaaccggctggagaagcactatctggatatcaacacggtgctggagaaatggcagaagagcatcgtggaggagctctgtgcgtgggtggagaagttcatcaatgtcaaagcacatcatttccagaagaggcacaaatacagcccctctgacgtcttcatcggctaccactcggacgcctgcgcgtctgtggtgctgcaggtcatagagaggcagggtccccgggccttgacggaggaacttca

SEQ ID NO: 11004 - DNA, 1167 bp, Homo sapiens
tttccgggctcagatccgctttgtaccttgaactgatttccccaaatggctcctaaaacgacggaagagcaaatgaagcattaaagcctgcagggagaagggagcgcagtccctctgtccagcagagaggaagagaccagacttactttgtgcagccgcagcagctgttcagacttatgagcagacaggaactgccagagggcaatggtgtgttttaactggcatctgtttaaggcctgcagaaggaatagaattcctgagtgggggctgaggtctcacacccccactcatgtcgtgcaccagggagcctgagtgctctccacacaggcattcttctcttcgttctgccctgtactaatgtgatctccctccttgtgaaggccatctctgtcctatctaccagttccctcctgcggcacctcacagcccgctcacatcacgctgtttgcaggggcctcatgtactcagtcacatttgggctctatctagactgctggcatttctagcgcgtgtctgtctctactgtccctggtgtgtcctgtttatgctggactgactgggtgagcagttgttcttgtctccccatccttttcaggagcgcctagagtggcactccctgaatgctcctatccctcgcgggaagcaggagaccagggtgaggggctgtgctgatttccttttcggtgtgagacccacctttaacacgtgaatcgtctgatcacccatttgcaggatgtcttgagtatacacattcagctgcatgtttggatccccaccagctgtgctcagaaaccccagagtgacttctacgacagacagcacttcacaggcatcgctgtaggactgcagctgtccactgatggcactaatgaccgagctggggagggagtcctgggaaatgaaaagcaggagagggatgtctgtgggctgggtttctggcatctcaccacctggtaagagagccgagccccttcactgcccaagccacatgcggggggccaactctctaacagctgacacttgggcgcacggtgtgcaggcagttcctggaggccatggagacacacaggtctacctatcagtacccgcatgcggagagcaggaacaaatcggttccatggacttcccgcttcagcaggcatggccatgcatcaacatcattcctaa

SEQ ID NO: 11005 - DNA, 1519 bp, Homo sapiens
tccctcctgccccttgctagggtctgagccaagcccctcgactccctcactgtgttgacacttggcactttgctggccccgagaaaggtcgatgacacagccgcaaatctaatccacgtagttcccatttactccttaatctgattgatgttccctcttgcactgaataatacatgcctctctcaggtaagccattttataaaacaagaagataaaaagcactgttgaggcagtgtttgcttttgccgagctggtgtccgacagctccctgggtgtccggggtgggagagctgttgacagaagctctccgggccctcaggggcttagatcccacttgagtcgtaagccttcttgcttttgataacacagtattatttctcttactgtagaagaaaaagtttattaccaaacaagagtatttttatgaaagaaaaggacaaacctataaattaactcaacctatatctcccttgaaaatactttcaggctccaccaaaacgtagaactgaaagcatgtattttggaagaaagagatacattttgtatgctttcttttccttttgtagattcccagtttattttctaagactgcaaagatcactttgtcaccagccctgggacctgagaccaagggggtgtcttgtgggcagtgagggggtgaggagaggctggcatgaggttcagtcattccagtgagctccaaagaggggccacctgttctcaaaagcatgttggggaccaggaggtaaaactggccatttatggtgaacctgtgtcttggagctgacttactaagtggaatgagccgaggatttgaatatcagttctaaccttgatagaagaaccttgggttacatgtggttcacattaagaggatagaatcctttggaatcttatggcaaccaaatgtggcttgacgaagtcgtggtttcatctcttaaacacagtgtgtaaatttattcaactaacgatgggaaatgtattacttctgtacacagtggactgaagtgcaatttgttgaaagggaacaagtcattgaagagaaaaaaaaagcccaatacttagagtcccaattttgtctcatttgccaaaaaaaaaaaaaaaaaaaaagcaaaccccctatggttgatattgttataatgtatatactgtataatatgaaagagaatcgatgtatctcactttttcattatttgctaaccaaagctgtacatttttcatatgatctgcagccttttgggtatcaaatgggtcaaaaccatgggacctgccacctcccatcagcaattctggaaatgcactatttctactggtattcttgctttttttttttttttcattttcttgctgaaatgacatgaattgttgagtttatttttacacagtaaagagtggagaaagactgtggtctcctcaggatgtctcttcttttccgaggcttgccaatgccacctccccctgcagccacccctcttccccagccaggtgcaggtgaccctcacctgcagggggtgtgtgc

SEQ ID NO: 11006 - DNA, 2468 bp, Homo sapiens
cctgcttgtgcggcgatgatctgttttgtgcgtctcttctctcccttttccccaggaatgaaccgaggccgtcgcccctgcacacgcacacgcacacagcctggttttgtcctcatgcacacgaagcagcccctgctcccatctgtccctgaggaagccccacttctctgtaggagcccggactctctcaggcatgccccattcacagctgaagtgggtgctgcaacgtcttgaacaaggcagaagttggtgagaggatctgtgtgtgcgtgtctacatgtgtgtgtctacgtgtgtgcgtgcgtggctgggggaggccttttctttgaggacgtacctcatttccttctttcttctggctttggaaaaatctcatgatgaaaattcatatttgccaactttgttagctgcgtgcgtgctttggggttggtgcaacctcagtacacgcatttgtctttgtttgcaaacctttctcagagcgacatatctttatattgatgtaataaatgtcttttagtggtttgtcaaaggccgggggcgggggctctctacagagaatttttattttgtaatagaagtgaactgtctctgaagggtgaaggcaggccgtcctgggatggtaccctgtgctctcccgtggaggagaggggatggctgaggacactggcccttaccccagggccagacagcatccatccctgctgtttgcatctgagagcagcatggggcctgggaggtcggcctgtgtgcccagctcagctagctctgccccaggacggccctgccctcgaccttcccacctcctcagatcctgcaaggctggggtctgcccctcccttctcacctctggagctgtgctgcactgcttcagcccagagggccctgagagaggagcgtgccacccacagcccgggaagccgggccccagcacccctctcctttggcctccggcagtgcagaccagaggggaccttttaaggaaagaagccgtgtttcgatgaagacctggccacatggggccactgggacttcaacccagcccatcggtgggaaggtcctttttgggggactttgacagccatatccctcccagcacaccaggcgccaggtgagctggttcagacccctccaggggtactccagagacctcacgtgtggagccaggcctggccagggcaggggcctgaaacccactcctccatctcatggggctcacggcctacagcagcccacaagctgccactggccggcgacactgacacctgagcagtgtccagaacctttttgcctttttttgttccccgtgaaaagcaacatggacatttccttctagtccttccaaggaggggagagaagtgtatgtgcatttgtgtgtgtgtgtgtgtgttgtgtgtgtgtgtgcgctaagtgagaaagagagcaggctcgggaggccctgcccagggtaggaggagcttcctgctttgcaccatctggtggtcgcacgccctgagggcaccccgactctgtctccaggagtctcatcagcaaaccgctgacaagtctttctagaaattctactgcactgcctggctcagctgcagctgcagacatttctgcaggaggagcaggtgtttctgtcttctgttccttctagggccacctgtccccttaaacacaggtccacgttgtgtcaagaacctagtgcatctgtgtgtgtctgtcagtgtctctgtgtcagtgttctcgtgggtgtctgcacggtacccggccgccgttctgcaatgcatcactcccgcagaggggggtgcagatcaggcgccgtgctgcgcgttgttgttcaacagtggctttttcttagataatcgtgcttcctcagcgcccgtcgggttgtggcatccttggatctgcagggatcttctccgtttgcatgttcctcggggtggcgtgttccttgctccctgggtccgacatgtgttcccgcacctgcatggactgccccggttctgtgttgtgtgccgagtgccgcccagtgttctgtgaccacccgtgtagctactgaaaatggctgggtaagcaagtcaagggtgttggaggaggtcaagagagagctcagtttccctctccccctccccaaacacaccaagaagcatttttaacgtgtaggttgagaacaagcctaaaggattcccacagctgggagccagcaagagagcttggagtcgcctctctagaccagatctagccccaccctcactccagccatctcggagcccttgtgtaggcaacgcccggtgcgggctgtgtggggtgctcccctgccagcacctccggccagccccgcccctgccgatctactggaccgcagaccaccttctgcccccgtgggccaggtgggagctgtccgttcaggaccatgagccatcctctgccctgactagcgaggggcagagcacaccccagtgcttacgcctccacccctgcagcct

SEQ ID NO: 11007 - DNA, 1109 bp, Homo sapiens
tggaaagcgctctccctctcgtggcccttttcctcctgcgtccctggcaggtgccatcgcccccgcccccgcttctccagcacttagagcccccgagggagccagatgacccctcctggactcatcccatagctcattagaagttctgagacgcagccagtgaggagtccttgccaaaatgtgctttgctttcctttttaggaaacagagagaggttggaagtttaattggcactgacagccagtccttcccagaggcgtttgcaggcctccgctcggggtggggctggcctctgcctcactggctgggtcccaggcgcctcagggcctcagggctgtccctccagggccaagggataagggcgtgactcattgtcctgccagcccctgcctctccctgggactcctgggctccccaggcctttgatgcttccctggatagagagaaaggcccctgcagccagggagggtgatccccacagccaggcaggcagcaagaggggtcctggcgctgcaggacagcagggagggtggctcggtgccccggtcttcaccgggctgcctgtgtttggctctaggacatccctacgggcgcagacagctgtgtgacgagtctgtcctgtgattcccaccgctcactcatcgtggctggcctcggtgacggctccatccgcgtctacgacagaaggatggcactcagcgaatggtaccttgaccctgtcctctccctccccgagtgctggcagggtaccttccaggtggtagggccgtgtcactgccatttggttgggtccaggtttctcagtgagatgcaaagcttccccaggagcctgcagtggcgtatttaggccagtcctgggctccccaaagccgccaggcccgtcccactgaggcccatcccacaaaggtctgccccacagaggtccaccccacagcctatggaggagcacaggggacaggccatgtgggatgagccagtggactggaggcagaggctgtcggggtgaggcagggccgcagccaggcacctgccacctctgagctcacctgaacagaatactgccactgcctgccacctcctgggtcatgcagcaagtgtctggggaggga

SEQ ID NO: 11008 - DNA, 1862 bp, Homo sapiens
cacggctctctggccttggttgcagcctccccacgtggcttcaggccgttgtttttagattaggattctgcccacctgccgccttgtgttgtgaggctccaggcatgtagctctgctgacacgtgtgacattggatcccagagctgccccgtggggcagtcctgaaaaaaccacgcagggcccggggcagcgccacgcccctcacggagtgcaccatgcatgggccctgcagaggactggtgggaccggcccggcatttccgggcctgaggtgggcgtgggggttcctgagaccccggcaggagctgcctaaggatgcgggttggcctgcgcccccccgccccccgcagtgtctgcccgcacctgaacccctgctcaccccttctctctccttgcagcctcacctggccgtgggaagcaacgactactacatctccgtgtactcggtggagaagcgtgtcagatagcggcgtgacccgggcccaccaggccacggccgcctgctgtacatagtgaagctgtcactcgccggggcacggggcgtcggctgctgcggccccgcagtgtgaacgttggctgctgccttagctgctgatgacggcaggagggccctgctactcgcttttgtctgtcttcgctgtcgtgtctggaatgtcagggaaggggagggctcgggttgacggtggcttcccactgagcaccagcatccaggtgcacccccgcggccacggcgcctctgtccctctcctgttctgtgtttctctgagacgctgaaaggggaaacacctcactttatttccatgtaatcagagcattagctgcagaaaaaccccccgacagagccctggcggagaggcaggcgctggggctcctacgggtccctggggcagctgtccccatcaggccaagagcgagcgagaggcgctgccccagccaggcccaccacctctcacagtcagtgcacgcaagcagggacatttcctagccagctgggggacactggaaattcgggaaaccaagagagaggaagaaggagacgcccctccaactggcgggtgtgaaggaagccgcccaggggtccgggctgtccttggccgctggcagcatcactgagcaggaagcgcacagcccaccctccccgcacctccaggtctctggactccagttttggcccctctcacacagagctgtcagcaggggccgctgtggcggtgcacaggggaggcaggtccttggcgaggtagcccctgccttaatccacggggctcctttccctccgaagggctgctcttccccacaggcgcggggacagcagcccgacctgtggtctccatgcctgtgccctcacacaggtgtagcacacgcatgtgcagatggcaccacggccggcacctgggggcacacacatgcaggcggcgtggtctccctgctctgtccccacacgttcctcacatacaggcaagaggcactgccgggtcccggacggctccgggtgacaccagccccgtctccagccttgagccgcccatgctgatgcgacctcggctgacagctgggcctgtggtgcagacaggagctgtgtggacagtcccgcccaggaggggccgcagggcgtgtatgagcagttttgcaaacagaacacaaccacaatgatggtattttgaaaagtgttctttccgtgttcgtcgggaatcaggattattgagaggtgaaggagccaggtggcttcattctggcggtgagaggcccacgaccacgggagtgagagctggtgtggcgaggcccggctctcctgcggtgtggctggtggcctgccgtggccaagagcatcttctgggtggatggaaccctgcctggtcacat

SEQ ID NO: 11009 - DNA, 1163 bp, Homo sapiens
gggctagttggagagccagggactcacctggcgggaggtctggctgtgctacttttccaagtgtttggtgagtactggtggtgtgtgccggtcaagcacaagtggccctttgaccttttgccactcaaaagaaatcaagtcacctgcccagaatgttctacctgttgcttgtttttactggcggctgtgagagctgactcagggtgagagggggcatcgggcgccagggcagtgcagtcgtggcctctgaaaagactcatcaaacggcccctgtggcctcaggacaggcccatgcctgggacacacatgtcctggcctcatttaaacagggacaggagctgggtgtggtggcatgcacctgtagtcccagctacttggacggatcgcttgagcccagcctgggcaacacagccagaccttgtctttaaaaataaataaaaataaacagaggggtgaggccatggccctgagagcccaggaggcctctgtcgggggtctaccattggcctcgcgacaggggtcaacacccatcaccctcgtccacaggtgatgtccattgaagaggtggagaggatcctggacgagacgcaggaggccgtggagtaccagcgggtaggtggcaccctgaccggcctgcccccaactgtgagaacccacaaggccaccctcgagggccaaactgtcccacatcctagagcggccgccttctctcaaggggacgagacccagccacaggccatctccttcctccctgaggggccacctcctcgctgctctcaccaccgcctgtccttttgcagcaaatagacgagctcctggcaggaagcttcactcaggaggatgaagacgccatcctggaggagctgagcgcaatcactcaggtaacggcccccccgggactgagcacagtcactcaggcagcgggacccccagagctcagacccccaggaggccctgcccatggtgatctcgtatgtggtgtcctttaagtaaatagtctgcggtttgtgactggttttcctacctgaggtgactctgttttcagggttgctcacccaacggtctggtgcaggcaggctggccccgtgccctggacagagcgggggtgctgggccttcctggcgcctcggcccctttctgtccccggctgtcacggatgtggt

SEQ ID NO: 11010 - DNA, 1213 bp, Homo sapiens
ccgtggcaccattcagcacaggctctccaacctgcccactgggaagctgactttagaaccgtccatccacgtttgttctgttcctttacccatctttggggctcttctcctctctgagtcccgctgggaggggctgtgctttcctggcccactgtcccgtgtccctggccctgtctgtcagccccattggcttcctgtttgtcacttgcctcccccagagctgggcgtgcccttccctagtgcgaagtccccggaactggcccttgccacccctgtggcctcgtccctctctggaggtctctgcctgtgggtctttggcgtgtcataaacatctctgtttcctccacagaaaacgtccctgtcaaggccaggcccaggcaggcggagctggtggcagcttcgtaacgtggcctcgtcttgtgggactcacggggatgccccagggactgtggcccacagagagtttgggtcacggccagcccctgaccgggttccctggagcccagtgcgcacggtgctgagcagagctgcagccacgcaggcgcattgcaggaggactccagagcgtctcctggagaccttgagcctgaacgcactcaggcgccactggcctgctctcagtccggattaactctcgaccgagcccagcttctgccggttgtgggctcccccggtggccgaggcccaggcccaacgcctctggtgctgttcccctgcagtcccagccccgcgtggctcgcgctcgtctgtgaggaagacacctccagaccttggggtccccgcgcttcctcttgctcctcgctgctcccattagctggtgcaggcttccgttaaggggtccctcccttggcctggcttcccggcgcacctcagcttccctgctggtggggggatccccaggagaccagcatgtgctgaacctctctgtgcctctgcctccgcaccctagacacccacctccagtttgaaggtggcgggccaggggctttcttgctgaattgacgactccgagagccctgactcccgccttgccactcacggctctgtccactagggctcagccctgctgagaaaggacctccgatgcttgggagacgctgctccggcaggtgcagccccggaagtttgtccatgggggtccccgcggctggggctcatggaactgcgagacccgggaccctcctgccctgcgggtccccgagccaccagcagc

SEQ ID NO: 11011 - DNA, 1232 bp, Homo sapiens
gagacctgggcagctcctgcccctcaaggctggcgtcaccggagcccctgccaggcagcagcgaggatggtgaccgagaaggtggggaccacgtcctggtggctgttggcagcagattcaggtgcctctgccccacgcggtgtcctggagaagcccgtgggatgagaggccctggatggtagatcggccatgctccgccccagaggcagaattcgtctgggcttttaggcttgctgctagcccctgggggcgcctggagccacagtgggtgtctgtacacacatacacactcaaaaggggccagtgcccctgggcacggcggcccccaccctctgccctgcctgcctggcctcggaggacccgcatgccccatccggcagctcctccggtgtgctcacaggacacttaaaccaggacgaggcatggccccgagacactggcaggtttgtgagcctcttcccaccccctgtgcccccacccttgcctggttcctggtggctcagggcaaggagtggccctgggcgcccgtgtcggtcctgtttccgctgcccttatctcaaagtccgtggctgtttccccttcactgactcagctagacccgtaagcccacccttcccacagggaacaggctgctcccacctgggtcccgctgtggccacggtgggcagcccaaaagatcaggggtggaggggcttccaggctgtactcctgccccgtgggccccgttctagaggtgcccttggcaggaccgtgcaggcagctcccctctgtggggcagtatctggtcctgtgccccagctgccaaaggagagtgggggccatgccccgcagtcagtgttggggggctcctacctacagggagagggatggtggggaaggggtggagctgggggcagggcagcacagggaatatttttgtaactaactaactgctgtggttggagcgaatggaagttgggtgattttaagttattgttgccaaagagatgtaaagtttattgttgcttcgcagggggatttgttttgtgttttgtttgaggcttagaacgctggtgcaatgttttcttgttccttgttttttaagagaaatgaagctaagacaaaagaaacctttgtgtgttgtcttctgaggtctgccgatgataaagtcctggacaggaggggctgtgccaggaacccgatgccagcccttcctggggccaggaggaagctgcccctctcctctcctcccc

SEQ ID NO: 11012 - DNA, 1832 bp, Homo sapiens
agaacagcaggtgcagcaaaagcgcttgctggaccagcaggagaagctgctggcggtgatcgaggagcagcacaaggagatccaccagcagaggcaggaggacgaggaggataaacccaggcagggtaggccgggctggcggatggagtggggtggggccaggcagggggtctcctgctgtcctcatgcggctgggtctgaggctcggtggcctctagacctgagcgtgagtctggttttggttcccaatgctgttgttgctggttcttctgagcccctccactggcagcctgtgtacagtgctgtggctaaattgatgaccgacttcatttgcagtggaggtgcatcaagagcccggggcagcggtgcccagaggccaggaggcccctgaaggcaaggccagggagacggtggagaatctgcctcccctgcctttggaccctgtcctcagagctcctgggggccgccctgctccatcccaggaccttaaccagcgctccctggagcactctgaggggcctgtgggcagagaccctgctggccctcctgacggcggccctgacacagagcctcgggcagcccaggccaagctgagagatggccagaaggatgccgcccccagggcagctggcactgtgaaggagctccccaagggcccggagcaggtgcccgtgccagaccccgccagggaagccgggggcccagaggagcgcctcgcagaggaattccctgggcaaagtcaggacgttactggcggttcccaagacaggaaaaaacctgggaaggaggtggcagccactggcaccagcattctgaaggaagccaactggctcgtggcagggccaggagcagagacgggggaccctcgcatgaagcccaagcaagtgagccgagacctgggccttgcagcggacctgcccggtggggcggaaggagcagctgcacagccccaggctgtgttacgccagccggaactgcgggtcatctctgatggcgagcagggtggacagcagggccaccggctggaccatggcggtcacctggagatgagaaaggcccgcgggggggaccatgtgcctgtgtcccacgagcagccgagaggcggggaggacgctgctgtccaggagcccaggcagaggccagagccagagctggggctcaaacgagctgtcccggggggccagaggccggacaatgccaagcccaaccgggacctgaaactgcaggctggctccgacctccggaggcgacggcgggaccttggccctcatgcagagggtcagctggccccgagggatggggtcatcattggccttaaccccctgcctgatgtccaggtgaacgacctccgtggcgccctggatgcccagctccgccaggctgcggggggagctctgcaggtggtccacagccggcagcttagacaggcgcctgggcctccagaggagtcctagcacctgctggccatgagggccacgccagccactgccctcctcggccagcagcaggtctgtctcagccgcatcccagccaaactctggaggtcacactcgcctctccccagggtttcatgtctgaggccctcaccaagtgtgagtgacagtataaaagattcactgtggcatcgtttccagaatgttcttgctgtcgttctgttgcagctcttagtctgaggtcctctgacctctagactctgagctcactccagcctgtgaggagaaacggcctccgctgcgagctggctggtgcactcccaggctcaggctggggagctgctgcgtctgtggtcaggcctcctgctcctgccagggagcacgcgtggtcttcgggtt

SEQ ID NO: 11013 - DNA, 1136 bp, Homo sapiens
ggctgagaaaagctgagtgtcgtttggtgtgcatgccaagtgacatagcgagcgccacagaacctgcccgcgccctgtgaactggggcgcgtttgaaatcacatctgttggccaggcacagtggctcacgcctgtaatcccagcactttgggaggctgaggcaggcggatcacagaggtcaggagatcgagaccatcctggctaacacggtgcaaccccgtctctactaaaaatacaaacaattagccgggcgtggctactcggctactcccagctactcgggaggctgaggcaggagaatggcgtgaacctgggaggcggagcttgcagtgagccgagatctcaccattgcactccagcctgggcgacagagtgagactctgtttcaaaaaaaaaaaaaagaaaaaagaaatcacatctgtcattcagcccagccttggggtagtccctggcggcagcccaggtgtgtgccagcttgccctgatggcatttcccgtaccccccgtccctgtgcagcatgatcgggctgatgctgggcacctgcatcgccttctacgtcgtgatcggcgacttggggtccaacttctttgcccggctgttcgggtttcaggtaaggatgtgttcagggttctgggttgttcagatgctgacggctgctctgaggccctctgtgggatcctcccgaggaccgagacctgggtgctggtcgggagaagcttctgtcgagcctgctgtcattctaggggcttggtggagtgcgggggctttgctgggtcacgtctgtgagaggtacacgcgaggaagcaagccaggcagagtctgacaccatgtagatgaggggcgggtgggggagcctcagacccgggcacagtgcagagcaagtctctgccagcccgggctgcccattggagggcagaggcggccaggccctcaggcatccccggcctccatggtcacccagagcttctgggggctgtggactcagcacttcttgcagggaccttggggtagcctcctccgtgcttgccccccaccacagagaggcccacctgacgggcccacacacctttccctcgctgccggggagcagagcccctcactgggcagggcaggcatcacggcacgttagggtgcta

SEQ ID NO: 11014 - DNA, 2117 bp, Homo sapiens
tcccggcatttcctccctgaagcctccaggtttctcatttggtttctgcctgcgttcttttcttttctccacacatcacactggcatgcagcatgttgtggcgtgtgagcatggggtggccgtgggtctctgtccctgactaagccgccccttgtcccttctcagattatgtttgagaccttcaacaccccggccatgtacgtggccatccaggccgtgctgtccctctacgcctctgggcgcaccactggcattgtcatggactctggagacggggtcacccacacggtgcccatctacgagggctacgccctcccccacgccatcctgcgtctggacctggctggccgggacctgaccgactacctcatgaagatcctcactgagcgaggctacagcttcaccaccacggccgagcgggaaatcgtgcgcgacatcaaggagaagctgtgctacgtcgccctggacttcgagcaggagatggccaccgccgcatcctcctcttctctggagaagagctacgagctgcccgatggccaggtcatcaccattggcaatgagcggttccggtgtccggaggcgctgttccagccttccttcctgggtaggtgttgtgagctaaaggtttctactcttacatcctcggtgacacagcatcactaagggagggctctgtcccctaggtatggaatcttgcggcatccacgagaccaccttcaactccatcatgaagtgtgacgtggacatccgcaaagacctgtacgccaacacggtgctgtcgggcggcaccaccatgtacccgggcattgccgacaggatgcagaaggagatcaccgccctggcgcccagcaccatgaagatcaaggtgagtcgaggggttggtggccctctgcctggctcgggagagctgactggggggcgctctgtgagctgaagccgtgcctggctgtctttgcagatcatcgcacccccagagcgcaagtactcggtgtggatcggtggctccatcctggcctcactgtccaccttccagcagatgtggattagcaagcaggagtacgacgagtcgggcccctccatcgtccaccgcaaatgcttctaaacggactcagcagatgcgtagcatttgctgcatgggttaattgagaatagaaatttgcccctggcaaatgcacacacctcatgctagcctcacgaaactggaataagccttcgaaaagaaattgtccttgaagcttgtatctgatatcagcactggattgtagaacttgttgctgattttgaccttgtattgaagttaactgttccccttggtatttgtttaataccctgtacatatctttgagttcaacctttagtacgtgtggcttggtcacttcgtggctaaggtaagaacgtgcttgtggaagacaagtctgtggcttggtgagtctgtgtggccagcagcctctgatctgtgcagggtattaacgtgtcagggctgagtgttctgggatttctctagaggctggcaagaaccagttgttttgtcttgcgggtctgtcagggttggaaagtccaagccgtaggacccagtttcctttcttagctgatgtctttggccagaacaccgtgggctgttacttgctttgagttggaagcggtttgcatttacgcctgtaaatgtattcattcttaatttatgtaaggttttttttgtacgcaattctcgattctttgaagagatgacaacaaattttggttttctactgttatgtgagaacattaggccccagcaacacgtcattgtgtaaggaaaaataaaagtgctgccgtaaccaatgaatggctcctgtttggggaagtagcaagtgggctgggaaagacagaccaacctggaagtattgggtagtcttgggggtgggggcggtgggtgctgctcagcttggcttcgtgggctggtgagaaaacggcttaacaataaactgagcagttcgatttcttccaaatcgaaagtgcaagaacaaggcagcctagtgggtttgggtgttggagataactgaagcaacatcataagcaggctgggagggaagtcctgagacggctttttccattatttaggaaaaactagatgactt

SEQ ID NO: 11015 - DNA, 2437 bp, Homo sapiens
aaaaggaaccagcaagcacaggctccctgttactccctgtggtgcaggaggcatttttctgagggcattaagcacttcaaagtgtgcctgtggtgggagtgctgtgtgggcaggaccagcactgggtgggatgttgggggcggggagctctcagctgcctgcccctgcccccatgcccacactctggcagtctctggtgggccagaaatgatgagtgctcatttctcttccaccctgcaggcacagttggcgggcagctcccaggtctccatgagtacggcgccgtcgggggctccacacacacggccactgcagccatgtgggcctgtcagcactgcacgttcatgaaccagccaggcacaggccactgcgagatgtgcagcctccccaggacctagggcgcctgccctctgctggctaggaccgggcccagcccagcccttcctgaagccagaagcgttgctgagtgtgttccctgtaactgccccatagtgggcagccctggaggaacaaggggctggctgtcctgggctccctgacccactgaagcttctcagcacgttcctccctggagagcgggcgccacggctggtattctgcaggctgaatgcagtctccagactggaaacgcagagcggctcctcacgcctaatcctgttgacaagtcccccgccgtgttggaaagacctctcgcctctacgtggcacctggaattggggcgcacagggaggggccgatgctgccaccacccagccttctctttattttcagtgctttttgtttggcctccctgcccccatgtttttctggctgggagctcttggttacccccttgtctgactgcttggtggcaggcaccctgcctgtgagggccactttcctcttctagtagctgttgtctggtggggacgcagtggccctggacacggctcccctctgcaggtctgcaggtcggtttgctgcctgccctcctcctctcacccgatgtccaggtgggattttaaagtctgcattggttataataacagttatcagtaattcctgcccagaagacttttatttatttttttttaagataaaaactgcacaaaaggggagtgagagagactagtttccacatccttccctcctttagtgaagcccccgaggttgtgtccagggtgatgagtgtggacgggggcaccagtcagttctcccttgaagtaaacctcagtgcctgagacttttctaccaagccacacagctgcagcaactgcagatactgcgggctgagcaggagcagtggtggcgcctgccctgaggctgccctgcgatggcctgggtgggagagctgggtcaccggtgccgatgctctggccctccccaatacgctgcttcgtcccactgcaccgcctggctgagggcgttaggggctgtgcctcttgtgagggccatttgggacctccctggggcactgcacaattgatagtgtaccaatagagggagactgggcgatctggaacagcacgtggtggggtcctgcttgtgtgctctgcgttcctctgtggcgtggccaggccggggcatggctcttacccggggagtggtgggcatctcgatgcttctttgccttaatgatggccacatctgggctgctctgcacccacgggagaggctggcccagctgcagactgcttagggacttctgtgtccatcctggggggtaagcccacgtgacccacattcttggcactatgaacagagaacatttgcctgttggcttctgaagtggtcagggccatggctgacacctccaggtccgcctggcatgggacaccaagtggaaggcccaagcagctcatctgctcttgggaccaggggccagttgggttgggtctggtcacggcagagctattgtggagggtcaggaagggtggagaggagctgggttgaagcggactgctgcggatgcaactcccagcttgcccaccgcgggctgtctgctctccctcctagcagctgtcacactgaagttttgtcctctgctgtctcctctggtcctgagatgagctgtgagcctaggtggccaaggcttcctgcattgcttccctgtgagtccaaggccttcccccaccactgggcagaggctggacagcacggacttctagagagagccgcgttgccagttcctctcccactcgctcgtccttatccaccacgctattatagtttccgttgtcctccaccagcatttcccttactctgaagttccggcattcacatcattcatgttttcttttgtcttttagctaaaggaaaagcattggcgatttgtctgattctggttttgagttactctttgttcagtaatgcactttattttattgtccaaagagagtcagagctaagcatacaggcttgggggtgagccctgctgtgagagttcaggccctgggag

SEQ ID NO: 11016 - DNA, 1200 bp, Homo sapiens
gcctgaagagtgagtgggggctgacctgggggcagggctgggccggcaggccgggcctcatgggcaggaggggcctgtgcccaccacctaccgcgttgtcccctggcagccttcaagcccatcgacctgagtgacctgaagcgccggagcacgcaggatgccaagaagtcctagagcgcccggtgcccctccccggcctccggaagatcagggtgcgaggtgtcggttccctcctgtcctgtggtcctgcccctgggatgggggtgccttgctccagcgggctgcagatcccagcactggcgtgactgacggctgaggcctgcctctccttcccaagcccccttccttcatccttgggggtctcaggctgcccccatcatgggggtctgggccctgcccaccctcctgccctcccccagccacctggctgcatttttgaagctgcctggcccccaggggccctgacctgacctctctcctctcccctcaccctcctgcccctggccactgcaggatcaggaggggagaagaaggagcctctgctgcctcccaggctgctgggactgggctggttttgtccttgaagtggtcaggatacaggacaagggcagccccaccccatccagcctgggctccccgcagacccttgctgctcccgtggcctggacacgctggggagcttctcacacctacccctaccgtccagcctggcctcttccctgaatcagcttcaagatggcaccagctctttgggcctaggatactgccgggccccccaagggggtccccagcaaccaggcctggcctcctggtgtctgcggtcacagtggcccctgggcaggggcacccaggctgaccctgaggtgctgctgctgggtctgtcttggctctggggtgtgctgggagggtcaccaggtcccttttccttcctgtgccctctgaaagctaagtgtctgtgtggctgtggagctcgagggtctgtgaataaaggcggcggcactgggcgtggcctcttggtggtctgtcaggcctctgcccctgcggcacacatgcacagccagctcccgggcagggctggaaaccccagatcatggcgaaggcttctcaagcccagaaattctcagtctaagccactgggcgtgctcaggtctcctagggcaggtggtggcagggagggcattctggagggagaggctgggc

SEQ ID NO: 11017 - DNA, 1189 bp, Homo sapiens
tccgttcacccccgtctcttccttctgcttttcggtttttggaaagggatccatctccaggcagcccaccctggtggggcttgtttcctgaaaccatgatgtactttttcatacatgagtctgtccagagtgcttgctaccgtgttcggagtctcgctgcctccctcccgcgggaggtttctcctctttttgaaaattccgtctgtgggatttttagacatttttcgacatcagggtatttgttccaccttggccaggcctcctcggagaagcttgtcccccgtgtgggagggacggagccggactggacatggtcactcagtaccgcctgcagtgtcgccatgactgatcatggctcttgcatttttgggtaaatggagacttccggatcctgtcagggtgtcccccatgcctggaagaggagctggtggctgccagccctggggcccggcacaggcctgggccttccccttccctcaagccagggctcctcctcctgtcgtgggctcattgtgaccactggcctctctacagcacggcctgtggcctgttcaaggcagaaccacgacccttgactcccgggtggggaggtggccaaggatgctggagctgaatcagacgctgacagttcttcaggcatttctatttcacaatcgaattgaacacattggccaaataaagttgaaattttaccacctgtccttgcctcgggtttatgatctcaccaagcccggagagctgggctggaatgcggacgccaaggccatctgccaggccttagtggggttactggtgctgagaggcctcgcccctgggacgaggtgcagatgcagaaacaggccccagtctccccagcagagctgtgcaggcttgcgattcccggggaggatgccttccctgcctgtaggctgctttacctggactctgatggggcttctgtgattctggaccctggatgtggacacgggtggagccacccagccccatgtgatgctcagactcctggtcattccctcccatccccgccgtggagtgacgagaaatcaggtggactcaggcttcaaggatgggtgagaggaacagggggccctgcttatcactaacccttcacacgataaagggcagggctgggcgcagggacgcgcgcctggaatcccagtgctggggcaacacggggagaccccgtctc

SEQ ID NO: 11018 - DNA, 1629 bp, Homo sapiens
cagggctggggcttcgcgcagggctgctgggcagtcattgagggggaggtccccccaacaggcgacctggagagcttcaagaagcagtcgtttgtgctgaaggagggtgtggagtaccggataaaaatctctttccgggtaagctacaggctgctgtggccagggaatggaggcggggctggggctggggtccggaccgaccttccctgatcctcgcttcgggtcctgcaggttaaccgagagatagtgtccggcatgaagtacatccagcatacgtacaggaaaggcgtcaagagtgagtggggccccgggcagggcagagggggccgcttgggtgcgtgctgccaggcggggaagcggggccgctgaccgccctcttccttgtgccgcagttgacaagactgactacatggtaggcagctatgggccccgggccgaggagtacgagttcctgacccccgtggaggaggcacccaagggtatgctggcccggggcagctacagcatcaagtcccgcttcacagacgacgacaagaccgaccacctgtcctgggagtggaatctcaccatcaagaaggactggaaggactgagcccagccagaggcgggcagggcagactgacggacggacgacggacaggcggatgtgtcccccccagcccctcccctccccataccaaagtgctgacaggccctccgtgcccctcccaccctggtccgcctccctggcctggctcaaccgagtgcctccgacccccctcctcagccctcccccacccacaggcccagcctcctcggtctcctgtctcgttgctgcttctgcctgtgctgtgggggagagaggccgcagccaggcctctgctgccctttctgtgccccccaggttctatctccccgtcacacccgaggcctggcttcaggagggagcggagcagccattctccaggccccgtggttgcccctggacgtgtgcgtctgctgctccggggtggagctggggtgtgggatgcacggcctcgtgggggccgggccgtcctccagccccgctgctccctggccagcccccttgtcgctgtcggtcccgtctaaccatgatgccttaacatgtggagtgtaccgtggggcctcactagcctctaactccctgtgtctgcatgagcatgtggcctccccgtcccttccccggtggcgaacccagtgacccagggacacgtggggtgtgctgctgctgctccccagcccaccagtgcctggccagcctgcccccttccctggacagggctgtggagatggctccggcggcttggggaaagccaaattgccaaaactcaagtcacctcagtaccatccaggaggctgggtattgtcctgcctctgccttttctgtctcagcgggcagtgcccagagcccacacccccccaagagccctcgatggacagcctcactcaccccacctgggcccagccaggagccccgcctggccatcagtatttattgcctccgtccgtgccgtccctgggccactggcctggcgcctgttcccccaggctctcagtgccaccacccccggcaggccttccctgacccagccaggaacaaacaagggaccaagtgcacacattgctgag

SEQ ID NO: 11019 - DNA, 1228 bp, Homo sapiens
aggtggagaccaaaaaaccaacccgcagctcgtctgcagcggctgccgcccgccgaagccgcgcccgccggaccccaccgcgagccgagcgcacagtcctgggcgggagcggaaacaaggactcccagcagctcccaggcacccgccgcgcccgtagcgcccccagcgcccccagccctggccgatcgggcggagcgtgcggggagggaggggcgcgtaggctccgcctccaacggccgccgccccaccccctgcgccctcgcaccttcgccaacctaatcacgcaccgccctacccgcccttccgttggcagcgccggcgtccgcgcgggaaggtataaaaacgaccacagtcgcggcccgactccctcaacagcgcccgccgagtctcgcacgccagtgcgcacgcgcctccccgcctcaccccgtcccgcgcgcgcagccgtccgccagcggccaatcagcagccgctccgaggccgtggcaccggaaggcctcacgcggcgccggaagtgacgtgccggcgtgctgacgcgcgggctcgagccgatgcccgattccgcgcccgccatggccgacaaaatggacatgtctctggacgacatcattaaactgaaccggagccagcgaggcggccggggcgggggccggggccgcggccgggccggctcccagggcggccgcggcggtggggcgcaggccgccgcgcgagtgaatcgaggcggcgggcccatccggaaccggccggccatcgcccgcggcgcggccggcggaggcggcaggaaccgaccggcgccctacagcagggtgagtgcggaggccggccgcgccggagagtgggagggggccagccggggctggggccggggccgctcgcggcggagacccgggccggcgggtggataaggctggtggagcggccgcccggaggtccggagggtgcgtgtgggcgcggagggggtggtgggcgggagcgaggtcgttctttcggggtccggtcccggaggctgagacccttcccagctctttgtttgttccggacgttggggcctcgtggcaggagaggaggggacgctgggcgcggcacaggcggcgggaagttagtctaagggaactgaagttgtgcggccgcggtgggaccgtgcggcctcgggctggggcagctgcagcgccggagggagcgctggcggccccgtttcggccggatcctctcaggccgggaagaggaa

SEQ ID NO: 11020 - DNA, 3086 bp, Homo sapiens
cccacgctgcttccacacccaccacctctggccttgggtggtggcattacagggatgagggagtcactgtgggtggccacagggctatggccaagcgttccctggccgtcttcctctggcctcagctttgttcctataggctgcccgcgccgtgggctgcaggtctcgccgcccgcttgatccctgaggtgtttccatgctgcgggtggtgcttccaggcagagtgggtgggggcccaccgggcaccgccctttcttccttgtccctgcctcactctgagagccttgggggtctccaccagtgcagacaagggctacagtctccagggccgggtcttgtccctcttctccgctggtccacgctggcagctcttggcttcgggcctgccttctgcctccctttgggatctgtgtcttccagggatcagctgcttggcttctgctggaggtgcctccctgtgggggcgcagcctgcctcctgctctcagttcctcgccagaggctgctgcccttcctggctgggctcaggaggctccttgtaggcatatgatggggagggggtgcccctacccacctccaagaggctacagccctgtgtctggccatgtgagccctggcctttcaccgggttgctggtttcttttctgtggggcccagacttctgtaaagcacacagatgtgggtaagatgaaaaactgtggcccaacagggcttaaccctatggatggtgggatttttatccaatagtttggcctggtgtgcccacaggatgggaacagggaggcaccatcaacacttgtcatgttaatgagcttttctttgctcgaggtgttcagagacaagtcctgtgtctacctgcgtcagcctgaaaatggaaatattggctgttgactcttgtcatttagtgacttcatccccctcccctcagtctgatcttgtctaagtagaatccaggcgttagttggaatcatatcataagtatccatgaagaaaacgtcatgatctgcctcggagtggggagaaacaggccctccttgtccttgtgcagcccccacttttgtcctggctgtgggtggccatccattttgagcacctctgccaggctgcagacctggaggcgaagggagtgtggaagaggagggtgtaagggtcgacgcgtgctgaatgggaggtgcaggtcctcggtgcgttggcagaagaggcttctggagtttcgaggccatacctcctttcaagagctttggatttggggcgacttccctgggtctaggggagtgttcctgtcccctgtcaggtcagccctgcggagccactccacccctcttccccttcccctggatttcctgacatagatggtgtgttcatgtgcaggtgtgagtgtgctgtccttctgatctctgttgatcccgctttcctactgagagggtggtggagagggtggtggtctcttctcacctcagtttttctgacacagcgaatcgagggctttggccaaggccaggtctctcaaacttgtccgccaagtaaaccatgatatatgtcttcccttccaccttaactttgccccaactcctcttttatcctaacatggacgctcagatttcagaggaatacccagcagggacaggtcagctctcaccaggagagtgaggcccctggctgctgctcggggtggcactggtgttgctggctcagctcttggtgcatgtttcagatatgtgtgtacacttctgactggtgatcagggcccggcccacggccctgagcggctgcagcctgctttgggacgatggtcaggtcccatgttgtccctgctgcctccctctggagtggccacttggccaaagcgcccatccacatctggaaagtcggagccgcagcctgctgcaccgtttccgctctgggatcttgtgagttacttttttaggctgtggtttggtgaaaggaaccaacacattaacgatttttcccccagaagccactgaataattctttttggtgtatttttgccttcctgttggctgtctggccttggagcaggtcgggagagtagagtacataatcagtgccacacagaggcagggcgtgtctgagagactaatgcctgtcctgcctctggcctgtgtcctgggtgtgtaccatacctgctgggccagtcccacacatttccaccctgcccctggagcagcagctttgataccatgggtgtcccttgagtctgagctagagtgtgtccccgataaactgtgagacctccctgttcttggtgaccccagttgggctttggcccctccagcaaccttgtgtcccagccctgcccttcttcccaccccctcaatctgctagtccctgaagcctttaaccaaacgggagtgggcacagaaagccttctcctggcaacaggacaagggctgcccgcgtgtccagccctgttgctctcctggcgctgagaggtgggtccaagcagagttgatcagtccctgcctgccctgcctaggtctagccaggggaggttgtgtgtgtgggagaagaccccgggatctgctggggtgggatggaggttattaaagatctaagtgaggaggggctggggtttggatgcggggtgaggcccgagcgctcacacttcgtgtagggcgggcaggggcctgacctcttgcagggcagtggccttggtgccctacccctgccctgcgcagtatttattgctaaattattgtccaggaggggcagcactgggcctggccccccgggtatttattgctgtacatagtgtatgtttgtgatatataaggttttctttattttgtatatgatcaataaaccttttaaagagactggcaggtgcttctttggggcgacgcggcgggcggagccggaaggggtgggtgggggcggggcccatcttgcgcatgcgccctgagcgcggcctgccgtgtgaggcggaagcggaagagcaggtctccaggggagcgatggcagccgggggtctgagccgctccgagcgcaaagcggcggagcgggtccggaggttgcgggaggagcagcagagggagcgcctccgccaggtacgccgccgccgctccc

SEQ ID NO: 11021 - DNA, 3086 bp, Homo sapiens; identical to SEQ ID NO: 11020

SEQ ID NO: 11022 - DNA, 1121 bp, Homo sapiens
tgcacgtcgggtctcagtggtcatggggatggaagccaccccagtggctgtcggggtgaatggaggcccctggagatggcagcgggttaagcacgagcacggaattctccctcccaaaacggaactcagacaacagtgacggagcctaagagcaaagccaaagccacgggcaggggtgagcgggacccgaggcaggagatgacggagcctaagagcaaagcgaagccacgggcaggggtgagcgggacccgaggcaggaggtgacagagcctaagagcaaagcgaagccacgggcaggggtgagcgggacccgaggcaggagatgacggagcctgagagcaaagcgaagccacgggcaggggtgagcgggacccgagccaggagtggcgccgggcagggaggcaggcagccccaggcgctgtgtgggcactgggtgagaagcagggatcccggcgccctggctctgtgctgcttcctgagacgagagtggcagagggcaagaagaaaaccaaacagcgcggggaacagaagtcaggaaagatgaacgtctggaaggaaatgcccctgggccgggcggtgcccccgggcgtgaacagaatccagtgctcccacaggcacaggtgcttggtgagggccgtcctccctggctgtgctgtcagtcctcagatggggatggaggtaaggaaatggcccagagtggcctggggctgccactggggaggggccgagggtgtctggagaggtggggccggcattgtggtagcataagcctcttcaacagactttgtaaacctcgtgtgaaacttagtttaagaaacaacaggcttggccaggcgtggtggttctggaagtggctttggagctggctttggtggtggctgtgggggtgggtttgggcgctttggaggaggttgcagtgagccgagatcgcaccattgcactctagcctgggtgacaagagcaaaactccatctcaaaaaaacaaaaaaacaaaagaaacaacaaggctgggcacggtggctcacacctgtaatcgcagcactttgggaggctgaggcgggtggatcacgaggtcaggagttcgagaccagcctggccaatatggtgaaactccatctcta

SEQ ID NO: 11023 - DNA, 1164 bp, Homo sapiens
tggcttggggcttggggtggtcccatggagggcgctggtcccaggacgccctggccttgcttacaggggtagggctggtgtcagacaggaagctgggcgatgggctcatgggggccgggcaggcagagcctgtctgagggtggagctggggcctggccctgggggtgtagctgccttcacagcaggggggtgctctgcccacacccggcccctgagccccccgccctccctgcaggcgaacctcttcccggccgctctggtgcacttgggagccgaggagccggcaggtgagtgtcagtggttggggccagtgtcggagtccagccagcctgtccctggacctcagagccagctgcccgggagggcgttcggtctggggcctcctttgggtctgagagggagatctgcggcccccagtaaccacctccccgagagaggactgggacagccacctgctggccacccccctcccagagctgagtgctggtgggcagatgctgggtggatggtgagtggacccctcctcagaggctcagggtgagcttgggcctccctgcaggtgtctacctggagcctggcctgctggagcatgccatctccccatctgcggccgatgtgctggtggccaggtaagtgccggtgggtctgggggcacctcccgtggcggcactcaccactctgtgtcttcgcctccccacaggtacatgtccagggccgccgggtccccttccccattgccagcccctgaccctgcacctaagtctgagccagctgctgaggagggggcgctggtcccccctgagcccatcccagggacggcccagcccgtgaagaggagcctgggcaaggtgcccaagtggctgaagctgccgggtactgcggctgggtggaaggtggggtgctgtggccgggtggagggcgggggtccgggtgctgtggcagggtcagtgggctggggggctaggtgctgtggccggcagggccgagtgcttcagccgggctggtgggcgggtggccgggtggtgagagcccggggtgtgtggtcaccctgatgtgtctgcactacagccagcaagaggtgagagctgccagcctgaggtgcccactccgccagccacaggaccacctcctctgccagcaggaataaagacttgtgcatccctc

SEQ ID NO: 11024 - DNA, 2953 bp, Homo sapiens
gggccgggcctagaccctgggaggcggggcgggtgggcgtggggctcgccgtcggggtcggggtccggcgcacctgctggcgggcccgggagatccaggtgcgcagcagcagccgcaggcgcggcccgtggttcttccgggtggtcttgacggcgatgaagacgtcgtcaggccgcaggctgggggcagcgggccgggacgggggcgcgcgcggggccggggcgggggtccgggccggggcgggcgcgcggggcagcggcagcggcagtaacagcagcgcggccagggccgcggccagcgcgaggcaggcccggcacagcgccccacgcgcgcggctcatgcggccgccgggacccccggcgctgcgagcggagaacctggccggagccgtgggtgggcggcggcccctttaagaacgcagcggccccgccccgccccgcgccccggaagcgacggcttcgctgccccggaagtggacggcacgccgcggcggggtgggtgcaagatgccgctgccggttcaggtgtttaacttgcaggtaacgagccgaggccgccccgggcctccgcgcccccgcgccccccgccactggggccgggctgaggtcgagcaggggcgcggggcctgcgccaggagtcggtcgggcacgctccgtgccgggcctccgcgggcagcgcgcgtcgggggctgcagggccgagggcgcgtctccgccgtggctgcgcgctgcgatcgggggccgccgggccgcgcccgccccgcctcccctcccagcagctcacgggagaggttcccggccgccccgacgctaacgctctttctcccttcagcagccagccagctctgtgtcagggtcggggggtgcagaaagtcaggacagaatgagggatagctcggcccccagctcggcctcctcgtcagtgacagatctgtactgcacccctcacagcagtaggtcagacctcgtcctgcccggcacggccggggacttcagcctgagcgccagcctgtcggcctgtacgctgctctacgaggtaccttccaggacagggacccccgagcgagggaggggggagcagggccccggccgcccctgctgtggctgggcccctgctgctctgctggccgaggacagggactcagtgccaagcgcaggaggggagggagccccggtgggcccggggcctgcggagggagccgagctcttggtgcttttcccgaaggagcgcgggaggcccacgggtccggcgagtgcccggcatggcggcttttccagcctgctttgtgttaagccgaggtcctggcttctctgtgtctcccagctgggggccatgaggctccctgagatgactcttttccccttctcccaactccgtggcgtgactctcagcccagtattgctgctccgctgctcaggacagattccgggggctggtcctcctgcctcctggggttgaggtggcgtcccgttcttctccgtggcttggaggaaactacatcaggatggtggctgggaacgtgtaggggccctcagaggcccctgtgtagttggttgtcccctgtctgctttctggctttcagagatgagcggctagaatcaggcgaggggtttctgcttctgagccttagagtcttgtgaggagacccctccctgatgtggtggcacaggagcctgggtgggggcgggggtgactgggagggcacacctgggggacagcagcggcgggagtgtggtccgactggcctggaagatcttgggcagagctgacctcagagaacagtgcgggtctctcgccctcctggggcagtccccaggacgaggtgccaggtgcctggcccatgttgcagggggccgtggagcccatgcagatcgacgtggacccccaggaagacccgcagaatgcacctgacgtcaactacgtggtggagaaccccagcctggtacggagcccagtggggggaccttgggtgtctcagtcctgctgaggggtccagggcacactccccgctgcagcctgcacagcaggtagaatgatcctcctcagtgatcgctgtcgtctttttctgaccccgaaaccatcagcgtttctgattgcgcactcacatgaggcttgtagctcagcttcagatgctgctcatggagaagccagggcaggtctcctccccgctcagcctagcgaccagcagtcactagtgggtgtctatccccgaaagcccccgggtgcagggtcccactcctgaggctcctgcgccaggcccaccccagcggtcttcgtagctcctgggacagcagtcagtctcgtacccccatgcccggttctggttatgggcccagggcgacattctggctaggacagtcaggccccaactcctgaccctcagggcctggggccagggtcctgcctcccatcctgcctgactcttgtctgtgcctgctcccaggatctggaacagtacgcggccagctacagcggcctgatgcgcatcgaacggctgcagttcattgctgatcactgccccacgctgcgggtggaggccctgaagatggccctctccttcgtgcagagaacctttaacgtggacatgtacgaggagatccaccgcaagctctcagaggccaccaggtgaggccaggggcttggcgagaggaagcagaggccaccaagggagcgcgggtgtctgggactgggcccccttcctgtgccctgcatctcccacccctgtgctgggaagtcgggcgggtagagctctcgctctcttttggccagcagtggaagtgccctgtgtgtgtgtggcttctgtgtgtgtgcatgcagggctttgattccaaggggagctgttggagactgtggctcaggggccgcctccctgctggtttccccacccggctgtaggctcctggggcagcagttctctctgtggccctggtgcagactggtccctagaggtggggt

SEQ ID NO: 11025 - DNA, 1388 bp, Homo sapiens
acttgggaggcagagcatgggctcatgggtcaggctgcttctgtaggagggtgaggtctctcacaaatggggtcttaggcattctccgagcgggtgatgggcaggcaggggtggcctggcccttcactgcctgtgacgccaggtctctgctcctcagctgctgtcccccagcaacgtggccatctacggtggcctgtgcgccttggctacctttgaccggcaggagctgcagcgcaatgtcatctccagcaggtaggtgccccggtcctgcagccctgaaggctgtccccgtccctctccgtggctgctgcttcggccttgcatgtcctggccccctggccccagcgttttctcaggtgtttgtctggggactggtgtcccactggccacttggagggaggggcaggcagaggacagagttctgaggggtctgcctcaccagctccttcaagttgttcttggagctggagccacaggtccgagacatcatcttcaaattctacgagtccaagtacgcctcatgtctcaagatgctggacgagatgaaggtgggccccgcctggggtaggggtgaggtggggccctgcctggcctcctgtcctggtcctgaccagccccttccccaggacaacctgctcctggacatgtatctggccccccatgtcaggaccctgtacacccagattcgcaaccgtgccctcatccaggtaagcgtgggggtcaggctggcacacggcaggcgggcatgcagggggctgtggagctgacttccctctgccctgcagtatttcagcccctacgtgtcagccgacatgcataggatggcggcagccttcaataccacggtggccgccctggaggacgagctgacgcagctaatcctggaggggctgatcagtgcccgtgtggactcacacagcaaggtggctgtgggctgcggggcggtgggggcagctgggggtgagcctgggccccgctgagcttgtgcctgcacagatcctatacgcccgggacgtggatcagcgcagcaccacctttgagaagtctctgttgatgggcaaggagttccagcgccgcgccaaggccatgatgctgcgggcagctgtgctccgcaaccagatccatgtcaaggtgggctggcttgagggggggcaggcgcacggcgtgtggggcctggtggctgtgagctgctccttgtctcccctgcagtccccgcccagagaagggagccagggggagctgactccagccaacagccagtcccggatgagcaccaacatgtgaggggtgaaccttggcctccaggacatctgcaccccctccccacctccacggacctcggacctccaggcggctcagtgctgcctgcggcccagctaaggggcctg

SEQ ID NO: 11026 - DNA, 1073 bp, Homo sapiens
acccagagtactgggcaggaacggaagggggaagggaaggatgggatgggacgcgaagagcgttaaaggccccccaacttcacccctttaatagccgatcccggccggatgcggttgctcatgcctgtaatcccggcactttgggaggctaaggcgggcagattacctgaggtcgggagttcgagaccagcctgaccaacgtggagaaaccccttctctactaaaaatacaaaaattagccaggcatggtggcactcacctatagtcccacctactcgggaggagaatcgcttgaaccgggtaggtggaggttgcggagggaggagaatcgcttgaaccgggtaggtggaggttgcggtgagctgagatcgccccactccatctagcctgggtaacaaaaatgaaactcgtctcaaaaaaaaaaagcccacccgcagtgtagcacagggcaggccggtgctgtgggtgctgccagcacctgctcagagcccgaccccacaggtgctggaggcgctgctgccgctgaagggcctagaggagcgtgtggcagccgccgtggacctgatcatcaagagccaccagggcctggaccgccaggagctgagctttgcggcccggtccttctactacaagctgcgtgccgctgagcagtacacacccaaggccaagtaccatggcaacgtgatgctactgcgcgccaagacgggtggcgcctacggcgaggacctgggcgcggactacaacctctcccaggtgcgcaaggggcctgacgggaacggggacagggacaggagtggggtgggacggcagctgatcgcatcccctgcaggtatgcgacgggaaagtatccgtccacgtcatcgagggtgaccaccgcacgctgctggagggcagcggcctggagtccatcatcagcatcatccacagctccctggctgagccacgcgtgagcgtgcgggagggctaggcccgtgcccccgcctgccaccggaggtcactccaccatccccaccccaccccaccccacccccgccatgcaacgggattgaagggtcctgccggtgggaccctgt

SEQ ID NO: 11027 - DNA, 1642 bp, Homo sapiens
agtggggcgccatcggcgacgtgggcattttggtggagacgatgagcaccaacgacacgatcgtcagtggcacgctgccccagcgcatggcgtcctgcctggaggtgctggacctcttcctgaaccagccccacatggtcctgagcagctttgtgctggctgagaaggctgcggcctatagggacagggacagccagcgggacctggtggaggccgtggcacacatcctgggtgagcactcccagtaggagccgcgccaggtgtttcccctgctggcatcagggtcttgggacatagcagtcgtgcccctgtgcgcctcagtttccccatctgcagagccagggtgcgggcgcaggtgtcactgtggtggtggtgctttgggagatgcacagcccacgcacccctgggtgtcagccctgccgcatacaggccgtccccatgccccctctggagttgccgacccggcgcatcccttccaggcatccgcgacttggctgctgtcaacctggacagctcactggcggacctgggcctggactcgctcatgagcgtggaggtgcgccagacgctggagcgtgagctcaacctggtgctgtccgtgcgcgaggtgcggcaactcacgctccggaaactgcaggagctgtcctcaaaggcggatgaggccagcggtgcgtgtgggtggccaggcgggagtggggtccccgggcctccccagcccttcctccttgttgtctggaccgtgtcccggcaggcataccgcccttcgtcacgggtgccattctgagcgttcccaccccgactcccacctgacgtagcaccgtggggacctgcgtgcgtgtctgtgtgtccttgcgtgggtgccagggctctgcacccagaccagcctggcatctgcccctgtcttcacagagctggcatgccccacgcccaaggaggatggtctggcccagcagcagactcagctgaacctgcgctccctgctggtgaacccggagggccccaccctgatgcggctcaactccgtgcagagctcggagcggcccctgttcctggtgcacccaatcgagggctccaccaccgtgttccacagcctggcctcccggctcagcatccccacctatggcctgcagtgcacccgaggtactcccgggccctcctctggaagcggtggtcagtgctggccatcacggggcccgtggctgccgcctgcacatgctgagtgcccggcactgccattgcagctgcgccccttgacagcatccacagcctggctgcctactacatcgactgcatcaggcaggtgcagcccgagggcccctaccgcgtggccggctactcctacggggcctgcgtggcctttgaaatgtgctcccagctgcaggcccagcagagcccagcccccacccacaacagcctcttcctgttcgacggctcgcccacctacgtactggcctacacccaggtgagagccaggctggtcctagaggcctacggcaaacgtctgggctccccacctgtgccctggctttgggggaccgtcgcttaggaggccccgccccttccatctgctcagcagtccctccttcctctcagagctaccgggcaaagctgaccccaggctgtgaggctgaggctgagacgg

SEQ ID NO: 11028 - DNA, 1289 bp, Homo sapiens
tgggtgtgggtggacctgtggaaggccctgggtgagcacggcccctgcccgcaggcatggctatcttcctgaagaacgtgacattccacggggtcctactggatgcgttcttcaacgagagcagtgctgactggcgggaggtgtgggcgcttgtgcaggccggcatccgggatggggtggtacggcccctcaagtgcacggtgttccatggggcccaggtggaggacgccttccgctacatggcccaagggaagcacattggcaaagtcgtcgtgcaggtgaggggaggagtcccggcgcctcgggcaccccaggctctggtccccaggcagtgcctgagccggtgggtgctgcttggacgcaggtgcttgcggaggagccggaggcagtgctgaagggggccaaacccaagctgatgtcggccatctccaagaccttctgcccggcccacaagagctacatcatcgctggtggtctgggtggcttcggcctggagttggcgcagtggctgatacagcgtggggtgcagaagctcgtgttgacttctcgctccgggatccggacaggtgagtcggcaggggtgcttgtggaccagcctgggccaggcacagccccgggcccctgagcccttctctgcagcccaccattgtgggctgtcacggtgcctggggtctgtccccctccatcttgtggggggcttgctggatggggctctgcggctgctccccacttccccagcccggcgtgtagggaagagaccgtaccctggcccagtccagcccacagtcctgtgtcccgcaggctaccaggccaagcaggtccgccggtggaggcgccagggcgtacaggtgcaggtgtccaccagcaacatcagctcactggagggggcccggggcctcattgccgaggcggcgcagcttgggcccgtgggcggcgtcttcaacctggccgtggtgagggaaggccccaaatggggccctcaaaagccccaagaccaagggggggaccctgggtggacgggtgaggccctggagctgcagggagtgctgaggatgcctcccccaggtcttgagagatggcttgctggagaaccagaccccagagttcttccaggacgtctgcaagcccaagtacagcggcaccctgaacctggacaggtgggtaccgcacagccctgctcccgcctctgccgggctctgggctcagggccgtgggagccaaggtggtttgttgacagccctctctggcgtttcctggggatgggacgttgggggctcctggggatgctg

SEQ ID NO: 11029 - DNA, 1153 bp, Homo sapiens
cagggtgggggccgggtgagggccaggcgggcagggtgctgaccaccgcccccacaggacgcgtgggagagcctcttctccagggtgtcgctgcgcctggtgggcctgaagaagtccttctacggctccacgctcttcctgtgccgccggcccaccccgcaggacagccccatcttcctgccggtggacgataccagcttccgctgggtggagtctctgaaggtcaggccctgccccacctccaggccccaccccacctcccaacttgccgagtgtggcctgaccctccccgacccgctgtagggcatcctggctgacgaagactcttcccggcctgtgtggctgaaggccatcaactgtgccacctcgggcgtggtgggcttggtgaactgtctccgccgagagcccggcgggaaccgcctccggtaggagcacggcccctcaccacttccccttccccaccagcctccccatccccagcctgagctccccgcctctgcccccaggtgtgtgctgctctccaacctcagcagcacctcccacgtcccggaggtggacccgggctccgcagaactgcagaaggtgttgcagggagacctggtgatgaacgtctaccgcgacggggcctggggggctttccgccacttcctgctggaggagggtgagcccccgacactgccctgcccctcccgggagactgcacccgaaggccccgcagcagccccacctccctgtttccctagacaagcctgaggagccgacggcacatgcctttgtgagcaccctcacccggggggacctgtcctccatccgctgggtctgctcctcgctgcgccatgcccagcccacctgccctggcgcccagctctgcacggtctactacgcctccctcaacttccgcgacatcatgctggccactggcaagctgtcccctgatgccatcccaggtatgggtggcatggggccgtgggagtggactgggccggggagcagagaccccagcagctaggacctgcctgggagcccctcgggagggaagggcaggcggtgaggggctcagtgccgtctcccccagggaagtggacctcccaggacagcctgctaggtatggagttctcgggccgagacgccagcggcaagcgtgtgatgggac

SEQ ID NO: 11030 - DNA, 1198 bp, Homo sapiens
ggcggcagcaggagcagcaggtgcccatcctggagaagttttgcttcactccccacacggaggaggggtgcctgtctgagcgcgctgccctgcaggaggagctgcaactgtgcaagggtgaggtcccagccctgctggcttcggacacctctggcgatgaggagcgatcgcctcccctcacgttgaccccagacttgcttctccacggggccccctttggggtcagcaaccctagcccaaccctccggccggagctcacgatggcggcctccctccctcccccagcccccagccttcctcgtccctggtcactgttcctcagtcttgaaagggtacttgggggcaaagatgacagattcagcctaaggtcacaccttggctaggcacagagtagcccctgcagctgaatgcggcccctcactgcgtccacagtgggcaggagtcagcctcccagtggtgggcagccccttcctcaaccctcagctatttctcatcctgtgggcagagcggggtggtggccccagaaggacagagtgggtctgagagcccatgccaggcagatgccctggggctttgggaacaccaggcctgcctccctccctccccagggctggtgcaggcactgcagaccaaggtgacccagcaggggctgaagatggtggtgcccggactggatggggcccagatcccccgggacccctcacagcaggaactgccccggctgttgtcggctgcctgcaggcttcagctcaacgggaacctgcagctggagctggcgcaggtgctggcccaggagaggcccaagctgccagaggaccctctgctcagcggcctcctggactccccggcactcaaggcctgcctggacactgccgtggagaacatgcccagcctgaagatgaaggtggtggaggtgggtgcctcctgggcagccaggcctctgccccggacatggtaggacccaccctgacatcagttgcaggagacagcacagacacggggcgggccctgggcggtgggtggggccggccagttccctgtgtggttctgtgcacgtgtcctgtgcggtccacacagccaccgtggagggtccgcccgtgggctccaagaggtgcagcctaggcaggaccccagggacaagaccagtggcatccatgcgtgcccatggctggcaccgtcatcaggttgacggggaagc

SEQ ID NO: 11031 - DNA, 1221 bp, Homo sapiens
cttcgacttcagaggtgggtcctgcccagcctcctgcggaggtgggtggccttcaggtccccacatgctgagcagaaaccacgtggcgtgggctcactccgtgcagtgtgtgtccagcctggtggcaggaggtgtgctcaggggtctcgtgtgctcacagccccacctgagccgcagcacccttccttgcagggcccagcatcgcactggacacagcctgctcctccagcctgatggccctgcagaacgcctaccaggccatccacagcgggcagtgccctgccgccatcgtggggggcatcaatgtcctgctgaagcccaacacctccgtgcagttcttgaggctggggatgctcagccccgagggcacctgcaaggccttcgacacagcgggtgagtgtgcggctgcgcggccagggcaggcgggacagtggcacaggacggccccccgcacagtccccacgctgagcaggatcctgccagctccggggatcccccacccaagcacccaccccacaccccagagctcctcctggtggggtgggggccggcgtggggctgagccccgggcctgaggtgctgctctacccagggaatgggtactgccgctcggagggtgtggtggccgtcctgctgaccaagaagtccctggcccggcgggtgtacgccaccatcctgaacgccggcaccaatacagatggcttcaaggagcaaggtgggctctgccggggttccggggtgctggggggcaggtgggagccggggctggggctgcagcactgagccgagccctccgcaggcgtgaccttcccctcaggggatatccaggagcagctcatccgctcgttgtaccagtcggccggagtggcccctgagtcatttgaatacatcgaagcccacggcacaggcaccaaggtgatgccccccccccccgccccactcaccaccccatgagcctaacctacgcccatgcctggagaggtgacctggccagagcccctcaccccccatgtttcccacaggtgggcgacccccaggagctgaatggcatcacccgagccctgtgcgccacccgccaggagccgctgctcatcggctccaccaagtccaacatggggcacccggagccagcctcggggctggcagccctggccaaggtaggtggggctgggcttgggggtccctcaggctcctgctccctgggactgggttgcgccatgg

SEQ ID NO: 11032 - DNA, 1212 bp, Homo sapiens
gacaggctggcagggcaggtgctgcgtggggccctctccagcccgtcctaccctgggctcacatggggcctgtgcccacccctcttgagtgtcttggggacagctctttccacccctggaagatggaaataaacctgcgtgtgggtggagtgttaggaccaacggtttcctaggagtatgtggttttgctgtgtggcctgtgtcctgactcgcacgtctgctgatggcctggctgttcctaccgtggctctgtcctcgccagctttccctgcagcggcatagcattcgtagcaggggcaggcgctgcatggagggggctgcggggcaggtgcctggaggccgctgtgccagggtggcctctgaaatgtgccagggagcccctacgtggtggttagatgggagctgaggtggaacaagccactttattcactgctgtgtttaagaaacaggaccctcctgccttccctttttcgcccctctgcctggctggcagtgtgcgtggtgtggtcagtgcccagggctggtctttgcaccctgtcctccatccagcccggcccagcgcttgggcttgtcctggacacctaacacccacctgccctcgtggccagcagtggcctgcgtggctgggagcccggtcagaggccgccggggccctcagtaggtgcgtcgtgggcgctggggacggcagcgggtgccctggcgggccgcgtgcagccggagagatgccatgtccctgctcctctgcaatgaaaagcaagcgaaaagtgcacatctcaggtccagctgtccccatctgcccctggccttgcgccagctgggcttgagctcttgcagcccaggctcctgcctgcagcctcagggctgtggaggcctctagcagggctcaggctggcgggcagtgccagcagttgcagggatcaaggtcagactctgcacagctaggcccatgtgtctcggcagagtccaccagtcccacccagcagctgaagggagaaagacgaggaggcagggagcagacgaggaggtggggagcaggcagcccgggcctcagaggacacatggccttcccccgctggcacccccacatcagggccaccaggggactgctcacacccaggggttgccgcctctggacctggctgtccctggttctgctgacctcaggagtgacctgggcttacagaggtactggcagggaggtcatgggccggg

SEQ ID NO: 11033 - DNA, 2615 bp, Homo sapiens
tcttcttgtggggtgcagagcggcggcagtccgctgcccagtcttggggggaggctgtccacagagagctttggaacagagtgaccccaggagaccatcctgttggcctgtggcctccccgtgactgcgttccgtgtgccgttgctctcctcctgtcctgggtgcccacccgtgaggcaggagtggcaaggcgggtgccccgagcacttgagttgccttgtctgcggtcggccgtgcctggaggggcgtctgtgtcctgctcagctgggtggctccacgcttggtgttgggggctcctaagctcttgctgcgccacactctgggcagtctctgccatgccagcttttctagtcgcctctctcttcctgtctcatttatctctgtccttgttttgtgtttcttttcacacttggtctctgcccagccgtcttgtccacgcagcttcgtctgtattaactcctccagccgcagcccactcactccccgccgtcggtgcatggccggcgtccacgctgtgctccctcctcggcggccacgcgcgctcggcggctccttccagcaggggcttgcgcttctgtcgggtctgtgccgctgggagacccgctgcagttttcacactgtgcacactctggaaatgtgttgacaggaactgcttttcatgtcttccctgagaggggtacccattttcaaacaccaggttcctttccaggaagggaggcaggagcacccgtctccgctccactcggatccttcgaccctgccgagcccggctccgcgggcaccttgcttgcatgcctcttcctccttcccgtcttcctgtcactcgttctgctgagcacgtgtcccagccacagaggcccctgtgcgtggcgggggacgcaggcgtctagactggggctaggcggtggcggtgcgtcccctccctgcccagcaccgtcactgtggtatctgcctggccggctcccccagccccatgctgaccttctcctgtgctttggctccgacagattcctggtcgggtggcttccagtggtcttcagtctgtcgtgcaccgatgagaactctccttattgctgtgaagggcagacaatgcatggctgatctactctgttaccaatggctttactagtgacacgtcccccggtctaggatcgaaatgttaacaccgggagctctccaggccactcacccagcgacgctcgtgggggaaacatactaaacggacagactccaagagctgccaccgctggggctgcactgcggccccccacgtgaactcggttgtaacggggctgggaagaaaagcagagagagaattgcagagaatcagactccttttccagggcctcagctccctccagtggtggccgccctgtactccctgacgattccactgtaactaccaatcttctacttggttaagacagttttgtatcattttgctaaaaattattggcttaaatctgtgtaaagaaaatctgtctttttattgtttcttgtctgtttttgcagtcttacaaaaaaaatgttgactaaggaattctgagacaggctggcttggagttagtgtatgaggtggagtcgggcagggagaaggtgcaggtggatctcaagggtgtgtgctgtgtttgttttgcagtgttttattgtccgctttggagaggagatttctcatcaaaagtccgtggtgtgtgtgtgtgcccgtgtgtggtgggacctcttcaacctgattttggcgtctcaccctccctcctcccgtaattgacatgcctgctgtcaggaactcttgaggccctcggagagcagttagggaccgcaggctgccgcggggcaggggtgcagtgggtgttaccaggcaaagcactgcgcgcttcttccccaggaggtgggcaggcagctgagagcttggaagcagaggctttgagaccctagcaggacaattgggagtcccaggattcaaggtggaagatgcgtttctggtcccttgggagaggactgtgaaccgagaggtggttactgtagtgtttgttgccttgctgcctttgcactcagtccattttctcagcactcaatgctcctgtgcggattggcactccgtctgtatgaatgcctgtgcttaaaaccaggagcggggctgtccttgccacgtgccaagactagctcagaaaagccggcaggccagaaggacccaccctgaggtgccaaggagcaggtgactctcccaaccggacccagaaccttcacggccagaaagtagagtctgcgctgtgaccttctgttgggcgcgtgtctgttggtcagaagtgaagcagcgtgcgtggggccgagtcccaccagaaggcaggtggcctccgtgagctggtgctgccccaggctccatgctgctgtgccctgaggttcccaggatgccttctcgcctctcactccgcagcacttgggcggtagccagtggccatgtgctcccaaccccaatgcgcagggcagtctgtgttcgtgggcacttcggctggaccccatcacgatggacgatgttccctttggactctagggcttcgaaggtgtgcaccttggttctcccttctcctccccagagttccccggatgccataactggc

SEQ ID NO: 11034 - DNA, 1195 bp, Homo sapiens
atctggatagtgcagcacagatccggctgccggctgctggccacgccaccacacctgcacaggctgttggaggctgcagggtccggaccctgagtgtactcctcgtccgaccaaacgctctcatccccaccccgctttcctccccagctgtcaccatttggggcctgtctttggcctccgatggttcctgtccctctcctctttctgcacgtgttagtgagcatgttcacagagcagcagggggtagctgctgcccatttggaagtttaaggaagttctgagcccacagggagatgccatggcgagtggggttttttcgattgttgggggagctgagaggcctggctctgaccccttgtggggatgatgctgtcatcccatgaggagaaacgtgcagcctgtggggggctttgcaggcagtctcgtcccagtgccctttggtaggtattttctcacgtggccggggcagcctaggacctagggttgctttctgccaaagctggttccattccggcctcacctcctgcctcctcagggtgccagccgggccgccgatgacgccgagcgggagcgcagggaccgagaggagcggctgagacactcgcggaacccggctacccgcggcctcccttccacagcctccggccgcctgcgggggacgcaggaagtggctccccccacacccctcacccctacctcacacacgggtgagtgcccccctcccagcgctctggggctggctctggggtgacttcttgtgtcttggggttggtggggacaacagggtacttggtggtggacactaagtgccctgtgtcaggcgatgctcgctcctgagggtggatgagccaggctgcccaggcgcctttagaaatgccggcacctgctggtgtgcgtgattcctcccgcatctcacgttcctcccctgtgagccccttgacctcgctcccatgtccctttgtgtccctccggccggatctgagtgttggtggccatcggccacagccaggtcctgactgtccaggcagcccagggtcctctctggccacagcctctcatagaaagccccgagtgagaggcagcagacgggggcggcccactccgtttctctccctgtcctcagctaacacctccccccggcccgtctccggcatggagagagagcggaaagtgagtatgcggctgcaccgcgggg

SEQ ID NO: 11035 - DNA, 1216 bp, Homo sapiens
tgtctcagagcagcgacagtgaggccggtgaccctgcaagccagagctgacagccccactgtgcctgagcccgtgcaccgcccacaggacccatggcacattcccggtgtgcctgagcccgtgcaccgcccacaggacccgtggcacattcccggtgtgcctgagcccgtgcaccgcccacaggacccgtggcacattcccggtgtgcctgagcccgtgcaccgcccacaggacccgtggcacattcccggtgtgcctgagcccgtgcaccgcccacaggacccgtggccttggcttcagttggtgcctccagccgagttggcctattgcctgctcatgctgctgcttgcacactgcatgaaacagcaggccagaccaggacatccagactttctccatcgtgaggcctgggcctgcctttctgcagccggaggtctcgccagccctggactcctgctttgggccacagcaagacctcgggcgagtggagaggcggggccaggccgggcccttgtgggtgctgatgctgcatgttgtccccgacacagcgtcctctccctggtggacatccccagcggtcaggtgcttccccaagggcagtgaggggtgaacatccagggcctacctggctgtgcacgctgcagccacactgtggaagctgcccctccccgaggacccgcctcccttgctgatgccaggatctcggcgcatagaccactctgccccagcggtcgtcacagaaaggtctctctgttcctcacactcagcttcagcataagctgtgaggccagaaaaaaggtcagctcttctagtatcgtgcagtgcttaaaaaccgggagctccagccgggcgcagtggttcatgccagtaatcccagcactttcggaggccgaggtgggaggattgcttgaggccaggagttcaagaccagcctgggcaacacagcaagatcctgtctttgtaaaaaaactaaccaaacaggaaaaactgggagattttctgcagaaattgagttccagcctctctcgaacctgggaagacctggcaggagggggctgggctctcggctacagacttctccccaccccgtaggagctgaacgccaaccatcctgacccgccagtgctcttggtctcctgagtgtacccaggtcctcccaggtgcggtgtgcaccgagcgcgcctggcctgatgccctggcctgtgagctggggact

SEQ ID NO: 11036 - DNA, 1217 bp, Homo sapiens
atggattactttggtttctccgagttccctgctaccccgtttattggaggcccctcaggcagtttcatgtggtgctatcttcataataggtgtgggattggaactttttttttctttttttttttttgagacggagtctcactctgtcacccaggctggagtgcaatggcgcaatctcagctcactgcaacctctgcctcccgggttcaagcgattctcttgccccagcctcccgagtagctgggactaacgcgcacaccaccatgcccagctaatttttgtatttttagtagagatggggtttcactatgttggccaggctggtattgaattcctgacctcctgatccacccgccttggcctcccaaagtgccaggactgcaggcatgagccaccgtgcctggcagattggaacgttttaacatgagaggagcacttccccaatttatcccttcatcctaagattgtgaaaaagtcccaaagagtgggaatggagacagactactgtattttaggtttaaaaagaaaaatccagaaagtgtcctgtgaagagctaggacccccagaggttctaatgcacatgacttgaaggtgatttgatgtgggagtgagggcagagggtggggtggctgtgcctgtggactcctgtggccctggggttgttagggcaggcagtccacagtcccagatccctgcccattttggctctttcttttacccactcatattttccttgaaaatgtttttgccagaacattaataactgtcagccttttagaatcaggagacttacgtacaaatctggattttcagcttttcttagaaaaactgtagtttctgacaacagtaggccccattcctcacagccagtcaccaccctcctcccattcctcacagccagtcaccaccctcctggaccatactcggccctgggccattcctcacagccagtcaccaccctcctcccattcctcacagccagtcaccaccctcctggaccacactcggccctgggccattcctcacagccagtcaccaccctcctggaccatactcagggccctggaggcctggcaacccaggccccaactcaaacttgtacattcagtctttcagtcggactcgcactggggcaagggtgacagacacgagaatggaaaattgagaaggctgcccgcaccagctgggtgggtgcagggggccccagctcatcatca

SEQ ID NO: 11037 - DNA, 2756 bp, Homo sapiens
cggacgctgtggccgcatggaaccttgagaacccagggacgagccagtgccgggaaggaactgccgggactcaccgagctgcacttaactgttctctttctggctattttttgttgtttgtttctttgtgttgactttgtccctggcaaaattttccactctgagtaaaacaagtctcctaagtattgtgtatgtttaaaacgacagaaccatttctacttcatttggaaaaagattcagtcttttatcacaggcccttttgaaactcagatcccaggtctctccgtggtatgtttgtatttggggtgtccctccggctctaggcggcctctgacctgctgtctactccccaccttcggtgagcggccgccatggtggagcagggtccgagccacgtcctgcagggcacgtctggggcatttcctgttttgtggtaggaaatgtccctgacctttcagaaccgaacccaatcctgaggctgactcctctacggaaaatgaggacaggacgggggtgagggaatgagagtgggaggtccctgcacctcctcgcccggctcctcaggaagaaaaccgctggcccttcccgagtgtgccggccgagggccgagggccgtgcacatggggagagggcgtcagcctgatggctgagcttttaaatgtcatcatcataacattatttatttaaatgtagttattttggtatttaatttttttttagagaggaaaaaacctgtattttcctggtgggatgaaatagggatgaaatggctcagaatggtatatttaggcaattttaaaacatttattatttacataaagaccaaatatgatgaatctgttccgtgaattgtgtcggccctcagcatggggctggggcagcgtcactgcggtgacgcccattgaaaggtatgaaatgactgcacactagctggattatcactcagccgtttaagaaataaaagcaaaaccatcacgtgactgagaccgtgtgtgtgaccgcagcaaagcgcagcgtgtggatggatcagagcccctcggtgcagctgtctgcatcttccaagcactttacagataccttggaatgtatatttttgtcttcttactcagaaggtttgcagtttgtaaaataatcaggattctgctctgtcctgtgtgtggggtcagctccctccacagagggctccagctctgttggtcacagctgatggggttctctgattgataggagacgagctcttgagctctaaggaacagtgaggtcgccggtggggagcttggctgggacaccaagcaaatgcatcgtatgtccccttggagacgtttttatgcagctgtgtatgttactatccagaaggagtcgggggtagactttcccgtgtaagctcagtccataaactggttacttctgatcctggaacgtggacttcacatgataggtctggatctgtttctgttgggatcacaggtaaggaaaatgtccattcaaatggtaaagaagggaggagggtgttttttttttttttttttgccgtaggcaccattctgcatcttgaacccagactgaagtgtgcctctcacagatggaaggtgcacacgctcctgtctcctcctcactctgccacgttcacttggctttttcattggtacctaggaatttaagaatatcgaagcgagagcagtaacaaaccatagatgagcagactcccacaccgggttttcttgcccgtctttaaggcactgtttctaaattttgaacttagctctgaatccccaagaacttgagcacagcaagggttgctgagctgctgtcgccgcagccctggcccctggtgctggagctgcagcacctttgggagaggtcctgcgtcgtcctcagctgcgtcgctgtgaactcccgctctccactgtgttcctcagtgtctgcttttcaggaagtctgctgtgacctttgcccaacttctgagctcctcagggactaggaacaatttcagtagctttgccctgaaccaaacgagaaaacaaaagggaactcccgtatgacccacgtcacgtggtgcactcagagtgtgtgcggcatgatcctcggttgctcctcctctcactttagtagagtacgcggtggacagctgatctccttcagtcgtctacccacttccgtcattgtcctccgctagaataacagagtagttggtagtcatggccagaaggggggtgggggcagtgtgaggacttggggtttctgtgctgtgtgacacaaggagataagtgacaatcttgaagtcctaacttccactattctagaaagtatagtggtgatttgtgtgcaaagatttgaagttttaaaaaagtaccaagttcctgaaattcaataaaatatttttattaattttaatggaatgcagagtatcattttcattttgattgactgactttttacttcatgctctcttctgagcacaccggaggcctagcgcattggcaagaacttaaccagggagctgcactgaggaccagcactgcaggccctgccagtgggacagcgggttgagcgtgcaggtagaaaaggcgccgtgtcacaggcagtggtaacagggtcttgattgattgatctatgatgtcggagttttaaagttacttggagattgtggctgccactatttcttctgcagactttctctccaacctgagaatgaagatcactgcaaagcatcttgagggacattttctcagaaaatgaaaaagcagctcttggcc

SEQ ID NO: 11038 - DNA, 2393 bp, Homo sapiens
ccacctgggctccatccactgagcgtcagacctaacttcccatggacgtcccagcaccgcgctgtggcaccgatggccgcccagttccccttatttctcctgtgggctcagtgtgtcccgcttacggtctgcacggccatttgggatgtcttcagcccccatccctccagtttcccccaggaaatcacagggacaggtcttccaatgtttgtatagatgaccaagaatgtttcttaaccctgtagccaacaccgggtgattagatgctcacaccaagacagtcaggattcccggccacggtgccgaccgaacgcattcagtggggaccctggggcctttcagggctttcagagcagctgcctggctccaagaggccctttgcagttcagctcagtgggactcgttgcttttaacttgagggaaagaaacacacaggtaaaatggtctccttctatcccagcaatttgtgcagacggcagctactacaaattcctgttcaaccccaagggggagtgcatccgagatgtctacgcgcagtttctagagatgaccgatgacaagctgtgactccagctgggggcgccacagcacccaccacctgccgccttcagactctcggggctggtgccagtgccccaggggcctcctgggccacgggctggaggggctgcccagggaccttggtctcgaagccatacgtggttgtctgctttcctaaggactcccatttccagtattaaagagagaatcatcatcaaggcaccgtaggtaactcagtggctgtgaccagctcgactggcggccactggctgttcccatgagttcagctgtgacgttagcttcagtggctccgccgcatcctcacactgacgggggctccatacggacctggggactgggctgagagggtggacgagttcaggtttgtttttgcagcagattccgtcgttcttactgagtctgcagcgggggagtgaacaagtgtgcagatgtaagttcttacatgataagcagattgaatacaacaccagcagcttgccttagaaaaggagaaaggaattccttttcccgcccgaacatgaagaaaaatgacctgaccctgtagagagaacacagtgtgaatgtttcccctcgtgtgagcccagcctgtggtcttctccgtacccgcaacgtggtcatctgtgcccgtgacgtcacctgtgcccgtgcgtggcgtccccgtctccgttggggccattagaatgaggcagacaccaggccactctagaagccgagccgtcacacctcaggcgtgtgcggggcggggacggggggtctcctggttacattttggattaaacctgtttcccggttatgtgtagggaacagcagagtgatgcacgaactttgaacattcgttatggggaaaacatcctttaacttcggggtcgtctgccagagcagggtctgggagggtccatgcagttcccgctggtgtggagggaaatgccctggtctggcctccgagcccccaggtccaccgtctcccctcccctcatttgtaagaatagctacacactaacattttgggaaggagaggcacataactttttttaacatttggtaactaggttatgggctctacattgtcagctacttgggatatatatttaattttcttaaattcccgttaaactctattttatggttttgatttcagattgcaaacatgtaaaacctgcatagcagcgagttctcggttttgccggtttctttagttctttactgtcactgtcatgtaatcagctaattctctgtggatgttgctgtaaagtatgcatgttcctttcatgtgtatttaatcatgatgtttaattttgcacacttatttgtaatgtttcttttaaataaaagtgactaattttgttgtagtctggacctgtaatgggaagtagaattgtgtgttatgaagccaaacactcttccccttgctgtgagaatctggttggagtgtaggcttcagaacagcctgtgggcctgaagaggcgccggcctgtgacaggacaaggtggaagccagggtcactgggtgcggagcctggagcttcactccctgtgtcgggacaggacagcctgccctcctcattccctgtgtcgggacaggacagcctgccctcctcactccctgtgtcgggacggggcggcctgccctcctcactccctgtggcgggacggggcggcctgccctcctcactccctgtggcgggacggggcggcctgccctcctcactccctgtggcgggacggggcggcctgccctcctctctccctgtgtcggggatgggacggcctgccctcctctctccctgtgtcgggacggggcggcctgccctcctctctccctgtgccccaagg

SEQ ID NO: 11039 - DNA, 1197 bp, Homo sapiens
ggtatccgtgccaagccctcaacgggccatcctccttcccgcggcgaccccgcgcatgacaaggccagaccctcccgcgaacgtgctctgcgctcccgcctggcccctccccgccccgcccctccccctcctccccgccccgcctcgctccgcccctccccgcctccgccccgccccgcccgccctgcctctccccgcctttcctcgcctcgccccgccccgccccgccccctcctccccgccccgcctcgctccgcctctccccgcctcatcccgccccgcccgccctgcctctccccgcctcatcccgccccgcccgccctgcctctccccgcctttcctcgcctcgcctcgcctcgccccgccccgcccctccccgccctgcctcgcctcgtctcgcctcgcttcggttagatgcgctcggcgctccataggctccctggtggggcgcgggcgcgcgcacggacgtccagcacgcacgcacgcacgtccagcacacacgcacatccagcacgcacgcacgtacgtccggcacttccggccgcggcggcctcagcgccggcccgaagggaccaggccgccgtccccagcgagaggcatgcagcgctgaggagcggcgacccagcacggcggcgccatgaacctcctgccgtgtaaccctcacggcaacgggctgctctacgccggcttcaaccaggaccacggtgaggaggcgcggccctgtcgccttgcccggccgggccttcccgcagcccggggtccccggctctcaggcctctcctgggcgcccctttccggccaggccttccacccgggaccccggccccgcccgagctcccctccgaagcccccggccccggccctcgccgctgctcccagcccgagccggggtccggaccaggcccgaaccggctcccaccttcctggcctttcgcgctcccccaccccccgggttgtgaccgctcccagccggccgtcccgggccgaggtcgaggtcggtgggagacggcacagaaccccagcctcctgcgcggacgcccctccccgcgcgccacgcccactcgggttccctggctccctgcgggctccacggttatcgggattttccccacagcgtgattgacgccctgcccagaaccccgttttgccccctgttcctttcagggtctttagtaggtagcccgtggctgagctgac

SEQ ID NO: 11040 - DNA, 1417 bp, Homo sapiens
gcgttgatcaatttgctgaggctccattttcctccctgcagttaaagatccctgacctgttccgtgacctggagatcatcccagccttactccacggggacctctggggtggaaacgtagcagaggattcctctgggccggtgatttttgacccagcttctttctacggccactcggaatatgagctggcaatagctggcatgtttgggggctttagcagctccttttactccgcctaccacggcaaaatccccaaggccccaggattcgagaagcgccttcagttgtatcagctctttcactacttgaaccactggaatcattttggatcggggtacagaggatcctccctgaacatcatgaggaatctggtcaagtgagcgggccttactctggaaggaggcctcagaggtttctccacagtcctcttctgggcaaattcttgtttcttcacatgctggactagcttaagaccaatgcagtagcttatttccaagccttgcaaagtatataatatctaagaggaaaggttttgtcatcccagcgttgtccactttgtggggctttgtaggtagacggagccacactacaggcagggtatgagcagagggatgtatggagtgtgggtgactctgagcctcactgctgctgcaaggtggggaaactgtaagtgaacccctgtgggtgcgggggagggtatccggtgcgcagggaggtggccagcgcccccgggcactgctgctcataggtacctttccactgcctcctccctgctctcctgtgcaggaatgtctctgagctgttcacgttgatgcttcttggttggcaagacttgggtgtagacatgaaaccatcttactaaaagcgtcttaaaatgaccaattccagaatcaagcgtattccgttttcttcctgcatgatccctgggccctcccgcaggctgagcaagtctgtaaactgattctgggagaaaccaagctgctggccatagggtgtccttgggtacatccaggagtcttcattgcttctgttattaccccgtctcctctgccattttctacagcttgctgagttgtcattcctttgcaacattaaaatacatgctgaactcatatttttccttccttcactgttgtagtaaagagacatatttcatgaatggcattgatgctaataaatcctttgcacaaaaatttgaataaacttccagtggtttcgataacgtacaagattgtatatttccctcatttattgtaattcaatatcttagttgtttgctgaaaaacttgtaatattttgtgacaaacaggtacaactagtgtttttgttgttgtttttagagacggtcttgttctgttgcctaagctgcagtgcggtggcatgatcatagctcactgcagcctcaaactcccaggtt

SEQ ID NO: 11041 - DNA, 1135 bp, Homo sapiens
cttgcagtgagcgaggttgcgccactgcactccagcctgggcaacagagcgagactccatctcaaaaaaaaaaaaaggaactcctgacctcaggtgatccgctcgtctcggcctcccaaagtgttgggattacaggtgtgaaccaccacacctggccttttttctttattcttaggtgtttttactttttatctgtttttcactttttcaaaaggccagtttgtatgtggagaggtgccagcgaagagaagctgctatactgatgtattatgatttttctttgttcattttgatgtctctcttgtctgctgagctaagttacggcggtaggtgtgtgtggtggggattccgggggggatgtggcgaggagttggtgaacggcttgcatttctggccctgagggtgatggcatttgaatggctttcataggcattgggtgggcatggagggcagtgactttgagtagattgtggccagtggcctgtgattttcaagcaagactcattcttcccgtggtttaattttttaggcttgggaaacccgctacatgcttttgctctggctctccgtgacctgcctgatcccttttgatttttctcgccttgacgggaacctcctcacccagcctgggcaagcacgaatgtccataatggaccgtattctccaaatagcagaggtaaatatcatgcagataattagctgctaattagtactcactttcatgttcatgctgtcttgatgttagtggtttactcggtaagcttctgatatgtattcaactgctgtttttttcagtggggtaaaatcccataggataacttattttgaaattgtgataattcatgtaggggtcaggttgagttagcaaatctcatttctttgtagatgatgcaaatactctgttgagggtaatcatggcagataaggaagggtttagtggcatggtgagagagaataaggacccattttacatttagttcttaacgttatataaataatagatgctcatttgtaggagaactagaaaataaagataagcaagaaaaatactaaatttaaatttatgaaattctagtgccaagagataagttgtttattttctccgaacttttcctgatgtaaatattatgcatat

SEQ ID NO: 11042 - DNA, 1149 bp, Homo sapiens
gacaatgcaggttccccatgtgggtgtgaagagggctacacgttgctgccttttgaggggcattcgggaggcaggatctgtaggaactggtgaccggtgagacgcagcacctggtgatgaaggggcggtgtgtggcctgggcggtggcagtggtggccgttcaggaaggggctgccaggaggcagagggtcccgaaggccgggtgcttccccagggaaggcgctggtcctgtcgtctgtgtacccatcatctgccttctctcctgactttccctaatcaaagctggacactagctgaggatgttctggactcggggcgtgttttgtggcccacaccaggatcttcctggcagtttgtgctgatggcactgcctccaggttctcccttcttatccggtctctgcaaagtgcatggaattttcacaggcacgctttaagattcaaagtgacactgaatgactggttccagtcatcaggatgctgtgagctacaaagctgatctgaggatgctttgctttgcacaggtaccagcgtggctgccgatctttggctgcaaatctgcagctcctcactcagggtcagagtgagcagaagccactcatcctgaccgaagatgacgacgaagatgacgacgtcccagagggggtggagcgtgtgataggtgcgtggggtctaagcggcggcctctgctcttgggcaccgtcgggccaattcccctctactccaggaccacacttccttcttccttgctggtgccggcactgtctggccacccgtccccttcgctgagtgcacggtcactgcccgtcctctggctcctgaacccaggcctgtccctgaccatggacagtctcttcctgtgtgccgtagaagccctttttcccaccgcctcgcctccttcctgacctgggctgcctgttctgggcagctgggtgtgtcctcaggaaacagttctcccaggaaattgagttggggtccctggggctcaggtctctggctccttggcccctaaaccctgctcagttccttacctcaggagccatttcaaactcccttaaaccacattacaccttgcaggggtctccatccactgccctgttctcctcctgtggggtctcctgctgcacagagacagagccatcagcggagc

SEQ ID NO: 11043 - DNA, 1105 bp, Homo sapiens
aaagagcaaacagtatttacactcggaggaatccacaacaacgtaaattatttgatgccttgtaagaattgaacagtatctaaaagtcttcccatattgtcatcaaattgtgtctcagtggtataaacccattgatgtactgtatattgcctcttaggtagtgctagtttttaaaaggcttactggtgtgattctatattgcagaaataaaatttttaaaactaatgtttggtcttctgttatgttctttcttagcgacttcaggaagaaatcaccaaacagtctccaacgttgcaaagaaatgccttgtatatcaaatctgtaagttatgcagtcctttcgaagccaaattccgcttcactgaaatatttccagttaattaattttatccagtcttaatttttaccaccaaataattaaaacttgtatggtattttgatgtaatgggatttctttacattttgtctcctcagtccaagatcagccggctgcctgcttacttgaccattcagatggttcgatttttttataaagagaaggaatctgtgaatgccaaagttcttaaggttagtaatgaactttactttgtataagaaatgtaattctttgaaggtaattgctaactcacaattgctttcattattcctttaggaatagttaagctttctttgaaatatttaggggagctaatattagacaagtgattcttaactcagaacgtatattagaattatctattgtcttttttatttttaactgtacacacacctggcttctccctcacccccaaacatctgggtaggtcttcggtggggcctaggatattatatttttcaaaagattcatatacaattctgatggctctcctgcactacccagaaatagtgccctagaccacgtcctcagcttcagggatactgattcagtaggcttggagatgggtgtgaggtagggagtgataactctgcactatactctaggtggtttctttctttttttttttgagacggagtctcgctctgtcacccaggctggagtgcagtggcgctatcttggctcactgcaagctctgcctcctgggttcatgccattctccagcctcaac

SEQ ID NO: 11044 - DNA, 2274 bp, Homo sapiens
cggctttctggtggtggagactggcatatcgcttacgttctactctatgggcctcgcagagttgaaataatggaagaggaaagtgaacagtaatcttcattttagtatttatgcttagatgtgaaaataaatgttatttgttgatcatttctataatccagagctttagaggaagacacataggtgggtttatgtttcacctcatttggaacaaaagaggacagaagcagaccactctgtgcaccaacctaaaaaattacagagaagagaaaattatctttggattgtgctgccctatataaaggtggcagaaagacatttttaaaaagcttattatttcttgcattattttaaaaagttcagagttgaaatgcctttcaaccatttccttctgtggtcatttttcttgctgcctttttcacccaagattcagcagtcagatgtttactgcacacctattacctattatttgctgttcttgcatggttcaaaccaccattctgtagccacccatcctttgccttatctaacaaacatttttccaggaaggtggaaaaggaagtgttgctctcattgtgtgactcagtgctgctgtccatcccatggaaacatgggcacaatcaagtatttgtccagcctattgcaggcttttcctgactttaaaataaattgtgatcaataatagtacctttgattatacatttattattgtgtctctctctgatgtactgtggattgtacatttaactttggaatggctttgtaataatcagtcttaagaaaatgttgacaagctctggttgcttatttttagaaaatgaggacatttaataataataaaaaaaaagggattaatagcttttgacctcaagtcttttgtcttctgagtgttggagcttggctgaagacatgtttaatactgtacaatttctgaagatggttattaacactgtgctgttaagcatccatttaaaaatatttgttatcttctttgcctgcctgtattttaaaaagaaatacaaagttgtaaaagtaatggatttctttggatgctgaatgcagtgatgttatcagtcagattctttccttggctcagttgtgtttgtatttcctttcttaattccccaaatcttggctgggcacggtggctcacgcctgtaatcccagcactttgggaggctgaggcaggtggttcactggaggttgagttcgagaccagcctggccacatggtgaaaccctgtctctactaaagatataaaaattagctggatgtggtggtgcacacctgtgatcccagctacttgggaggctgaggtgggagaattgcttgaacctggaaggcagaagttgcagtgagctgagatcacaccactgcactccagcctgggtgacagagagactctgtctcaaaaaaaaaaagaaaaaattcccaaatcttaatgtctgtttcagaattttagtgattttaaagtgatagtagaaaataccaagcatatgaggtatttcaatatgataggcttcttacattttaatagttactcatctttgttccaggacccttgactgatgctagggaaaggataaagcatagaataccagccagtttggctctgattttgagttatttataataaagtttggggattatcataacatctcatatctttgtgtatgttgttttaatgctcggcagagcacaacactgatgataactattaaaaatagaaaataacagccattttactttcaaatctgatgtgatgcaatctgtgaacactaggaggggataaaataagcattgcagggaaacttatttgtaaatagcttcctcacctaaactttgacttggcaatcaatactttctactttgtggaggggattaagaatagaatgggcaggatgagaccatgaaaattataatgattcatgtatatttgtatgatgcttgtaactttgcaaagtcttttttattcattgtctcatttggtcagaacaattttattgaggacatgaatttaacaattagaatttagattttctgactgtagctactaaatgttgtagctactagaccaggtgagctaggtttagagcaaagtatataagccttgtatggactatattagaattttaaaaattgtaattaattccttatcatcattataaaaagcttgatttttttatttgatctaaaaaagcattattccaaagaattttttcaagtagaaatgggagttagttataccagtgttgtttttaactaataaggcta

SEQ ID NO: 11045 - DNA, 1208 bp, Homo sapiens
agggtgtgttcacatatatctcagttgaatgtcacaagaatccctgaagtgattaaaagtcttgagaggtcaggcaatttttgtaaggctagaaggaaaagtgaggttttagacttcatttcttttaaagttggcaaacaaacattttctgtaatggacaagatagatagattagatagatagatagatagatagatgatgattgattgatgattgatagtaaattatttcaggctttgcaggctataaagtgctgcagctccttagctttgctgttgttatagtgtagctggagccatagacagttagttagttagttatgagtgagcacagctgggtgccagtacaattttaatgatcaagactcgtggcaggcagaacaaaccatcatttgttgatcctctgcttgaaagcacgaataagtgagaacagagcagtcatatggtttcagaaagtgttattctgggatttcaggataaattttgtaaaactactaacaaacaacacacaggaaactaatttggtataagaaacgacatatccctaaatagtgcttatttaacttcattataaatacatctacttaacaaaaaaatatattttgtgatcttgaggtcacttcgtttaggtcattatctcaacccaacctccccaaactctggtttgagccaatatgtgttctattgttctcagagcaccagccgactgtacaacaattgttataaaaatgtttattgtttaccaaaaccagtggacctcttatcaaatgctgcttggtaacaaaatctatcacagttttaataaaaagaaaaaaaaaagaagctaactatttgtctcattgtcattagttagactttctgcaaggtcacttaatccagacttattcagtgcattaatcagattctcaggtgttgcatgaactccctcttgatcttgccaggcaaccaggagctgcttagctctcatcttcatgtcttcactgtcacactcaatctgcctaatttctgagtctttcatttccaagtagggagccagaatcttccattgttcacccagcttgttggcaaatacctctatttgttctcctgttacaggtttgtctcgccgaacatcaggacctagaaaatgaagagaatataaattatgcgcaattctaagtatacaacagaaatggaaagctatggggccaataagttttattaaccacc

SEQ ID NO: 11046 - DNA, 1164 bp, Homo sapiens
ctatatgttactgttaaattttggtaacttcatattagaaaatattgttttctataagaaatattgtattccatatttctgatagtcaatttaatatcagagtacatgtttttactgttaatcgagtttagtctgaactcttgcccctaaattaaattgtttctcctctgttggtagataaatcattcatcatgtgaaaacgttttagctattatttctcttgctattgggggagtaactgaaggtaagtatggttccgttttgttttgtttaaagtaatcttggacatgacatgctttatttaaaacgtcttctccccatacttctccacctatctgattttgtttattcttcaagttctgcctgactcccaactttgccaagaagtcccagttgaattagttcactcttatttctcatctctattatgcagtgcacattttggcacttcctttgttctccagttgttttgttcattcagtaaattttcattgagcatctactatgtgcctggtactgagctaggacctggagattcaatggtgaataaaacatattcccctgcttatgtggagctaatggaagaaacagatgtatgcatgccttactatggtgtaagtactatggtcgaagtgggaatgaagtgtagttagagggaatagagccaacatggctctctaaacttcagtctaaaggagtcaggagaggttttagaaaagaacatgagaactagaatgtgaggtatgaagaatttgttagacatactaagaaaggaatagctagagaattgtgtacagcaggaggaggagaggacaatgagaatgatgaggaaagaagcaggttaggtccatttataaagggcactgggtgccatactaaagagcagctgcaggccgggcgcggtggctcacgcctgtaatcccagcactttgggaggctgagacgggcggatcatgaggtcaggagatcgagaccatcctggctaacacgatgaaaccccgtctctactaaaaataaaaaaattagccgggcgcggtgtcgggcgcctgtagtcccagctactcaggaggccgaggcaggagaatggtgtgaacccgggaggcggagcttgcagtgagctgagctcgagccactgcactccagcctgggcaacagagcaagact

SEQ ID NO: 11047 - DNA, 3729 bp, Homo sapiens
cttttgaagacattagtattaaaaataagatataagatggaatgaaaaattagacatgttaaaacatagattagcattttctaagctcttcttgatattctcatgtttaaaatttattttgttgctttgttaaaagaattgtttcactaaataatatactttgaatgagttagtggctagggggtttgttatgttttcctagtggtagttaggaccattgttctttaatgttttaatcttgtgtattaggtatggtgaaccgtgaagtattagaacaagtggagcgaggatacaggatgccgtgccctcagggctgtccagaatccctccatgaattgatgaatctgtgttggaagaaggaccctgatgaaagaccaacatttgaatatattcagtccttcttggaagactacttcactgctacagagccacagtaccagccaggagaaaatttataattcaagtagcctattttatatgcacaaatctgccaaaatataaagaacttgtgtagattttctacaggaatcaaaagaagaaaatcttctttactctgcatgtttttaatggtaaactggaatcccagatatggttgcacaaaaccacttttttttccccaagtattaaactctaatgtaccaatgatgaatttatcagcgtatttcagggtccaaacaaaatagagctaagatactgatgacagtgtgggtgacagcatggtaatgaaggacagtgaggctcctgcttatttataaatcatttcctttctttttttccccaaagtcagaattgctcaaagaaaattatttattgttacagataaaacttgagagataaaaagctataccataataaaatctaaaattaaggaatatcatgggaccaaataattccattccagttttttaaagtttcttgcatttattattctcaaaagttttttctaagttaaacagtcagtatgcaatcttaatatatgctttcttttgcatggacatgggccaggtttttcaaaaggaatataaacaggatctcaaacttgattaaatgttagaccacagaagtggaatttgaaagtataatgcagtacattaatattcatgttcatggaactgaaagaataagaactttttcacttcagtccttttctgaagagtttgacttagaataatgaaggtaactagaaagtgagttaatcttgtatgaggttgcattgattttttaaggcaatatataattgaaactactgtccaatcaaaggggaaatgttttgatctttagatagcatgcaaagtaagacccagcattttaaaagccctttttaaaaactagacttcgtactgtgagtattgcttatatgtccttatggggatgggtgccacaaatagaaaatatgaccagatcagggacttgaatgcacttttgctcatggtgaatatagatgaacagagaggaaaatgtatttaaaagaaatacgagaaaagaaagtgaaagttttacaagttagagggatggaaggtaatgtttaatgttgatgtcatggagtgacagaatggctttgctggcactcagagctcctcacttagctatattctgagactttgaagagttataaagtataactataaaactaatttttcttacacactaaatgggtatttgttcaaaataatgaagttatggcttcacattcattgcagtgggatatggtttttatgtaaaacatttttagaactccagttttcaaatcatgtttgaatctacattcacttttttttgttttcttttttgagacggagtctcgctctgtcgcccaggctggagtgcagtggcgcgatctcggctcactgcaagctctgcctcccaggttcacaccattctcctgcctcagcctcccgagtagctgggactacaggtgcccaccaccacgcctggctagttttttgtatttttagtagagacgcagtttcaccgtgttagccaggatagtctcgatctcctgaccttgtgatctgcccgcctcggcctcccaaagtgctgggattacaggcgtgagccaccgcgcccagcctacattcacttctaaagtctatgtaatggtggtcattttttcccttttagaatacattaaatggttgatttggggaggaaaacttattctgaatattaacggtggtgaaaaggggacagtttttaccctaaagtgcaaaagtgaaacatacaaaataagactaatttttaagagtaactcagtaatttcaaaatacagatttgaatagcagcattagtggtttgagtgtctagcaaaggaaaaattgatgaataaaatgaaggtctggtgtatatgttttaaaatactctcatatagtcacactttaaattaagccttatattaggcccctctattttcaggatataattcttaactatcattatttacctgattttaatcatcagattcgaaattctgtgccatggcatatatgttcaaattcaaaccatttttaaaatgtgaagatggacttcatgcaagttggcagtggttctggtactaaaaattgtggttgttttttctgtttacgtaacctgcttagtattgacactctctaccaagagggtcttcctaagaagagtgctgtcattatttcctcttatcaacaacttgtgacatgagattttttaagggctttatgtgaactatgatattgtaatttttctaagcatattcaaaagggtgacaaaattacgtttatgtactaaatctaatcaggaaagtaaggcaggaaaagttgatggtattcattaggttttaactgaatggagcagttccttatataataacaattgtatagtagggataaaacactaacttaatgtgtattcattttaaattgttctgtatttttaaattgccaagaaaaacaactttgtaaatttggagatattttccaacagcttttcgtcttcagtgtcttaatgtggaagttaacccttaccaaaaaaggaagttggcaaaaacagccttctagcacacttttttaaatgaataatggtagcctaaacttaatatttttataaagtattgtaatattgttttgtggataattgaaataaaaagttctcattgaatgcacctattaatcgttttagttgctattcatattctcattcgttttttaaaaactgatatattctgaatttattcttccattgagaaaaaaatgttcagttacttgtaactactgagcagaatttaatcaatcctttattaaattcagaacattattgaactcattctttgtggtcaattttcttttttttttgttttgttttgttttttttttgagacggagtctcgctctgtcgcccaggctggagtgcagtggcgcgatcttggctcactgcaagctccgcctcccggggtcacgccattctcctgcctcggccacccgagtagctgggactacaggcgcctgctaccacgcccggctaattttttgtattttttagtagagacggggtttcaccatgttagccaggatggtctcgatctcctgacctcgtgatccgtccgcttcggcctcccaaagtgctgggattacaggcgtgagccaccgcgcccggcctgtggtcaattttctatgtcaagtgagtgacattatttttacaagtattttcttcttcttaaaattataccagcaaatacagttaatgcagaaacctaagtaa

SEQ ID NO: 11048 - DNA, 1205 bp, Homo sapiens
agagtaatgttaggttttattttttttgaggctgagtctcgctctgtttcccaggctggagtgcagtggcacaatcttggctcactgcaacctttgcctcctgggttcaagtgattttcctgcctcagcctcccaagtagctgggactacaggtatgtgccaccacacccagctaatgtttgtatttttaatagagacagggtttcaccgtgttggccaggctgatctcgaactcatgacctcaaatgatccacctgcctcggcctcccaaattaatgggattataggtgtgggccaccgcacccagccagtgttagatttttgaaatctgaatttagcctgcatttttattatgttttctggttttcctgttatcttctagactataccctgttaccatcatctccttctaaaataatatgattttcagtgacacaatttgatattaaccataattgtcttctctctgcttccctttgtatcgtatgtcttgtgttttttgtttttctctttccaagattgctgatggtatggcatatattgaaagaatgaactatattcaccgagatcttcgggctgctaatattcttgtaggagaaaatcttgtgtgcaaaatagcagactttggtttagcaaggttaattgaagacaatgaatacacagcaagacaaggtaaaattacttttacataaaagcttgtaatgtgttgtgtgttttgcttaactctcttgactatacagggttttccagaataagaattgttttagcttccctcagaagagtcatagagacattgatttcattcataaaatcatgtactgctgtggctttctgatagttatttcctccaagaaagaacttgactaggtatcctttgcattatacatagagcaagtagtagcctctttacacttcttttgacatgacaacaaatatattttaatttctttcctagaaaggccagaggttctcagtcagaggagatattgccctgtaccgccactcaccaggggacatctgacaatgtctacagacttttttggtggttacaacctgggggctactgcttgacatctagtgggtagaggccaggtatactgctgaacctcctacagtgtacagaaatgtgcaggcaaacccccccttccccccacaacagaattatcaggcccaaaatggtagcggtgctgagattgagaaaccct

SEQ ID NO: 11049 - DNA, 1149 bp, Homo sapiens
ggctagagtgcagtggcgcaattttggctcactgcaacctctgcctcctgggttcatgcgatccatctgcctcagcttccttagtagctgagactacaggcatgcaccaccatgcccggctaacttttgtatttttagtagagacagtgtttcactgtattggccaggctagtctcgaactcctgacctcgtgattcatctgcctcaacctcccaaagtgctgggattacagacgtgagacaccttgcccggccttaaaaataaattttacaaaatgtttcacttatgtatatttcatgttttgctgcttatggacaactccctttttgttttgtgcttttagagtaaaactcgaaaggacttctgtttttgtttttctacagtttaaacttaaaacattgatacactatatgccccttaatttttgtaattgatattacagtatagtttattcatttatctagaacatgctgatggtttatgccacaagttgacaactgtgtgtccaactgtgaaacctcagactcaaggtctagcaaaagatgcttgggaaatccctcgagaatctttgcgactagaggttaaactaggacaaggatgtttcggcgaagtgtggatgggtaagaagcctgaatttttgttttctgtcattgtttagctgtggattaaagtgcaacaatttatgataaaatatgtttcaatatttaagagaagtgctgttcactgaagtttggtctaaaatcctttaaaatataaattcctaaaatgtgttatttctttaggaacatggaatggaaccacgaaagtagcaatcaaaacactaaaaccaggtacaatgatgccagaagctttccttcaagaagctcagataatgaaaaaattaagacatgataaacttgttccactatatgctgttgtttctgaagaaccaatttacattgtcactgaatttatgtcaaaaggtatgtattagtatctccttaggtatttgtgttgataatgtttttaagagtcttgatttgtatgcatatagacttatactgttttctaatttaagatttttatgtagacatatttggatagaagaaacctgacactttgtttaatggaatagtgattatccagttattccagaggatagtatgacgt

SEQ ID NO: 11050 - DNA, 1105 bp, Homo sapiens
agcagacactgtcattttattcacaaaaccttattaaattaaacccacacatatttagagttactaataatttgggtatgatatgcctgtgtcttactgaatgcagatgatgatgctgttaccagggaaccacttctattcttcctgtcatagtcttaatatttccatttgtcactgacagaaagggtctgttattttgctgcctttccctctctactgttcctgtgactgtcaggtggagttttgagagacacattgagtagttaatatatagaaatactgtaagagtatattctaacagtaatatttgtgatattactatttaatcaataaaactcttacattttcctgtattttgagccatgttctctagctattctttgtcgtccaaacctatcccagtccattcttactgacacttctgtataatttttctgaacctcatacttttcaattcaaaacacttaatttttttccagatggtattttggcaaaatggggagaaaagatgctgaaagattacttttgaatcctggaaatcaacgaggtattttcttagtaagagagagtgaaacaactaaaggtatgaatattgttatattagtataagtataaaatttcttggggcagtattttgagaaagatatagtgaaagtatttatttttcacccaggtgcttattccctttctattcgtgattgggatgagataaggggtgacaatgtgaaacactacaaaattaggaaacttgacaatggtggatactatatcacaaccagagcacaatttgatactctgcagaaattggtgaaacactacacaggtatgtgaatatttcaaaggtaaaaattatttcttcatattctagtttatgaggacaaaatccatatcctcatttctcttaagatttaacacacttatttacacataatacatgcccaataaatgtctgttgtattctaaagggaggaacaggtaatacttagtacttgcattgtgctactcagataatgtgctaatagactctcatcatttgggtccttatatcttactggcatagtatttacattggagttcatttcaccacatgtaccttatgaaaata

SEQ ID NO: 11051 - DNA, 1420 bp, Homo sapiens
gagtatttctggggacaatacaagtacctgggcatgaatttccatttcgattcagatgggactggaaacaaccattcaattttatgaatcttactggacattatggatttactggaattattccagacattatgccctttggttgtcactaccttgcaaatgtgtaagaggaaaatgtgctaatgtggcagtgactgtaaaactggcacatggcatttattaatcctgaagaaaagtacatgtactatttttcagtataaatataatgaacatgtcagaactatttcttgaaaacctttttattacttttgcgtgaatttatttaacaaagatgttttgtcttttgtgtaagggaggttctagaggctagatgtttaattgtaaatatgtgaggaaactcaatgcagaattcaggataaaaattttaaaagcacaggtatttgggaattgaaatgttaagatacccagaacaacattaaatcaatgagtgaacttgtgacagtggtagcatttcaaatttcaaaagacttatcctgtgtgtgtgtgtgtgtgtatatatatatatatatataaatatatatatataaaatattcagcagcaccaagttttataactattgtttgtttgactttattaatactagaatatgtagtctcagccttaattttacatttacattattttgtaattttttattactatttttaaggggttaaagagaacatacattctcacattagtgtactttctggtagaaagttgctgcaaaaacatttgaaatgtatattaacctaatgtatgtcatatatatgtctttgtgtaagttcaagactattgatctgtgaagttattttgtaaggacatacatttggtaagtaagtttgtgtcccaggaaatgtatgtgtttttaaaccctttctaaatatgcaggccattaataaataagattgtttcttccctactgaatagataagtgtttttcttttttaaaattggaagcttcataaaagttatcttgttaaaaaacgatgatgatgttaacctatctatctttataattggaaattatttaaactgtttgttgttacagaagaaacaaaatggtaattacagaattagctgtggggaagattggctcccatggtactacaggttgagtatcccttattcaaaatggttgggacctgaagtgttttggattttggttttttgtggggtttttaaattattattttggaatatttgcattatatttaccaatttagcatccctaatccaaaaatctttcattagaaattggaaatgcttcaatgagcatttcccttatgtgtcatatctgcgctcaaatgttttgaattttggaacatttcttgtttctgacttttagattagggatactcaccccgtaccaatatttgg

SEQ ID NO: 11052 - DNA, 1155 bp, Homo sapiens
cagaatgatagagcaaatgatagagcggagcagtgctgctaagcagctaggcatttttctaggcacttctctgctgaggctgttttaagtaggtggacaccctgtagttcatatatttgcatgtttatagtttgtaacatacagaacatgcttagtcaagtatagatattctttgtaattaaccctcagaatagtatgtattctgatcccttgttctttattctccaggcaccatacaggaagattacttgagagagctgctgacaaccatgggggatcggtttacagatgaggaagtggatgagctgtacagagaagcacctattgataaaaaggggaatttcaattacatcgagttcacacgcatcctgaaacatggagccaaagacaaagatgactgaaataacttcaaattccagccaaacgttccttgttgccactttgggtattctgagattttctcttgcatgcccttagctttacagcttttgcatttcctgttgtatttattctcagccattttgggcatatgtatctttataatcagactggaaacgggactttctattaatatcattttcagaataaaaaataggataatttaacctaccagcccttctcccccaataactgtggtctatacagagtcaatatattttttcagagaaagttattcgctcgattttttctgaatcataattaaactttatgataaaatacttacttgtttaaacttcttatttaccaaacttggcttttgttggtttcagtcgtatctcccaaagaaaggtagatgagggaaatcctagaaaatgatatggttgttagctttctcttcctccagttttcctaacaatcctatctcctctactatccattcctcctcctcctcccaaggatatccaattttaactgccctaatcaggttttctgcactttgtcttccaatttttaaaataatttcctgtagaatttgcatatatgatagtttccatagctttaagtccttaagttgacatacctgccaacatttccactttatttaaacttttgtaatttctggtcatttaaaattagaccaggttactgagtataatttcaatttgtcatatttttaaaaaccattttggcttaaaggttctgtggaatgctacc

SEQ ID NO: 11053 - DNA, 1163 bp, Homo sapiens
agcgtgacaagtgtctgtccgcaacgtgtcagatttcgaaactgccttgcaatccagtccggaactcgcagctttagcccgggggaacagacgttcgtttaggctgtgtctcatcattcccccccgccccacccccgccgacctcccactgtcgctgctggaggaagagccccgggaggagaagggtgcgccgcgccgcgcccgcgtgtcaatggcagccgcgcattctggaagaagttggttcttgtctcgaatacttttcctcccgtgccccgccccttgaatcagaggcggctgtctcgtgcggctagagcagggccagtagagttcggggcagctgtcaaaaacgagacggggaggcttttcttcccgggggtggaggagggaaggagggaggtgtccttttttccatctgttgcagtttccgaaccaaacgcaccctcgccagccccgggaagaaaggcccaagggagaaacctggggcgctcggctggtgcccccaccgccgggcgagggatgcgggcggtccgtgcgcggcaggcggaaaggatcgtgtttctggacccggccaccccccgcgtccgcaccgccgcccccgagggacgagtgacagcggccgccgcgctcggtccagtcttcccggctggaaggtgcgggggaggggcggaggagcggcggggcgggagggggacggggcgggcggctgggggcggaggcaggacctcctgtaccttccctcctcgcctctctcactctgacagcgccgaggtgcgccgagcaggagcagggaacaaaggagcggagaggggaggggagagagttgggcgagggagagcccccggccggctgccagaagatcccggcgggaggaagcccaagtgtcacttgaattccacccaaggagcgggcgcctgggatcagagcgtcctgtttagcaataacggctggagcacgtcctacaagttacgggagagtcggctgtgaaggagacgttcgcttatcccctgtgtccccgctcctggcccctccagacccccgccttgcctcgcgctgggaggggagatccagaatgaaaggcaagaaaggtaaggcggccgcgggctgcgcgcaccagaagacgcgagtccggggaaacgtgctggccgggccgcgccgcgcggagt

SEQ ID NO: 11054 - DNA, 1299 bp, Homo sapiens
cttcatgccagctctagaggagaccccatttcattcctgtacagctgggccaaacccaaccctagggaggccactgtctcctaagccgtcatccccgggatcagttttggctcgtccatcagtgatctgccataccactgtgactgcattgaaagatgtccctttctctctctgccagtcggtcggtgtgggacaaaacacagatatacagcagatagcggccaaaaacttcacagacacctctctcatgtacccagaggacacttgtaaatctggaccaagtacgaatacacagagtggtcttttcaacactcctccccctactccaccggacctcaaccaggacttcagtggatttcagcttctagtggatgttgcactcaaacgggctgcagagatggagcttcaggcaaaacttacagcttaacccattttcaagcaaaacagttctcagaaatgtcatgattgccggggtgaaggcaagagatgaattgcattattttatatattttttattaatatttgcacatgggattgctaaaacagcttcctgttactgagatgtcttcaatggaatacagtcattccaagaactataaacttaaagctactgtagaaacaaagggttttcttttttaaatgtttcttggtagattattcataatgtgagatggttcccaatatcatgtgattttttttttcctccccttccctttttttgttattttttcagactgtgcaatacttagagaacctatagcatcttctcattcccatgtggaacaggatgcccacatactgtctaattaataaattttccattttttttcaaacaagtatgaatctagttggttgatgccttttttttcatgacataataaagtattttctttaaaaattgttgtaattcagagtatttctgttgagggaggtgcttcttaaaaataagtaggaatatagcaccccagtgagcaggaagctgggggggtagggtgcagtgttagggggtgtcaccagctctttgaaaacctgtggacaacaagccagtttgcataaacaggatgtgtgatatttactcttgataggaggcatagcaggcccttagagctttacttaaactgcatggcaaattgaaatgaatcattttagtgtttagctagccactaaatcccttgctgatctgtcctgcgtagtttaaaacgtggccatgttataaagaaaagtcttgaagcatccggttattgctgagttttcagaagaaaacaacgcaagcaatctcttgccctttttccacgttac

SEQ ID NO: 11055 - DNA, 1172 bp, Homo sapiens
catagtcacctgccatgcaagatctcatggggccatgagcgtttctgagagggctttgaatgctgaatgcagcagtcgagcgacttgcacaacttggtgatgtgataaaatgtttaagagatttcatatattagtaagttttctaacatcggtttaagaaacaaattgatgagtggcatctcttaaaagagaaatataaaaaatactcattttactcaaatgaataatatattttggacgatagcaaaaaaaataaaacagatttcttccatgagcttcagccacttgggcgttgttgtaattacttaagagaaagcatgtaattggcagtgacttaacgctggaatgtcatggcatcttgtccaaacgagcattctaacttccaggatactttttttgtgtccttgatctgagaaaatctttcagttgttttcaaatgagtaactaatcaaatgtcttttttgcaggaataacttagcttgcacatgaatgcagtcatgcaaaccgttaggaaaaccagagcctatatggagttccctcttctaacccaactgacttgtatctgtccgtggaaaatttcagtccagaagaattgaccttgaccattaataaagacactggcagagagatcttcccataataaagcaatctgattcagcatcactaaaccgataatgcatgaagcaacgataaaattacaaaagagcagcatttttaattttcacaaaatgtctcagttttcagctatacctgcacgttcataaccaacaatataaaccgtggtctcatgtaacacataaacaattcatgcctttcatagtttattattattaaagtctaaacaaaattgcaatttcttaggtaaccttatatttacaataaatgaagattaccctcaaatgctagaagctgtctaggtccgtccggtgtgtcagattttcctcagattagatgtgccaataaccaagtttattcagtaaacaacttgtacttgtttcatctggttttattactctcacccataaacagtaatgactctctgaccctctggaaatatgtaatgcttccaatcttgctttgtgtatctcatttaatttgttataaggtagtactgattttagcatattaatgcgatttcttccttgttgtttgctttggtctgtgttcaatcc

SEQ ID NO: 11056 - DNA, 1223 bp, Homo sapiens
atagccttcatttctaccctgcaaaataatccagatctgctttctaaaatgaatcagtttctaaagtgaaacatgcaatatttatgctctgactgactcctgaattggaagaggaagaacttctgtttacagaaaactgtattgttatatatgtcaggctgtgtattgtgactatcagcattctggtgcaaatgaacttttctccatcatcgactgtggaaaattgatacttttaaagcatattcttctatgagcacaggtcctcctagtgaagcttagtttgacaaagggtgtcatatgctttcctaacctgatttgtagttaacattcacagagcctacattttctcattacggttatgatgctcagtatctttccaagtgccaggcacgggcttccttttctgatcaaacataccattttttatatttcacaactatagacagtcacttctgcagtcccaatttaaaaatgcagaactgctttatccaagaatgctgaaaaatactgttctatccaggtttcctaaactataaaagcagattttgcttttgtttgttaatcataggcatggccgagcattgtggattagcctgaggcttaaaatcagatgcatgtctggtaagatgaccactgtctcactatcaagagcctgcagagccattttccagacctgtgattgcccagaacacatagtccccacgtttctaatttggagcaaatctaaaaggtgctgagggattggacagctctgactttcctcgagactatggatatagtccttctcagattagctggaaatggggacagagttctcatttatcccagatatatacattggcttttttggaatctatagattgagattttgatgaatttatattggttttaatgagacccaaatgactctctcttaacaattcaagcagtagacaaagttgctcacaaatacagaaaacatctttttgtctacttcgcaagtctcaaaacgtgataatatttaagcccatttgtagaagaaatcttgtatatactattattacaccttgatatctatacaaaacatcacttgtattaaaatatatagataactttctggcatttagaattttgttccattcatttaatttgttcatctgagaatttttttttttgcctgaaaacccattaaaagaaaacgtgccttctgtataagtttatgtttattcctacattttattcat

SEQ ID NO: 11057 - DNA, 1148 bp, Homo sapiens
tactagggacttttgtgggtgtatgttttcattattttattgggtgtttacttaggagtgcagttgctggatcttatggcaactctataacttaacattttgaagaagtgtcaaaaggttttccaaagtcactctaccattttatattcccagctccctccacgggtttcatctctgttttctttctttaaacaaggaattggcaaactatggcccatgggccaaatccagcacactgtctgttcttatgaataaagttttattggaatggagatatagccatttgcctgtgtattctctatggctgtgttcgaacaataatggctgagctgagcagctgcaaatgagactctgaggccaaaaagcctaaaatagataccctctgaccctttacagaaaacatttgccaacccctgctttaaacctcttttgccttcatgttgggtcattgccattgttgtctttctagggaagcagccaggtcagtgcccatgtaaggaaggttatacaggagaaaaatgtgatcgctgccaacttggctataaggattacccgacctgtgtctcctgtgggtgcaacccagtgggcagtgccagtgatgagccctgcacagggccctgtgtttgtaaggtaagtggggaggtcagagacacccctgagcttcctttgagcttctctggaaaaggagtgttttccattggctccaatgatcagttcttgagcaaagtggtaaggtttaagcagaactccccttgccccttctctccaagccacaccgagttggctgtattatatatgcttggactcacatgggcatctggcttctttttttgtacctctggtaatggtgatatattccagaggcatttctgtgacttcttagaggacaccaaacactgcatacctttatattcccacctcctctgtgggcctcatctctgttttctttctttaaaccaggacttggtaaactatggctcgtgggccaaatctgacacactgcctgttttgtgaataaagttttattggaacagagctgtatccatttgcttatgtattttctatgactatgttcaaccaataaaggctgagttgagtagttgcaaaagagatgctgttgacccctagcttaattctatggtattctt

SEQ ID NO: 11058 - DNA, 1632 bp, Homo sapiens
tttgttgggaactgaccaagataaccttgatttggccaatatcaacctcatgttggagttactagttcagaagaagaaacaactggaagcagaatcacatgcagcccaactacagaatcttatacaattcctcaaggttgcaagaagaaataggagagagcaactgggacacttccagaaggagctaagtgttttggaagaggatattaaaagagtggaagaaatgagtggcttacactctcctgtcagtgaggatagcacagtgcctcaacttgaagctcctcctgcatcacacagtagtattatggattccacagaatatagccaatatccaggtttcagtggcagttcttagacaaagaaacagccttgatataacagcacattaacatcaaaattaaaatggcccactgctcattttgaagacctggagcactgttacttttctacaaggttgtctcgtatctcagatgacagttgaactgcaagccaattggatgaacttcagaaatgcttgtccaaggttactcaatataaatcaatatgaactttagccacattatcatgccctagtgatctctataatgattccaggatagtctctggtattgaatttgaccaggattgtgactattttgcaattgctgaggttacaatgaagattaaagtctatgaatatggcacagtcatccaggatgcagtggatattcattaccgtgtgaatgaaatgacctcaattccaaaatcagctgtatcagttggagtagttaccataagaacctgttagctagcagtgattatgaaggcattgttatcctatgggatggattcacaggacagaggtcaaaggtctaacaggagcgtgagaagaggtgttgaagtgtttcatttgatggatcctaaactcctggctttgggttctgatgatgtaaaagtgaagctgtgatctaccggtctagacaactcagtggcaagcattgaggcaaaggctgatgtgtgctgtgttaaattcagccgctcttccagatgccatttggcttttggctgtgcggatcattgtgtccattactatgatcttcgtagcactaaacagccaatcatggtattcaaaggacgccaaaaagcagtctcttatgcaaagtttgcgagtggtgaggaaattgtctttgcctcaacagacagccagctaacactgtggaatgtagggaaactgtactgcctacattccttcaagggtcatatcaatgaaaagaactttgtaggccttgcttcccgtggagagtatatagcttgtggaagtgagaacaactctctcaacctgtgctataaagcactttctaagactttgctaacttttaagtttgatacagtcaaaagtgttctggacaaagaaggaaaagaagatgatacaaatgaatttgttggtgctgcgtgctggagggcacaaccagatggagagttcaacatgctgattgctgctaacagtgagggtacaattaaggtgctagaattggtacgaagggtttactcaaccctaaatgtacttgatcctgctgatatacctctgcagctgacaatgatagaagaaacagaaaatgtcatgtgatgtctctccccaaagtcatcatgggt

SEQ ID NO: 11059 - DNA, 2131 bp, Homo sapiens
ggtccaagaaactgagtagtcaggagatttgatagaattaaaagcataatttcatgtaattctatttattaatagtgttataaccagtggtagttccaaggctgtcagtacgattttgagatgacttgatttgaaattgtcatgtaacaaaacagtactacatttaaagtgtcttattggaaagtgaaacctccaatttttgtactgtctttcttggtttgttttcaagaacttacttcccttaatgcttttttggaatagatcattttggaaatatttgtgatgtctgtaccatatgtttttaaaatgttgtcgttggagacattatattaaaatgagtagcataactatacctgtttcaaatatccagtcttggatcatgcagagtacagggagttgttaaaccatcaaatgagggttaggctgttattttagtacctgacataaataaagtagggttaaattccgtttagaattgtcaatattttatggctccgtacttcagtatataaaaatgagagataatagagttgcactgtgtgatgaagagaaatcaggtacccataggtgggtaactgagggcttgagtggatggagggtgagatggatgagcaaaggtgtgctttagaatgcagaagaggagagaggaagaaggattttctaagcctggcagcagtggagcagccccccacctctggggagggttccttaggggacttgggaatggatgctgcgagaccttgaccgccatgctaaggagaatggacccgatcctatgggcacctggaaccaaaagactccttagtaaggcattggcacgaaaacagtttggcagagttgcataggatgtttgggaataaggaagagctgcggaggatgcttgggaataaggaagaaaccaggaggcaaggagaccaagcagtttgtttctgtgtcccttaacaaacatgcacttacccgagcacatactccctactctgagtgtggttgaatttctgtcttgctcatttttgtttgcttcacatgtagcctataatacttagagtactggagtactttagtactcagtgcgtgcttctaactgtgggatgttcagagaatgatcatggcccctggcctgctgcagagcgggaagacactgtgagaacgccagccagctccacttcagtttctgcttcagagttgcttttcccctccactcatcagatcgtttgttgagcacctactgtgtgttgggtgttatgctacccagtggggattcagtggtaaacaggacatcgactctgtccagaagtggatcggagcttctgggagctgcgtgaccgcttgtcagggcagtgacagatgtgtatgggtatttgggagcacagtgaaagcgcctccagtcgaggctagtgatgaggcctggtcagagaaggcttcctcgtcattggaatgtttgaagataagtttgttcctctagttcctttagaaaaatgcaaattaaatatggtactgggtgtggtgtagaattgtggttgccttacctgaacgcttaccatttgagcagttagctcccggggttcttcccaggctggtttttctagtttcatcttcatgtagtgcagtgaattccatatagagcaagagtctcttccacagtaggagtttctccctaccctgtcagggctgctcgcgacagccgtctgggaaagaccgtgagcctcacagcatggcccagggaagagtccctgagtgtgcctggaccaagatgggtcactagagtggtagtattgtctaattcctaggctaggagagtgtttccattaagagcctttttatttttatttatttatttatttttgagacagagtcttgctctgtcacccaggctggagtgcagtggtacgatcatggctcactgcagcctcgacctgccaggctcacacaatcttcctgccgcagcctcctgagtagctgggactgcaggtgcacaccaccaagcccttttttgatttttagtagagacaaagtcttgctatgttgtccaggctggtctcaaactcctagtctcaagcacttggcctcccaaagtgctcagattacaggcgtaagccactgctcctgaccagtaagtgcccttttaaagtaa

SEQ ID NO: 11060 - DNA, 1827 bp, Homo sapiens
gtctcttccgggtggcagaggcggaggagaaggtgagtggggaggcaggagaggcaggtgaaacttgtattgaaaagcagctgtgtataagtggacctgtgcagttgaaactcatgttcaagggtcagctgtatgtgtaccttgtaaagttaaaacggatttttttttgtttgtttatacgttagatgcctctggatattttaaggaatgagttgtccaatagtatcctgtcgttacaaccagagcctgagataccgccagaactgcctccaccaagaccacatgtccgatgctgttgatttcctactttggagacaaagtggaaatgattcctggaaaggggaaaaaacgttctattctgcactacaatcattttgacaatttcctttcgcactttgtaatccaagtcagagctatacactaacttgtaaatatgcatatatgcaatcctgggtaagttttggttataagttacctatttccctccaaattattatatttcattcattaccccagtgtctagtgtacatacactgggaaacctagtacttctaatatgaagaatgggagaaatgaaaggtataatgtttcttgaaataaataatataattgtccttattaattatattatgaggacagaagatattctgataagagagaacgtggtgctttgcttaccgttttaaagaaaatttgtaaaactaaagactttttgaaaaaaagctatcttaagtgctttttctttatttacaagacatttcccccagtggtagcatctgaagtattggagtgtttctgccacgaagcaaagctccattcatggccgtcatggaaggttatttattaatgttacataatggtagaatattactagttagagggttggatttgacttggtcctaaggccacagaatctctctcatggcttcctaagggatgtacctttatgcttttaagaactacaaagattcaataaagaaagaaatgtttttgaaactatagaaaaagattttaaaacacgctgctgtcctaaacaaatcctgtttaaaggaattttaaagagatgcattttactatatcaaagaacatacgtgtatttgcctaaacactctgtacctttgtaatgataaaacttcccccttctttacggtgaagcttattctgattaagcctagactgtgttctttttttttttttttttttttttttttttttttttttttttttttggtctgatgatgaatttgtgaactctatctttggtatatcttttattaaactgcactgttttgtttagtcaaggtaattaagtaattatgtatttgaataacttggtgtgtcttgagtgttgtggtatgaaaagcattgtggtctttctacactaatgaagtgcaaataaaattttgtatttatgaatgaagttgagttgccatatttatttatccaattataaattgtatatatgacagtattctccatgagctccacagcttaatccttttgagtgtttagacaggaaaagcatagtcctccactggggaaaagagtttgatgttttctcaaagggctgaacatagagctaccatatgatccagcaatttgacttctaggtttatatctaaaagatcgaaagcagagactcaaacaggtacttgtacaccagtgcccacggcagcattgttcacgagagccgaaaggtggaaaccgccccaatgtccatcagcaaaataatggataaacaaaatgtgtgttctacaaacaatgggatattcatccttaaaaagaaaggaaatgctgtcacatgtgcagcgcggatgaatcttgaag

SEQ ID NO: 11061 - DNA, 1171 bp, Homo sapiens
ggaaaatgtctcatttgtggatagcgtcgcttagtcaatgctgagatgcgtcttgtggaacagaatttttgggacatttgcaggtatgttttagttccagggcaattagcacttgttatcctactgaagtttatgttctttgaaggcagggtccgtatgattcatcttagtacctagattatgccttagagataaaggcttaggtcaatgtttggtttgaattgaaaggttcaattatctgcagagttgattttatttgatcatgtagggagatgttgggagtgggataagttctgagaggccacaatgaataatccagttttttagcttctggttacataagatttgaacagatactcaattatattatctcatatgcaaatttccagaggttctggtgcctgtcacccaggcgtggccatgaggtgatgggtaagcgtgtaggtattcaatatttagtattgaggagcgggtatgaaggagagacatgccatccttttttgatgtacttggctcataaatcttctctgtctgatttgcataggatgagttagatgaactccgtgctgagatggaagagatgagagacagttatttagaggaagatgtttaccagctgcaggaacttcggcgagaactggaccgcgctaataaaaactgccgaatcctgcagtaccgtcttcggaaagccgagcagaaaagcctgaaagtggctgagacgggtcaggtggatggtgagcttattcgaagcctggagcaggacttgaaggtgagtgagggggtggtgcgtgcacctcgcaaggctgctgtggaccggctggccacatgcacgttgccctggtgttttttccctgcttgtgtctgtctctacagattgcagcataaacagtcttggtttgctttatggcttatagagtgtgtgtagttatatgactttgacaccccaaggtttacatttgtcataatatgaactttaaaaaaatgatgattatttgtgataacgaagaattaatacctgccaatgggtctgacaattggatagaaattctgcagaaactctgaaagatctgaaatattttttttaaaaatctattgattatcagtgtagtcaaaggccactcttaaaagttgatcatatcacttaacatttttttattgttatttaggtttc

SEQ ID NO: 11062 - DNA, 1205 bp, Homo sapiens
aaactaatttttttttgtttcttttgcttctgtggcaaagcaacaaactgtaggcctttcacaggccccctccacaaagcccctgggcccacctctgctttgtcttggctgtttctctatgtaactcagcggcaccgatgggaagatcggtgtttgatgtttgtgtgcattgggggcgaggtgtgaggggaatcatgaaaaacacgaacatttggtattttcaaataacccttctcccgggctgttctctcctggcaggatgacagtgccgatttgaggtgccagctccagtttgccaaagaggaagccttcctgatgcgcaaaaagatggccaagctaggaagggagaaggacgagctggagcaggagctccagaagtacaagtccctctatggggatgtggacagtcccctgcccacgggggaagcaggcgggccccccagcacccgggaggccgagctgaagctgcggctaaagctggtggaggaggaagccaacatcttgggccggaagatcgtggagctggaggtggagaaccgtggcctcaaggcagagatggaggacatgcggggccagcaggagcgggagggcccgggtcgggaccacgcacccagcattcctacctcacccttcggtgactccctggagtcctccactgagctccgccgccacctgcagtttgtagaagaggaagcggagttgctccggaggtccatctccgagatcgaagaccacaaccggcaactgacccacgagctcagcaagtttaagtttgagcctccccgggagccgggctggctaggagagggtgcaagtcctggtgccgggggtggggcccccctgcaggaggagctgaagtcagccaggctgcagatcagcgagctcagcggcaaggtgctcaaactgcagcacgagaaccacgcgctgctgtccaacatccagcgctgcgacctggcagcccacctggggctgcgtgcccccagtccccgggacagcgatgccgagagtgatgcgggcaagaaggagagtgatggggaggagagccgcctgccccagcccaagcgggaagggcctgttggcggggagagtgactcggaggaaatgtttgagaagacgtcgggcttcgggagcgggaagccatcggaggccagcgagccatgccccacggagctcctgaaggcccgggaggactctgagtacctagt

SEQ ID NO: 11063 - DNA, 1297 bp, Homo sapiens
ctgtggaactgccaatggcttacagaagtggcaattccatatggttcacacctaatacaaatattgatactacatggcctacatgttccaagatctgagtctttgtgataaagttgtttgcatgctctgaggacaaactgctggttgaatgttctcaggtgacaaatggtgtcttctttgggctactgttaccccatccttctggggtcctcaggtaagtcctcctgccgtggaacggtctgtttatatgtgagtgccctgccttcttagggctctgaatctcagttgaaattggggctatgtcacaaagcattaaccggctgtgtctgtattgtctgtttatattacacaccaaatagaaattattctttaagaaccaaaaaaatgctttgaattacgaatagtgaatcctgcaagcaaaaataggttcttgatggaatcccagcattatggcatgaaaacggttttatcagtacaaagtggcgcccaaccccttttgtcctccgtaaagtattcatttagattttctcttcacttggtgtgtttgccaccaaaagagatgatgtgaagggagcacagttgcagggcctcagagcgggcatggagcactcatcggcagcatctaaatgccacgggctcttttttccatttctgttggaattttcctcgttctagattccagtgggattgttctgaattgatgtaatatattcaggccattgcaaccccttcccattgctccatgaattatgcagtagttctcggtatgcgttcccaaatccccaggactacttctgattccaagcccacccagtgcgctgttgcggaatctttccccgaatgttcactcaggcatccacacccaggagtgatgcaggtgacaagaaatctccctttctcactgcactgtcatcccataagccactcgggcctctttttctcttgacaccatggcactagttcagcagtgcagagagaagccgtgaggagttccggtgtgaagagaaagaatctgaaaatggaatgctcttcctccctcccctaagtggaaaatgtgaggggaactttttagagtaagtggcagtagcttggctgttgtgaccgaaacaaacgcagccgtataatagtctctgttttagataccagtcatgcaatttccatatctctgtttgccaaagtgctgtttgaaatgttaaatgctaaagggtgactcggaagcatagaaactagagggaggtctgtgactcctccatggagtttccttcttctctctgggcagatggcagagggcaggcct

SEQ ID NO: 11064 - DNA, 1112 bp, Homo sapiens
tttgcataaccacaccatcaccatgaacaaaactctgcccaacaggagagatctagttttctcaaggtcaaagaatgttttttaaaaacacaaagctgctgaatgttcaacctgtgaaactgagatgtttctagaatgaaacagtaaatgtgcctgtaataacttaatttttttcatagctcagaaaactatttttgtctccatcttttttacacacagtatattaaacgaaaaggtaaataaggtataaatagatttaaaaaataaaagttttaaaaaatgtacattttaagagattctgaacaccctcgctgtcaatacctgactgcctctgttaaatttgcactgttacattttggttcagtttatttccatgttgaattagagtggattaagttaattttattttgtcagtgttactgttttttacgaattttttaatgcttcagactgtctgattcagtgaactttttgtagtgaaaaagccatgaagccagtagacaagacagatattctgtatgctggaggggatacaggatgattttgaaaaggtacaaagtcctcagtgggcttagaaaattcactgtatgatccttatattatcctacttggcttgcacgtcttcgggtgcatgtatataccgctactgtgtcctcgccatcacctaaatgtgactcagtctgttccactgtaatatgttgtgaatttccttgtactgtacttttattgttggtcttcttgcatcgatgatccaacagcaacaccatttttaaattattgtgaaaagattaactggcaatgtacagagtttactcaaagttttcttaagggaaaacactacaaaaagtcacaaggataccaaatggaaacacatgatgatgcctctgggtctgtatgagaccgtgatgaagtagaaataaagcccttctgagatggcagcatgtctcggtctctcatttcacacaccctccatcttttcctaaggactcagatggaaagttttccatagctaggggaatgagggagagaggagatcatgtaaagaggcaacagctgctaatatatcttgctgggaatgcactctttgggtacgtgatcatgttgcagtttta

SEQ ID NO: 11065 - DNA, 1189 bp, Homo sapiens
aatccagtttctatttccaaatacaatgtataagtgtgtgtattccctctattcactgtgactgtggatcttgatctaaataaaattcaactctaaaaagaaatacagtgctctagtttattaaaacatggtttttaaaaatgttctctggggttgggtatttttgccgtagttctttgctttgattcttgggtagatgctgaatctcccaaatttggtttctctaactgtaaaataaagccagtatcacttgtcttgtggcatcgtaaggattcaatgagctagtgtatgcatactgctcagtaaataggaactattattagggctacttttgtattttttatgtttatggtgaagtctgatgtttttccatatttaaatttaggaagagaaaatcttgcatcagttgaaatgtttgaattaaataatctatgctagttcttagggtaaaaatagttacttaactgggctcttgtgaggtaaccattacaatttaagtaaaaatttacaaatgttaatcattaatagtttaatattacttttcatttcaggagtggacgcttctcttgtgagccagctggaggtcttacctctttgactgaaccacccaagggacctggatttggtgtacaagcaggcctttaatttatattgaactgtaaatatgtcactagagaaataaaatatggacttccaatctacgtaaacttatttgtttattctgctctgtgtacatcctcatgctaaccgtagcaacttgcagctctaagtattatgtcataatgacagaggaccattttaaagtcttctatctatggctgtgaagacatcattatataatctagttaacagttactctagtgtcacccattttcaatttccagatcgcttttatcaagatcaggttactgtgaagtaaaaatttggttaaattacaaatgttttgctttcccatctttagccacagccaagttttaagttaacatgatctttctataaactttgtcagtgctccctttaaacattatttaaaacacataattgttactgtatttccaactggtaagacctcaagcacactgtaggtttaaggaggatatggtagttgtctctagaagcctttttttttttttttttttttttgagacggagtctcgctgtctcccaagctggagtgcagtggtgggat

SEQ ID NO: 11066 - DNA, 1192 bp, Homo sapiens
ctcttcagcctactcaccgtgaagatgatgatgacctttttgatgatccacttctacttaatgaataatagatttttcttacgattttgttaaataacaatttttctctagctttattgtaagagtacagtatataatacatacacaaagtatgtgttagtcaaactgttcatgttactggtaaggcttccagttaacagtaggctattagtaaagttttggggagtcaaaagttatatgtggatttttgactgcatgggggttaacacccctaaccttcaccttgttcaagggtcaactgtaatattatcttgaatgaaccttcagtaaattgatattgttcttatttatttttagtagcttcttcatcactcctttttttttgcacgatgtgcagttttagaatttatatgtcacacattggtatgtatatgaaaagcatatattttgaagtagcgcaagtgaatcatgttaaattaataatctaactttaggttggacaccactgcatgaagcttgcaatgttggatattacgatgttgctaagatacttatagcagctggagcagatgttaacacacaaggattagatgatgacactccactccatgattctgctagtagtgggcacagagatgtaagtatgatagaaaaaaatcaataatacacatttgcaaaatataaattcaacccaaagtaatttcattcacttcttagtcatatgatctgtgtcatattccactcattgcttgaacaactcatctatattttgttttcccttttttctactaagtattagttcatagtcagatttagcattttcttttcataaaacccttttaatttgacagttgattaaataatttggcaaaatttttatttcaaggcattctttataagacaattggatgtgttaaagcagtctttatatatagtaaaaattgtacagtgttgaattgcctatcttttgaagggcattttactttagttgagacaaaaatagaatttggagtaaagatagatacaagtgcagttctggcctggccagtttactagctgtgtaatcttgaacaggttacttccctcctcggaacctccgtttcctcatctttaaattatatgataaataatacctatctaaaattgatatttcaaaggaaaaaaagacactacatgtaaatgcacattgaaa

SEQ ID NO: 11067 - DNA, 1192 bp, Homo sapiens
agaattgactcgtatgaacaggacagggtgaaaatgctgggaattattatgggaaacaaaactatctatgttcatattttgtaatatttcatttgttaagtttatatctggatataatgttctttttaaacaagtataatcatatcgtcggaggttaagattatgaaattttagaatctctattcaagatgatgttcactccaaatacactacagaatttagtcaacattttatataatgtttcaataaatgtttctttcaataaagatactatgtgcccttcatagtaataaaatctcaatcttaaagcatgaatctaaaacataaatatttatattacagactcaattttacaaaattactaattgctctagtgcatatttgaactacaagcaactttttaggaatacctctttatacgtctacatattttagtatataaaaatagataatgctcttggacacattttgtattattcatgatctgaatagtagttagttaaaagatcatttgtaatattatgatcaactgttataaattaaggtcttaataccttttctgctctttcaaataactctaatgaatattcaagatattttagccttttaaaaagttgagatttagctcatggatatattttttggtagggaaacattagggtctccttttcttccttttacctagaatgcctcatttaaaagtgccttgaaaacatttagctccccttcttcatgagcatctgtagagctgaaagtattctggaactttagacagaaagctgaaaggaatctgcagtctcctgctgcagttcaactctgctgtttttcagtcatttcctactgtgagtggagtgatgtttgtgtgtgtgttggcaacatgcctaatgttttcttaatgatgacaacaaatattttaaaactgcatttatcattttttaggtcttcattaaattttaaaatgtaatatctgtttcccaccccctacattaggaggataatttcttaaaccacattgttttaattgatttttcttatcttgatttctttcattagaaactatccctaaatgtaaagatcttttgccttcaaatttggcttattttttctgatttatgagggtttgaaagaaagaattcacctaaaagattccatttccagttttataatgtatttcaggttctgaataacaata

SEQ ID NO: 11068 - DNA, 2115 bp, Homo sapiens
gggggtgccgtccagccgcccagagacggcgtccttgagccaaaagcagctaaagagcagccaaaggcaggcaaggagccggcaaagccatcgcccagcagggataggaaggagacgtccatctgagcagcctgcgtggccgtctggagtccgtgagactgaaaggacccgtgcatcttactgtaacccgggggccaggccggctctctcgctgtacattctgtaaaggtgtcttctcttctcagactcttcctctgtcacacgtctgactccttcacgtcaggctcaggttccatgggaggacgaagcagtggacgcattgtgggctttagggacagatgagttttccagatagtgtcagcttatttgaagattaattttctttgttaacttaaaataactattttaacccttgagtggcttctttttaaaccaaaaaccgtctttctttgcttttttatcacagcagaatcaggatctctttctcattcaaggggggaaccaccccaggtcagcgctgcgcctgctgtggccgccgcgagccacgccctctgggatctctggtaccgtcactcttgcttgtgccttccacaccttctcggtgcagatccctatgggggagctgcctcacgttctctgactggtcagagcagcgcctggtgggtgttccctggcccactctcctctctccttctgcagttctaaaccacagtctataagcccgagtcaccaggacggcctgtctggccacagacaggggctgcctgtggagcctgcccaccggcccccggcagtgcagtccagcggggaggaggctgcccgttcctgccagttcctcactgcggggaccagcaaaggccttctcactgggttggtcaaaggtagtcaccttggcctggtgcatccacagaggatgttgttcaaaccagaaatcttttaaacgactgaccttccttaaaaacagaatgactccgattgcttgcttgggctagaatgtacacgtctccttgcctgaataagccatatatatgctcttaaacaaaagtttgaaattatccatatcatctcagtgaacctactggtggactcccaattgacaagattgagcaatagaaaaaaattcctttcctttgaatgatagctgtgattcaccccaccccattttcttgtttctggtccatccgatgagacggatgctctgatgctctgaggcttctgggaggctgggccctggaggcaacgtgctgcaggcgcactctgtcagagtgaacagcaccgcgagacaggccaggctcgtggctcggaagacaaaccccacacacactcaaggggtcgaaaacaaaccccacacgagggctctcacctccttctcctaggtagtatttattttcagcacctgtttgatgcagtttttaatcctctacctattgcactgttgtgactcgttggccattatttgatttttgtacgaaaaaaagctttgttatagaaatcagcatactatttttttaaatctggagagaagatattctggtgactgaaagtatggtcgggtgtcagatataaatgtgcaaatgccttcttgctgtcctgtcggtctcagtacgttcactttatagctgctggcaatatcgaaggttccttttttgtttgtgtaaactctaatttctatcaaggtgtcatggatttttaaaattagtatttcattacaaatgtctcagcattggttaactaatttttgccaggaccattattgatcaagcaaataaattcaacagccatttgggaaaaagaaaagcttctagtttttttgtacacattctttctgtgaggagattgagtactctgcagctggcgaggagttggttgaggcacttcttcaaggccaagggggaacacagtgttttgtttccagctcactttgtacccctcacctctgcagacacggggagaaccccggacccctggcatgcatgctggcggcggcatgcctcccttccacaagcccatgctgctgcagagggagcctgtgtttgcaaaacccagtggactgggctgggtctgctgtctgagcagctcctggctccggtgggaactgcacacaagtccactggc

SEQ ID NO: 11069 - DNA, 1670 bp, Homo sapiens
acttgacggaactctgaagtgttccgttggactggtttcatctgtcctatgcacatgtcatttccagactatttcttggcctctgccagctgccaccaggaggctgtggagcagaccatcatggctcttcagatggaccgtgacagcgatgtcaagtattttgcaagcatccaccctgccagtaccaaaatctccgaagatgccatgagcacagcgtcctcaacctactagaaggcttgaatctcggtgtctttcctgcttccatgagagccgaggttcagtgggcattcgccacgcatgtgacctgggatagctttcgggggaggagagaccttcctctcctgcggacttcattgcaggtgcaagttgcctacacccaataccagggatttcaagagtcaagagaaagtacagtaaacactattatcttatcttgactttaaggggaaataatttctcagaggattataattgtcaccgaagccttaaatccttctgtcttcctgactgaatgaaacttgaattggcagagcattttccttatggaagggatgagattcccagagacctgcattgctttctcctggttttatttaacaatcgacaaatgaaattcttacagcctgaaggcagacgtgtgcccagatgtgaaagagaccttcagtatcagccctaactcttctctcccaggaaggacttgctgggctctgtggccagctgtccagcccagccctgtgtgtgaatcgtttgtgacgtgtgcaaatgggaaaggaggggtttttacatctcctaaaggacctgatgccaacacaagtaggattgacttaaactcttaagcgcagcatattgctgtacacatttacagaatggttgctgagtgtctgtgtctgattttttcatgctggtcatgacctgaaggaaatttattagacgtataatgtatgtctggtgtttttaacttgatcatgatcagctctgaggtgcaacttcttcacatactgtacatacctgtgaccactcttgggagtgctgcagtctttaatcatgctgtttaaactgttgtggcacaagttctcttgtccaaataaaatttattaataagatctatagagagagatatatacacttttgattgttttctagatgtctaccaataaatgcaatttgtgacctgtattaatgatttaaagtggggaaactagattaaaatatttgtcttttaactagtttattagtttctctggaatctgcctgtgtccctgggtttgggttttgctcttggcagcagcaggtgcctcttgggtgctcctcctgctcctgcctgcagccctaagagcaggtgggtgccgagtgtctggcacagcttggatgccgcccactgaagacagcagaggggggttgtcttgaagctcccgagacacagtcaagcatctctgagcctcgatgtcttcgtcagtaaaatgggaattagtaaaacctgccctgtttctcacagggttgttttgcaggcaaatgagttcctgtgtgaaggtgcttttgtaaagtgctgcgtgtataaatgtttgatgttcctgtaagcctggtttgaaaaccttggcctgtcggagtcccctggtgcttctgtgagttttggttttatttagttagccagcagggactcctcagtaagt

SEQ ID NO: 11070 - DNA, 1086 bp, Homo sapiens
aggaagtgctttgctctgtctcagtccccatggatgcagaactctacagcttttgttttccttacactctaaggaacttgaatagcatgtaagtgcatttccagatacacagagactggaggtaactgtacaggagaggtctgcttaatcactcctctttgcgtatgtttgagacaggtgctcagtaatccagtattacagatgatttaaatgggtaacctattttcatttgtctcgctgatttttaaacattgtctttttgtaattcctttttgtagacagctgattttacttctagagttatatagtcccagagatgtttatgactatttacgtcccattgctctgaatctgtgtgcagacaaagtttcttctgttcgttggatttcctacaagttggtatgtattgaacttttaaaattttagatcagcaaactctaagatcctagaatggaagctgttcctcatttctccatgctcaccctcccaggtcagcgagatggtgaagaagctgcacgcggcaacaccaccaacgttcggagtggacctcatcaatgagcttgtggagaactttggcagatgtcccaagtggtctggtcggcaagcctttgtctttgtctgccaggtaagcgaggccctgggcttacctgtttgtgagtttttctcctagaagaatgtcttctttaacttcctacctctctctcaccctcttccttactcttaaggaacagaaccttatagtagcctggctgtttataggatcatctgcccccattgttgggcatctggtggcccctctctcccagctagccaagcccctccttacactggcatgcaccacacacaccccacgtgcctgctgtatgtgcttgttccacaccacatgcctggtatgtgcgtgttctgctctgcacacattcagacgtgtgtatatgtacatttcacagtgcacatacatgcatgttcctcactgttcctcactgcatattacacaggcatacatacatgtaccccaccacacacatactgtgcacacatataccataccacggttcccactagagggtgctcatgtctgggacccag

SEQ ID NO: 11071 - DNA, 1132 bp, Homo sapiens
gttggcagggtttgtgtgactgctcttctgctaaaatagcttagtaagtaagacttgccagtttgattcatgcactaccaaaacatagttaacgtttactgaaattgactccttttaataagccggaggcagctccagcaactagatagcatttctcttttcatactaacgcagaataatgtacagtagcagataaacatttttaatctcatgaaagcatattagttttctactttttctcttgaaggactaatgatttaccacagtagaaatttttttccagctttttgattgcagtgtcaaaaaagtatatatttcattgataacgtacagtgcaaatggagaacagccttgtaagaatattgcaattgtgtttctcactttgtccatttccttattttgcctgtagcacaagtggaagtgctgtccgctgcactacgtgcttccagcctggatgcacatgaagagaccatcagtatagaaaagagaagtgatttgcaagatgaactggatataaatgagctaccaaattgtaaaataaatcaagaagattctgtgcctttaatcagcgatgctgttgaggtaacaaactcagtaaagtgtttaccaaatgagagtagtttgaatcagaagtctttcattggggaatagttgtagctaatcacttttagtttgtatgttctgtttgttgctgattttttagctcttcgttttgcataaagtaattgttttcatcacatcctgtcctcgtgacattagtgtcatatgaaatgcctggaaaagtaaatcccacttctgtctatatgaccatttagtagactcaatgttaatgtagctcactgcagtgaaatagtcttactggaaacaaagccctttatcaagaataattaactcttcccttttctttttggagaggtgctttgtttctgatcggaccatttcactgcagcaagcaacacagtattctgagcagaagatcgggacttgaggccatgttgcggagggccagtgacattatctggactctggagtgtgagggtgggtactgatcctagcatcatcttcactgtgtacttgtagctgttctctatgatccttccctaatttcctgctgcatctccatcaagccagc

SEQ ID NO: 11072 - DNA, 1127 bp, Homo sapiens
ttggggttttttttttagacagtcttgctctgtcacccaggctggagtacagtggtgtgatcacggctcactacagacttagcctcatgggttcacgcgcttcttccacctcaggccctgccgagtagctgggaccacaggcatgcgccaccacgccctgctaactttggtattttttgtagagactggatttcgccatgttgcccaggctggtctcaaactgctggactcaagcgatctgcccagctcagcctcccagagtgctgggattacaggcatgagccactgcgcccagccagagaaaatagcttgtaagaatttttcagtcctagctaaagttctgaatctgggcttcctttagaaaagcttcattattatcctaaacatacttcggcatttgaaagtagattattaaatatacataatgtgtgcgtatataattctttttcaaaatgattcctttattattgtcctttttatcttcctaggttcgccaagcagcttttcagtctctgggacctttcatatctacttttgctaatccatctagctcaggccagtattttaaagaagaaagcaaaagttcagaagagatgtcagtagaaaacaaaaataggtataattttgaaaccattttctaattttaaaaccttgttttctaattttactgcttttaaacattatttccactattctgcaacaaatgttattttttgatagtttgctatttctcttgaatataaaaattggtgaatatttttatagagctttactttaagcgcatttgtttgttaagtatctctttggttggttacatattgaatgagtagatgcatgtaacacaattagctagatgcctcgcacataggaaactctaaatggtagattatgacttttaaaaaatgtttatttagtacattatttagtcaatcattcattgatatctacaatatacagggtaattgttacacactgtgtagtatttgggtttttttaaatttgtttttaaggagtaaaacttaatttaggaatatgttttattgtccttttctgtcaaataatttagttgcgcatcttggattctttgtcaatggtgattgtaatctgtcagttaaaggagaaagcca

SEQ ID NO: 11073 - DNA, 1160 bp, Homo sapiens
ataccttgcagatcagaataatcaggtaagagtaccatttatatgttcttaaaagaaatttacgtagtgtaatatatggagaatagccgagcctaagtgttctctttggaatgttttactgtttttcaaaaatgaatatttatcttagacaagatgtgtttagagtctgacaaatctagtagatccctttaatgccattatggacaatgcctagtaactgcactctcacttggtaacctcctagcggtcccttaaaaggtttgttactttgtgaggcatcttttaccaggatggctctgtccacttcctctgttacagcacaatctacgaagttctgtagtctttgtaatagttgaagaaaataaacacaaatatttatttgcggagttttgccagttatgggtccctttgagatgagaaatctttgtttataaaaatcaagtgatagaattttgtcatgttgcatatgtactttctttgtgttgttatttttctcctaggtgaggaaaacaagtcaggcagctttgctggctctgttggagcaggagctcattgaacgatttgatgtggagaccaaagtgtgccctgtcctcatagagctgacagccccagatagcaatgatgatgtgaaaacagaagctgtggctgtaagtcaaatgccatttttccacttatgcaaaatgtggctgataagaggtgcttattaaaagtcaggccggggttaggcacggtggctcatgcctgtaattccagcactttgggaggccgaggtgggtggatcacttgaggtcaggagttggagaccagcctgggcaatatggtgacacctggctctgccaaaaaaatacaaaaattagccaggcatggtggtgtgcgcctgtagtccctgttacttgggaggctgaggcaggagaatcacttgaacctgggaggaggtggaggttgtagtgagccaagatcaggccactgcacttcagcctgggcgacagagcaagactccgcctcaaggaaaaaaaaaaaaattaggctgggctgggtgcagtggctcatgcctgtaatcccagcactttgggaggccaaggtgggaggatcacttgagaccaggggtttgagatcagcctggccaacatggcaaaaccccatctctactaaaaatacaa

SEQ ID NO: 11074 - DNA, 1185 bp, Homo sapiens
taaatattcagtctcatcttgttaaaataaaatcaatactgccgtttgccacttaggaaattatagacctaatatatgttttaataatgtaataagaaaaaattttcttaaaaaatatacagattttgtcttttaaaattctagatatcggccaggtgcagtgactcatgcctgtaatcccagcactttgggaggccaaggcaggtggattgcttgagcccgggagtttgagaccagcctgggcaacatggtgaaacagcatctctactaaagatatttaaaaattagccaggtgtggtggtgcatgcctgtagtctcagctactcaggaggctgaggtgggaggattacctgagccagggaagtcaatgctgcagttagccgtgatcacaccattacactccggcctgggcaacaggaatgaggccctgtctcaaaaaattaaaattctggatattagctattgatgccattgaacatacataattttgttttttttgtgtagacaaatggtggcccggagtttgctcgataccttgagggaagtctgcgatgatgaaagagattgtattgctgttttggaaagaattagcagattggccgatgattcaggtatatgtggagaaagtgaatttactctattctagaaaggcttctttgatcaaatttgtgtttctaaaaactaatgaacaagttaatgtgatatgagatagctttaaaatatttcctaagtaattatcaaacccatcagtgacaacaaaagtaaaatttgttactgagacctggacattttacagtgggctcatttagtttaattttagaaatttctcatcaaaacaaatctaaaaacattgttttgcatcatgtatagtaatattttaggattaataaaaatatatagaataattttgaatacattaaaagagatggaggaggctgtaaattattttaggcaactatagaaagcttgctttctgtgtggtttctcacttgcaaaaaaatgttgattaaccatttgtaaaactaaagctggtttatctccaaagtgaagataagaaagtctgcttaagaaagaggtaaacttgatttaaggcttagaaaatggtgatgttaaagtttttataaatatatcttttgttgtagtaaaatatacttaaaacttaacacataaaactattttaaggta

SEQ ID NO: 11075 - DNA, 1173 bp, Homo sapiens
tggttaatcatgctgtgtgctagccagggccagctggtaccttctttgccatgagcattcaagggacggctaacctttattgacaatctatatcgcaaaagtcaggaaagaggttgtgagctgattggattaaagacctggcacttcagtaactcagcacgcttccacttcactcaacttaagagagttcattgacagtgttaggatgtgaaggctgggaaacacttattttgcttcaagagttccacttggctctcccaaataggtacctcaaaaactgttagcaagcggcatttggatgtcttgacaggggctttgcagggatttttagggttttttccacattgtccacattaatggttggcatgattgtgcttgcaggccaagaaatgatcataccccttgccaaaggtaaaaaaaaaaaaaaaaaaatgagttgaaaattgaagtgacctctttccagctgagttgcaggcttattttgtaacctttcctcatccagttttccctgagaacctgggtttatctctagatagctgttcaggttttttagctgaggggtaagtatcctagctgagagttttgcatctttgggctgggtttgcagtggttgtgttttgcataaaatgtctagtctttgccacagatagtgagctacccactaatgagcccatggttttatttcagaagcacatgagggtgtgaaaccactctgttacctttctgtattgtcttagctattcaagccagtcagaggataatatatatattctcatcagcactcagagtagtcagtgaagagagtagatcacacttgggcacaccaggattcacataaacattgtatcttctctgtggatgctcaggccttgtctacaatgaggctttacaaccttcctttgttttggctcgggattacttcctggctgtctaataattgaaccataaccatgtaatattatgtaaaggcctggaaattactgttgctaaaaaaagtcatgtagtttcatgtagtgtagcatccttggcatcgttttccaaaatttgttccttctcccttttttttttctttcgtgtgtggcatgagtgtgtatctgtgtaaatatgattgtatatgtgttactccgatatgtaatccatttcactggctgagtttggcccctagccatgtgt

SEQ ID NO: 11076 - DNA, 1212 bp, Homo sapiens
ttagcgtccgcgaaccccaccccattgcctccaacagacctagctctcctttccaccctcaaacagccgttactacagttcccagcaagcaccgcgcagggccgcaaagggccaggccctcggcgaaggccccgccccgcagggggcatgccgggagttgtagtgagtgggcgcttccctactactacttgtcccttccactgggcattcccacttggaagagtgtgatgcgctgccagagcagtttctctagttccgtactcggagctcaaggtgacagaggactgcgcttccagccctgcgctgcgcatcgcgtcggtcccgcggacctttgccccgcctccttccacacccgttcccttgacagctgggctgcgctccgggccgcggcaagccgcgagcgcgcaggcgcagcagccccgcgccgcgctaggccggcctggagggcgggacaagcgctagaagctcccggccgggggcgcgcacgtaggcacgcagaggccgtcacgtgggtcgccgaggctcgcaagtgcgcgtggccgtggcggctggtgtggggttgagtcagttgtgggacccggagctgctgacccagcgggtggcccaccgaaccggtgacacagcggcaggcgttagggctcgggagccgcgagcctggcctcgtcctagagctcggccgagccgtcgccgccgtcgtcccccgcccccagtcagcaaaccgccgccgcgggcgcgcccccgctctgcgctgtctctccgatggcgtccgcctcaggggccatggcgaagcacgagcagatcctggtcctcgatccgcccacagacctcaaattcaaaggtaggcagaacggggacacccccgggtggggtggggcgcgcggaccgctggctgtcggcgggggggcgcggagggcacgtccgcggccctggcccgagggagcgccccctcccccacgccccggcgccttccctttcccggctgctttcttgccgccacctcggccggcctgccccttgctccggcccgcttcatcccctcccgcccgccctcgctgcggtgcgcgcgccggccggggcgaggcggaggggagcccggccctggcgccgccgccgccgccatcttgcggtcccgcgggggcgcctcctgggcgtccggtcccgcccgcgccgcggtccgcctgggcccgcgtccttggccccagaggccgacgg

SEQ ID NO: 11077 - DNA, 1196 bp, Homo sapiens
atgtgaatgaatgaatggattgaatgaatgaacaaacaaaattgaggtgaagcaaaagcactgatgtcatagggtgtagggtcttcagatgtagagatttttgcagttggcctagtaaaatgaacttgaagattgacactggtttgcagacaactgggaaattctgttattttcagcaacgtattaacaacatactgtaaaaatacagttgtaaagttcatagatccaaagtttcatagtacttttttgatagaaatcatacatgtttatggtagaaattttgtgaaatacagggaatgaagaagaaaatatgacttgtttttaagtctgccacctcgagaaaggcagtgttagtagccatttgggatatttatgcctacaaatgtcagcacttaattaaaattgaggttatatattttcagttttgaatccttcgttgttgagaatccaattaaattttgttttctctttaatttttaaactttacaggccccttcacagatgtagtcactacaaatcttaaattgcgaaatccatcggatagaaaagtgtgtttcaaagtgaagactacagcacctcgccggtactgtgtgaggcccaacagtggaattattgacccagggtcaactgtgactgtttcaggtagcaaatcatgttctgaatttatgtacatttgaattttgaccttttatgattatgtttttgtttaataaggtttcatctggagggagggaaataattcttatattattctggttttgcctttaaagatgtcttgttacagtactctgcaagctgtttcagaaaatttctcactcatcttctgtgtagggagtgtggtcagtttataagaaattattgtcaattacaaactttagtctttatttctacagctaaccactaccttctctgcctttgttattttatctttgaaaaattatatcatttttctgatgggtcattctccttcagatcatgatcatattacacattgcatgcagctatagaagtgtcataattcttttgcttaaaaaggtgcaatgccacttttttgcctactgtgtcaaatcagatgagtctttatgcctttcattgtaaatgtcaacagtgtcctgtgtgtgaaaactttatttttattttactactctcttatgtgtttacttgtcaaagaagtatgcttgccatatatggattac

SEQ ID NO: 11078 - DNA, 1435 bp, Homo sapiens
cccactgtgagtgtacaattcattgatacatagaactttgtaaccatcactatagttcagttttagaatgtctatcacccccggaaagtttccttatgtggttagcagttaatccccttttccgtccccagccataggcaaccactaatctactttccgtccctatagatttttagctccagtagtctcgttagtatgcttgtttttaaaaaccttttgtgtgtgtgttttttttctaggatgaaggtttaaggctcagaaaggtagcacattcggataaacctggatcaacctcaactgcatccttcagagataatgtcaccagtcctcttccttcacttcttgttgtaattgcagccattttcattggattctttctagggaaattcatcttgtagagtgaagcatgcagagtgctgtttctttttttttttttctcttgaccagaaaaagatttgtttacctaccatttcattggtagtatggcccacggtgaccatttttttgtgtgtacagcgtcatataggctttgcctttaatgatctcttacggttagaaaacacaataaaaacaaactgttcggctactggacaggttgtatattaccagatcatcactagcagatgtcagttgcacattgagtcctttatgaaattcataaataaagaattgttctttctttgtggttttaataagagttcaagaattgttcagagtcttgtaaatgttattttaataatccctttaaattttatctgttgctgttacctcttgaaatatgatttatttagattgctaatcccactcattcaggaaatgccaagaggtattccttggggaaatggtgcctcttacagtgtaaatttttcctcctttacctttgctaatatcatggcagaatttttcttatcccttgtgaggcagttgttgactgagtttttcatccttacaatcctgtcccatggtatttaacataaaaaaaaataaaactgttaacagattcttgctcgatagcttgtttgtgtctgtcgtgttattagagggaactccactatatatggtcacttgaaattatgatgcaaaggtttctcttgcattgaaaccctcttggatattacagtatttttaattgaaagtcctaattctgttaaggaaaggagttgattaaattttaaggtaccactggtattttgggagattataatcagtttgttttcaagataatagaaaataaggtccatgagaatagaagttatgtgatttcagtgagttgatgtgtacagcatggctgtgctccatctgatttaccccattcttaagttctgagagtatgttctcaaggaagatttaactctctttggttttaaattactttttaaccagcctaataaataagtcttactacttttcataatatttcataatagttaaaagt

SEQ ID NO: 11079 - DNA, 1204 bp, Homo sapiens
aaatggaacaggatgcccgggggcgctatctgctgttcaacggtcagaggcccagcgacgggtccagcccagacaggccagagaagagagccacgtcctaccagatgcccttggtccagtgtgcctcctcttcgccgagggcagaggacctcgcagaagacagtggaagcagcctgtatggccgggcccctgggaggcacacctggtccctgctgctggctgcacttgcctgccttgtccctctgctgcattggaacatccgcagatagaagttttagaaagttctatttttccaaaccaggattccttactattgacagatttgctttaccaaaagaaaagacatttattcttttgatgcacttgaatgccagagaactgtccttctttttctcctctccctccctcccagcccctgagtcatgaacagcaaggagtgtttgaagtttctgctttgaactccgtccagcctgatccctggcctgagcaacttcacaacagtaattgcactttaagacagcctagagttctggacgagcgtgtttggtagcagggatgaaagctagggcctcttatttttttctcttaattattattatatttctgagttaaacttagaagaaacaactatcaagctacaacttttcctgccattttcctgtggttgcagcctgtcttcctttgaaattgttttactctctgagttttatatgctggaatccaatgcagagttggtttgggactgtgatcaagacaccttttattaataaagaagagacacaggtgtagatatgtatatacaaaaagatgtacggtctggccaaaccaccttcccagcctttatgcaaaaaaaggggagaatcaaagctttcatttcagaaatgttgcgtggaaaagtatctgtaattaaagtttcgaagtaatttaacctatttttacatcatttgtcttaccttgttgagagaggagactggcttgttggcttctggttgttgcaggaggcatgtggcttcctgccttctcagtagacaggatcattaggaaaatagcaacatcaatcctgttacacaggagcagtgacacgggtggctgcagtgtggtacatgccacacaaatgatagagaaagtgcccgttcattgcagtttcctcttcctgggggacctgagccctgactcactgtcttattaggggcaggcggaagaa

SEQ ID NO: 11080 - DNA, 1159 bp, Homo sapiens
gaggctgagatgacagcctctgagttggatgtggggtgtgagagaaagagaggagccaagggtgacttcaggggtttaggcctgaaaagctggttgaatggatttgccactttccgagatggcaaaactgcaggaggaacaggtttggagctgagagtcgagtgttctcttctgtgcaggttaagctcgaattgccagtagatttcttattttatttttttgagacagggtatcgctttgtttccctggctggagtgcagtggtgcaatcacagcttctacctcctgggctcaagtgattctcccacctcagcctcctgagtagctgggactacaggcatgtgtcaccatgcctggataatatgtattttttaattttttgtacagacggggtttcactaagtggagatgttggatttgcacccaagctgacggcagagatgcagtgtggaagtcatattcctggagatggtatttagggccatgtcccggacaggaggagagcaggcttggccactgatgggctttgccgtcggatgagctcaggtcaggctcccattttcctccttgggagcctcacaaatgccagtttgtggaggtcatttctgaagtggttcatttctccagaaaaggcttccctgctcttcctgcctgggctgagcgcacctgtcgctggaggaagaggaggcaggagggggagaggaggcggtggtgatggcctccagctcctgcctcgcctggtccacacctgcagtgtttgcttagctctgcagggtggggtcagcctacgtgagaaattcgaaaactcaacaacatttcaaacatcagcagagacagaattcctgtgagacagcagctggcaggcacagagtagcagctgtccctttggtggggtgggggtcggtacatggtctccaagggtccgaggcccactgctcctgaccctatctgagaggtccctatcatttcctacccattttgctaacaaaagctgtctcagaagaagggggagggcagaaggcactgcccttgcctctgggcagcctcatcccagcccttggcactccagggtgccagtgaggtcccacctgtgcccccttaaggagaggctggtagatggctcatccccacggggagagtgagtcctggactctgtggcc

SEQ ID NO: 11081 - DNA, 1440 bp, Homo sapiens
agaagggcagctcccctgttcgggtctagcccattgcttgcatttcttaggacttttatgttctccatctcttaaggcagtggcagcttcagagccgcactctgttctgtgcagcccttgactgcattcacactggggtggggcgggagaggctccatccctctattctttgccgaattcactcctagaccacctgtttaatacgagtgttggggcttgggcacggttccatgtgccatttcctgtgctgtgtgcatgtgggataagttgttacacaacattgttcagccctctctggtaacccggatgcctggctctctctgtctgtccccaggtggacccctcgacctcatggcttgcagagtggttgcggccagcacccgggagatggcgatgctcatagctcaggccttacagacgattaactatgggcgggatgatgagaagtgactgcggctgaggcaaagctgctcccaaggcctccctgggctgctgtgggctcctggggaggtggccctcgtggcccacgctccatgccagtggctcacgctctgctcctggctaccccagagggagttgtcacgctacagtgagtggctggccttttaaatcgacgtctctctcaccaggatttggtgtttagctgtttctctctttaatctcacgtagcctttttcaggttagtacgtgttcttctgtcagggccaaaactcaaatctcctgtgaaatacgtattgataatccaatcttgatttttccccccagaatataaatctcaggtaataaggctttagaactgctgataaagcggatcgttctcaggccctccccccggagtacttcagaatgcaataaatcaaaataatggccctgtgtgtatctgtttcctctataagcatgtcgcctgattcccaaacaactctgtggctctcatccactgctgtggatctatgctctcaggaagctttgcgaatgaaacccaaagtccatgcgaatgaaacccaaagtccatgcgaatgaaacccaaagtccagtgtgtgccagctgctgcctctgatgaataccctgaaggcgaccccagtaatatcatgtgagtgttcagaagccaagacatgggacagacagaaggaaactaatctctgaaagctgttgtttctgtgatcagcttttttgtttttgtttgagttggggtcttgctctgtctcccagcctggagtgcagtggtgtgatcacagctcactgtagccttgacctcaggactcaagtgatcttcctgccttagccttctgagttgggaccacaggcatgcactagcatgccaggctaatttttaaaaattttttggtagagatggggtctcactgtgttgcccaggctggtctcaaactcctggactcaagtgatcctctcacctcagccttccaaagtgctgggattgaa

SEQ ID NO: 11082 - DNA, 1144 bp, Homo sapiens
ccaccgtgttccgcgggcccatgtccatgaaggaggtggacgagcagatgctggccatccagagtaagaacagcagctacttcgtggagtggattcccaacaacgtgaaggtggccgtgtgcgacatcccgccccgcggcctgaagatggcctccaccttcatcggcaacagcacggccatccaggagctgttcaagcgcatctccgagcagttctcagccatgttccggcgcaaggccttcctgcactggttcacgggtgagggcatggatgaaatggagttcaccgaggcggagagcaacatgaacgacctggtatccgagtaccagcagtaccaggatgccaccgccaatgacggggaggaagcttttgaggatgaggaagaggagatcgatggatagtcggaatagagccgccccaactcagatcctacaacacgcaagttccttcttgaaccctggtgcctcctaccctatggccctgaatggtgcactggtttaattgtgttggtgtcggcccctcacaaatgcagccaagtcatgtaattagtcatctggaacaaagactaaaaacagcagagaattgcgggttctacccagtcagaagatcacaccatggagactttctactagaggacttgaaagagaactgaggggccacaaaataaacttcaccttccattaagtgttcaagcatgtctgcaaattaggagggagttagaaacagtctttttcatcctttgtgatgaagcctgaaattgtgccgtgttgccttatatgaatatgcagtatgggactttgaaataatgattcataataaaatactaaacgtgtgtcttcatctctctagccatgtgcataaatgacgtaagttactttgtatggttacaatggctacttgggtcactggtctctccctggggtgaactcctccccacttcagttcacgaaaacaacagaggaaagggctcttctttaaatggaggctttaaggggggcagccaaaactgttgctagctggaaggcaatgcagtacagacaaaagcccctcctccatccgcagccaccttttagactcccacaggatcttgcattttcccaagtcaggtcctgggctagggttccccaaccttgtaggggaacaa

SEQ ID NO: 11083 - DNA, 1142 bp, Homo sapiens
gattcattccttttgtacacatttatacttatcttgatgaagcagtggtttagggtattaacattcaatgcattgacctttggtaggattttagcataaagaacccctttgtatcaaagagtgccattcccatctttgaactatcatttatgtttacatttcacagttttccaggatttttaggtgattcttctctcatcagaacttcttctttgggggttgtctttaataagaccatgttagtaaccccacttaaagtctgggcagatgctccatttatttcgaagagttggttgccatggagcttatttgggaattctgttgcctttgaagaacacttgcaagttaccctcctttgtattaagtgcagaaggtataccttggtgtagctatatatatttatattgatatcttgcaccacatgtgaaagctggaggtgagcagccagtcctaacccgtgttgcgctgtgtgtccccagctcttttctgctgagcatgctgcctacggtgctcatcatcgccttcttgctctacaccatcagaagagggcctgctggcattggccggacaggccgagggatgggcggactcttcagtgtcggagaaaccactgccaaggtcttaaaggatgaaattgatgtgaagttcaaagatgtggctggctgtgaggaggccaagctagagatcatggaatttgtgaatttcttgaaaaacccaaagcagtatcaagacctaggagcaaaaatcccaaaggtaaaatgaaatttaagattaactttttgaaatgtttcttgatctctgaagttataattctgtgaagtttgattacttattatagatagctgtttttctgtccttcctctttctcagcttactaggctagcctctgcccaactcgaggatcgttttgggtcagttctgtgtgcatgtgtcttgtatagtgtatgtattcctgaaaatatctgtgtcacctcctcttggaagattttcttgattcgtcttccttttccctccaatctgatttagatgccctatctctcagcaactgtaggcccgctgtagctcactgacaatgtcacactctgctgtcacccagtgtcccttcgagggatgtatgtggacaggacacctgtgctggcgct

SEQ ID NO: 11084 - DNA, 1239 bp, Homo sapiens
taggcatagcttccagttcttccttccgtgtcctggtttcttgttcagttttacttctaatccaacaacaaaagaaatgtctggctggtctcagctagagtctgatgtgtcttagagcatgtgtgcgtatctgaaccatcatccctgctctcatctcagctccctccaggcctgagcaccggttccttttgtcccatacgtcatgaagtcacactattgggaaacctgtgcttccctctccatggcttaactccctgtcagtgtcggagtgtataagaatgcttgtaaatactgtaatatatttattaatatttgaaaggcattcattcagtggacagtgggaattaactctcccaaggcaagtgaaaatgaatgattgacgtacgttgatttaacaatcttactagattttaattcttaaggatttcaaatgaaaccagaaggtggttatgtaagaggcttaaaatgatcttatgtttaaagagattctgttattagcaccatgaactcgtactatgaaatttttaagccttttatttttctaactatattactgtaggactggatattaggtgtcatataggaaacacaaaagtttattgctgtttgctaaagcaaaatagcagaaaattttgtatatgcaaaactgttgaaggaccatagagaaatgtgtactactgacggggcttttactaggcttcctgcgtgtgtaaaagtcgaggtattgctggcattcagggtgacatgatggtactaaatgttttccattaaagtcttctattttaaaatttagagaaaaataaaatggctttccatcagactttctgtgttgagttgctatcgtaagacggtgatgtcttttggtaattagctgtcagaaatcacctcaattgggaaggcagggtacttttataagcagcctgtgatctttgaagaaatacagtctaggccgggcatggtggttcacgcctgtaatcccagcactttgggaggctgaggcagacggatcacctgaggtcaggagttcaagcgattctcgtgcctcagcctcccaagtacctgggattacaagtgcccgccaccatgcccagctaatttttgtatttttgtacatggtggccaacatagtgaaaccccatctctactaaaaatacagaaattagccaggcgtggtggtgtgctcctgtaatcccagctactggggaggcaaggcacaagaatcgcttgaacccggcaggt

SEQ ID NO: 11085 - DNA, 2003 bp, Homo sapiens
ccaggttctcctcaaaatctaagtctatggacaaatcagatgaagaactccagtttcccaaagagttgatggaggactggagcaccatggaggtgtgtgtggactgcaagaagttcatttcggaaatcatcagttcaagccggcgcagtctggtgttggccaacaaaagggcccgattgaaaaggaaaacgcagtctttctacatgtcctcgccaggcccctcggagtactgcccttcagagaggacgatcagtgagatctgagcctcgtgcctttcagctgcttttgtgctacgagtcagcgtccgtgcgcgaggacactgagccgggctggctctcctttctgtggttttatttaatgggcttgaatttgcattagatcagatttttgccgcatcacattgttccacagactgaatgctgtgttcgtatcgattgatgaaacgtgacaggtccgccaattgctcgtttgcactgagagaggacaacagtttgaaacttacttttgtgtgtgtgtggctttggaagccagtagctacttccttagttcagttctttactgttcctcgaataatctcctgactaaggcaaaaaaaaaaagcttctcctacgagaatcagtctaacagagatgccgatgtcagcacagccctaagcagtaagtcatattggcatttccacgtgactgtgtttctatcccgtgtacagagagatccagagccctacactccacgacctgggggctcacagcacagaacctagaagcacctgctgacactcttcaactgatttttaaatgttgttgcttggagataaaaattacataagggactttttgcctgcattctagtgcaaaacatctgaagagctgtacacccacaagggtgactatttcccctgagtggccgtgttgtcccagtgccctggttcagtgtctcctgagtggatgacaggtcttcattctctatcttgaatgtattatggttactaatagttttataatggaggtctaagaattaaagttgtgtgggagtttcaggacaaaggaaggctaaaagtttgtcaagacgttgagcgtattttggttacctatgagaagggttgtgacagtgtacagtggcagctgttggccacgctgcagaaatgagctggagctcatgggttttcagctacatttttcataactttgtagtacatccatcttgagtaaattaagccacaatttggtacctagggtctcaaactaaaatttatttttataaatgaattttaaaagaaaaaatatctacttcttttaaagttagaagaaaattaacctgctgacaggcaacatttttggggtgctttctgcactagttttccttgtaaatgatttgagtgagtaggtttggtttctgacgaaagtagactggagggtagcattgtatgcctcaaatgtctcagtgtgtttggctcatacgtgggctatactgtattattttggtatgcttacaaatgactaaccaatcaaattgtcattaatgtttggaaaatctgttaatgcacatgcacaataatttcctgaaagccataggacatgtctgtagtcagcaccacgatagcaccgtttcatgaaaggcatggcggctgcatttcataccacatcaaaatacagtaacatttctatactaaattaacagtaatacctcaaaactgctccggtagtagtttttaatggattgaaatttacagtttagtaaaaggcttaaaattacttatacttatgaaataaactttaccagttgactaaaataatgcatgttaacagttggtctgtatttgcatgtaaaagtgggccaccagagaacccttattgattacttaagtgtttacattattttaaagactcctgtttaagagctttcagaattgtactgggtgaatctcatttataaaacttcctaagagactatctgaactctatactccagacagttaggtgggagtataaatctaccccttttga

SEQ ID NO: 11086 - DNA, 3087 bp, Homo sapiens
gaggttttaagtacatgcatcaaaacaatttcaggttaccgtggaagataccagattataaagattatttcatgaaacaaataatattagagttgattttttaaagtctggtttttggtcactgcctgtactgcatattttcttttgtaaatagcttctattttttgatctgtattcttattgtgccaataaccatctgtgttagatctgtgatgcattttcccttttccatttgtattatgtcctttaacagaaagcacagctgagtacaagctaactggagtaactttgctgttttgctgcttgttgcatgcacacaggaatggaaagcgagctccttttccccttccccagcgccgtttgacctctcccaagatacaccagcagcctgcttactactaaacgcaatccaaaaggcctttaaaaatacagtgtatattttttgtactagtcagtttattgacactatttgaaacttttgaaatataaacggagaggctttctgttgagacattgtcaccaaaacaattttttgaaatgttcctgaaactaatttgggtttaaagattaaaagggttgttaccattcttatctgagtagttgggaggaggggaataccactttagttcatttggaaaatatagacatatttcttttgctttcttaaaacagcttaaaatgatgaacttttataattttaatttgaagattgaataaatattttttataaagattgttttgagtgctgatttgtttactttttgtagatttgctttatccatgatattcagtacaactctgtcatttctttgtaatatttaaaaaatattagtaaaggagtgaattaataaagtagtaatagtaaaatgaaaggaacttgactgtacagtttgtagccaggttaagcatttggtattgtttcatttacaatttgggactaagatggaaacactttttttataagtttttaattcatagtcactaaagagataaatgtttcttatatacatttgtgtatttttatggtgttatttattccatggcttagcttccttcaaatcaaaatttggacacacactattaagagaagccattaaaattttactaaaattgtgcatgtaaattaattgtcagcattccatgtctcaagattttcttaatttagttcgctgtttaaattaattcatgtcctgtaaagttctgaccttgataacaaagctataaatatttaagtttgctaatatgcgtaagtattatcggtaagttacaagatggaagaagaataacagtagggcacagtcattctgtgaatccttttacttatcaaaatttggtagctattctaaggcttttgcagaaaaataagtgttcaatgtttgtagttcttcaaaagcatgttgcagtagccagccatactatgtgtattcccagtatcatgtacgcactaaaaaaaatgtgtgcttgctgctgctgtgagtgaaccattgcttaagataaaaaacttaactagatctgtaaatgtacagaatagcatcagatgtttctgagagattagaaaatgttttgaatttataaaattaatgtttttctttgtaacatttatatatattttttaacattttaagtttaacagattgtattcctttcaagtttctatacttgcttaagcaatcttgatttgagtaagggtcttgatttgtgctattatgttctgttagttttggcatgaatatactaaagcttttttttttttttctagcatgtgttttctcctctttggttctctttgtatttactacttttctctttttcttgtgttttttttttcctgtttttgttttgtttggtgttttgttcctgtcttcattgtttcaggtatttctttacccctctggattccccacgggctggatcgagatggtccagttatgcccagctccttcctcctcctcctcctcctctggtagagcactcttgcgatgctgacactgccaacctccagtatcctcaccctcgcagacgatatctctctcggcctcttaatcccttacctgagaatgaagggatttaaaacactgatttaacattgaaaggccttattcaagtgcttgtaaatgctttcatttctggctgctttttgtttttcattttctttcagaagatttttctaacttagggtctgtcttgcatgtattacaaccagaatacagtgtttggaacctaaatctgtttgtgcgtctgcatcaaaggaacatttgcttcactgggtgataacctttgatgaaatgagatatgtccaagtaacgttaactgtgaagttacacacagtagctgacttcaaagtgcctgttctgtaaattttattttaaactgttaccatagtcttaagttgtttatgctttatcagactggctaatgtgaaagcataatattatgaagtttattctgccttatgagaccttaaaaaatggatttcattttacaggctaatgttgtaactgactagtatgtaaaataaatcattcctgtgtataaagcagcaaaacctaatgtggactttttggtcttttttttttttttttttttttaaaggaaattgcctttcactacttggaattactgtttaaagcttttgtaattattatccaagtaggttatgtaataaaatatatttaaaaatatacgaatctcttgccttataaaaacagaatgtattttatttaagataattgccaaggcttactcttctttcactatctcacaaaaaacccaaacaaaaattaggagatgtgagcaaatattacatttatttaaaaggtagaaagtcagtatgtagactactaacatttagaatggacagatgttgactttcagtctaattagtcaacattagaatattttctagaatattttaaaatgagaatgtacttgattataattgtggtaaaatgattaaaactagtaatatgcttgttggttcagttttgtcaggaattgtcaagggtttaacctcttatcagggctagagagagaggtgttttgaacagtatttcatgtaacagattacatgaaatatcaggtaatcac

SEQ ID NO: 11087 - DNA, 1218 bp, Homo sapiens
tctattatccagaataactctgatacaagaaaagcaactgaaactacttctctgagtagcaagcctgaatatgtaaaacctgactttagatggagtaaagatccttcctccaaaagtggaaatctgttggaaaccagtgaggtaggttggacatcaaaccctgaggaattggacccgatcaggctggctctcctgggcaagtcaggtctgagctgtcaggtggggtcagccacatcacaccctgtgtcctgccaggagcctatagatgaagatcaaagaataagtcctaaagataagtcaactgctggccgtgagttcagtggccaggtttctcatcagaccacctctgaaaaccagtgtactcctattcccagcagcacagttcacagctctgtggctgacatgcagaacatgcctgctgctgtgcacgcactcttgacacaaccctctctcagcgctgctccttttgctcagcggtatttgggaacactcccttcaactggaagcaccaccttgcctcagtgccatgctggcaatgccacagtctgtggcttctcaggaggccttccctatccagctgttgcaggagagcctgtgcagaactctgtggctgtgggaatttgtctaggatcaaatatcggctctggatggatgggtacctcttccctctgtaacccatattctaataccttaaatcagaacctgctaagcacaacaaaaccttttcctgtgccgtctgttggtacaaactgtggaattgaaccatgggattcaggagtgacatcaggattgggtaagatgctttttctctattattattacttgctattattttctcaaatgacaccacaaagctagtttgtttcaaggagttactggttagcattaattccttgtaagttttgtgcttcttcctaaactgagaacaccgtgtatttctgtgcaagcgtccctaaagttggcttagaaaaacgctacacttatgcaggtgacaggctgcctatggctctgtcttccttatctctcttttgctctgccattccagttttgtgattatttcccctaggaaatgtccagtttagaattgaatcccagaatgagtgagtgcctccaccttgtgagtctctgggtggctgctgtggtggagaggcagcactctcgggtgcatttgtggggcagcttctctctgggagctgtgcttttactgacatggtgcac

SEQ ID NO: 11088 - DNA, 1027 bp, Homo sapiens
tgttttgttttgtttttttgaaacggagtcttgctctgtcactgaggctggagtgcagtggcatgatctcagctcactgcaagctccacctcccgggttcaagtgattctcctgcctcagcctcccaagtagctgggactacaggcgcgtgccaccacatccggctaactttttgtatttttagtagagacggggcttcaccgtgttagccaggatggtctcgatctcctaacctcgtgatccgccagccttggcctcccaaagtgctgggattacaggcgtgagccgccacgcccagcctagaacaagaaagttttagcgataacagccatggttcacgaggagccccacatgtcaggccctacggcgtgcacattccttgggtcttcacaactgtcctgccaggtaagtatcgctgttgctgttctatagatgagactttaaaacctgtcagggacattaattaatttgagatgaagctaatattcggaccacccaggtctattaagattcaaagcctgtgctgccctttaactgtaagcgggaaatattcaaggagccagatcacctgggaatcccatgccaaatacagcgcctcacctactgccctgaagccctggcccccgggcccgcgtggagtggcccccgggcctgcgtggagtggcttgctctaggtgctggtgtaggttgccagaacgttttgtgcttatagatgactggtaacagtggagacaaatacaactctgtaaatgaaaatggcttcgtaagcagggaaagtgatataagagccgctatatacagctgcagttttttttttagaataataaaaaaaaatgtatgtgcttactagtaagtcctttagaaagtatttttagtcaccactctgctatgttcaaaaactgagcttttgcacttctgatttttttagcatgaaagggtaaagttgggtgaatgaggtttgcattattaaggcaaaagctagagtcttgacagaaacatgacattaagacttttgggaagctgtttt

SEQ ID NO: 11089 - DNA, 1106 bp, Homo sapiens
tgtagtattaagttagtactaaatgagattgcagaacgtactgcatcatgttccctgaggacaatgggagtcaagacctcattcttcctttctggacttgaatggtctgggggaccacacctccttcccagaattcatctgcaatcatgaattttggcctgaccttctggttcttgaaacatctttcccctgcatttggcgcttgtaacttgtctttgagaaatgctgagtcaggccaattgatgatattttccctctagaatttttcctttgtgacttttgtgtcaagtttgttcattttaagtagtcaaaacaagcttttaattgtcttgcttcttcagggttaggctttgaaaatcaagctgtattcttctttatgcatcattgacagtcaccaacaataataattacagatcataattatcttgtggcaattatgataagaattattttcttagtagaaagaatgcatcctgatttcagaaacctccagggcagtgtataacatgaagcctgttctttgttccggtgacttgattggacagtcatagtggagagatgcacaggccgccagaggcattctcagagtatcaagtctctacagatgaagggcgcttgtggagaagcatgtttcagtgcgttttctctgggacaacatgccccataagaaaagttgaatacaattaaacacgtcctgcctgcagccaaagcagattttcactgtccttgaaagtgaggattgaacacaacctcccttccctctccctccctctgtccagcttcttctcttttggattttgaacaatgtaaatgttagaaaaactttgaagtgagaaagaaaaagacaaatttgccctgagcatgtcaggtacacgttctgcttgacgcttctgtgtgggcctccctgttgcagtctctaggggaggataggcacactgtctccagaaagaggacagtgaacttccagctgcatttgactgatactaggccatttttagttcttagagaaacaacattaaaacctaaacttcatcctttttattttgataaaacgaacttcccctcattttttaatcaaatacatggcaaaggtcagccttatcctc

SEQ ID NO: 11090 - DNA, 1243 bp, Homo sapiens
atggggattttcctcttcagaagctgcttgagagcctaagaattttcaccaaattatgaacaagacagattgttttatttattgtaatcatatgagaaactgaactcttatttatttcttctttaggtatttacttggtgtttgcctttgagaaacagcagtgagcacataggcagtagtcccagaggggccgtgttctgtcctgcacaaatttgaacaactcatctcgatatatttgatatttctctgtctgttgattttaattctaaatgtgcaggatgctgccagaaactccaatgtagaaattcaacatttgctgtctgtgacagatgaacttttgcatgtgtatataagaatgagttgggacctctgtctttaaaaatctatttttaggtaatgttctaagaattccatttgcctctatgatcttagctcataaaaatataatatgacttgataaagcaactaaactctttccacagtgttcagatttgtcctgtgtgtgtttacagtattcaatttattgcagttatagaattggtcagagagcattttcatagtgtgctcatttctatggttttgttatatagcatttttcaacatttaatggtctgtacagttgaatgtaagtgttcaatatgtattgctgaagttataagtttaaaactcaatttcagatgctcataaaagttacttagctaaaattttagcaatttattgcattttgaaataatcattaacatgctgcaattcaggagctggttagaacattttaagtggcagcatagaattttggaattttggggctttcttttcagaaattgctaccatagtaattaatgtttccagttatcaagattgtgattagacacatttacctttcttcattgaacaaatggtgccatagttatttttctcaaaatttagtgaaaatccctcccatgtagacatgttgcacattttttccaaatttatacatggaactgcagtaggaatattctcaccatctgatgccatgtacccacttcagaaataagcaatacttgttcctctgttacaacctcagcactttgcaccgtaggagccattgttaaagttgtcacttgtgtaactgactgcttttccaaaactggtacttatgtgaactgttgtccttgctttacaccaccatttggaaaacttaccagtttttagatgtagatgtagtgaaaaacttcaagaatgaagcagagcaattgagtat

SEQ ID NO: 11091 - DNA, 1417 bp, Homo sapiens
gatattgaggaagcacaggacatccaagggtactctccagtttggctgtggagacttgagcaagccctaaagtcccctgctccctggacttctcctgggttgtgcttttttgggggcaacataccttggacaaagctgagctgacagctaatgtttattagcctcctacctaagtcagtcactttgctaaattcttcacctgtggtaactcattttgattgttataacatctcagcaccgttattcccattttaatgatgaggaaactgagtcatagaggatacagacttgcccaaaggagagccaggattttcacaccccctcctcaagctgggcctgccctccaagtgcttgttatatacctccacgggtgtcagcccagatgactcctcacccatccaccacctgcagcttgagatgttaactattagagctccattcttttggttcaaaacgttgatacttacttagatgttccctgagaggagtgtttatttctgagtaaggggctttgttgaaagagggggttagagagagcaagacagcacttgagtgcactggcaggaagcagagataagacttgaatttcagtttggtagaccaccttctttagcagcccaacctgtagcaaatctagtttagcctgcatggcagggagagggattctcttcccaccctcaccatttgcaagtggcaggagctgagaatgccagtacgagagtgtagccaaagtgagaggctgagagcaaaggagacatttttttcagttttgagtcgagtatccagacagaggcaaatcattttgtttaactttttattaaagtgtaactatagaaacacatcaatgatttttcacaagtggagcacgtgcatacaatcggcaccccagaagccccccgtcagattcccttccagttaactacctctccaagggaaaccactatcctgagttctaagcgcatagattagttctgtctggtttggggagatatataaatggaattatgcattcttcgtatctggtttcttttcaccaatattatgtttgtgagatttttgttgcatgtatttgtacatggattttcattctcatggttgtataatatttcattgtgtgaataaaccacatactgtttatctgacagctgtttggttcatttaccatttggaaactagtactgatccagatattctagtacatgaattttggtgcacataggtacatacttctgcttaggaatgtgctacaatttgaatgtttgtccttctagatcttatgttgaaatttgatccccagtgttggaggtagggcctaatgggaggtgtttgggtcggggggcgggtccctgatggatagattaatgccttgcggtggtgggagtgtgagttcttgctcagttagttcccaaggacaagt

SEQ ID NO: 11092 - DNA, 2057 bp, Homo sapiens
tccctcaacagttaaccatgtgactgagtgccctgtggaatcgtgtgggatgctacctgataaaccaggcttctttaaccatgcagagcagacaggctgtttctttgacacaaatatcacaggcttcagggttaagattgctgtttttctgtccttgctttggcacaacacactgagggttttttttattgcgggtttgcctacaggtagattagattaattattactatgtaatgcaagtacagttgggggaaagcttaggtagatatattttttttaaaaggtgctgcctttttggatttataagaaaatgcctgtcagtcgtgatagaacagagttttcctcatatgagtaagaggaagggactttcactttcaagtggaacagccatcactatcaagatcagctcatggaaggagtaaagaaaatatctcaaaatgagacaaactgaagttttgttttttttttaatgacttaagtttttgtgctcttgcaagactatacaaaactattttaagaaagcagtgatatcacttgaacttcagtgccctcactgtagaatttaaaagccttactgttgattgcccatgttggacttgatggagaaattaaatatctttcattatgctttacaaaatactgtatatgtttcagcaagtttggggaatgggagaggacaaaaaaaagttacatttaatctatgcatttttgccaagccatattgagttattttactactagagacattaggaaactaactgtacaaaagaaccaagtttaaaagcattttgtggggtacatcatttctataattgtataatgtatttctttgtggttttaaatgataaagacattaagttaacaaacatataagaaatgtatgcactgtttgaaatgtaaattattcttagaacactttcaatgggggttgcattgtccttttagtgccttaatttgagataattattttactgccatgagtaagtatagaaatttcaaaaaatgtattttcaaaaaattatgtgtgtcagtgagtttttcattgataattggtttaatttaaaatatttagaggtttgttggactttcataaattgagtacaatctttgcatcaaactacctgctacaataatgactttataaaactgcaaaaaatgtagaaggttgcaccaacataaaaaggaaatatggcaatacatccatgatgttttccagttaacataggaattaccagataaatactgttaaactcttgtccagtaacaagagttgattcatatggacagtatgatttattgtttatttttttaaccaaatacctcctcagtaatttataatggctttgcagtaatgtgtatcagataagaagcactggaaaaccgatcgtctctaggatgatatgcatgtttcaagtggtattgaaagccgcactgatggatatgtaataataaacatatctgttattaatatactaatgactctgtgctcatttaatgagaaataaaagtaatttatggatgggtatctttaatttttactgcaatgtgttttctcatggctgaaatgaatggaaaacatacttcaaattagtctctgattgtatataaatgtttgtgaaattccatggttagattaaagtgtatttttaaaagataaaacgtggtcttgggctctaaaacaagagtgggaatagttcacatgaaaagctggctaaagtgtgttggaaaacaattctccatgggtctcttgcatttctacacatcagggaagcagaggctctgacaacctttcttttgactatcttttccaaggatatttatgtagtaaacagccttggaagatagagttctcccttgtgaggatgtcgggttcttttactgtccagtataataaagataacgtctcccacctatgatgcaaacccactgtgtgctcagcacccacctgggccactctgcattgcccacatggggcttggagggcaaagggaactgatggaacgtgaaacttatgctgcttttgctgtgctgtgaatgaagtcatctgactctgaccc

SEQ ID NO: 11093 - DNA, 1177 bp, Homo sapiens
tacaatttaggtatttctctaagaatagtattattagttaatacctaacatttgagtgtttgctatgtgtcagaccctgtgtgtttagtcctgcattattttatgtaatcattacgacagtcctatgaggtagggtttataattgaggaatctggaacttagatgataattaagagccgtttgtgtgaaaagtgttgaaacactgaactaaagctgtgatgtggagatgaagacgagacagatacacattgaaaagataaaattgaagaattgacacagttgaattgataggaatttataaacaaccagaaaaagatcatggcaaagaggttaaggtaagtgggaattttggtttgggtaattgaattagattgacagatgggaatacaggggaattaggttgggaggattggatggggatgtcctcagttttggtcaagattttaaggtggttgtagaaagagtctcttaagtggagaaaccttttagtatacaattggatatgtgaatctagagtttcagaaaggttctaactgagaaacaaatttatgagttcacttatttatttgaaggttcacaaggtcaccctggggtttgtaaaatgagaaggtagaagagagttgtgaggtacaccatcatttaagagtctcaaagaagactgcctaagaaggcatgagcagcaaggtaggagagccagaagagagtggtagaaaccaagggaaaaatgtcaagaatcaaagaatgatcaaccctgtcataccacagttgaagactgaagagagcccaagtgatgttaggaaaagagcagtctcagtggagtggtggaggcagcagggacacggtgagtgtacactaatggccacagactgtagaagagggtgagtctgtaattgctgactatataaaggtgcttatagattttttgttagcagccctcatgtagttgttggttgtttataaaaatatctagcatagagacatggtaagagccacaaatatagtcaggaactacaagattttatgggcgatgcttttatctgcatggacacacagataaaaagcagtattttactacttcataatatgcaagagtgaacttggtttatctactgaaagcctgactgttgtaaggacagtcagtgagtacaacaaacctgcagtgttattttaattgttc

SEQ ID NO: 11094 - DNA, 1265 bp, Homo sapiens
aaccatatggttgttccattttcataaaattggaaacaatgcagtaatagcttattgttttgttttttaaagaagatattttattatcttttacagaaatttatgattgatgtattttatctatagttatttagacatgtttacatgcagcagataattgttcatagtggactgaaaactaatgcaaggactatggtctcagtgataagtatattttgaagttcttaatatggaaatataccagtgtagcttggtactgtatttttttatattgatctgctgataccagtgataggcttaaagattgtattttcacagagtggaaaccaatttttttagttattgttcaaggagggtgcaatattaagtgttttggaatttgaagctaatttttaaaaggcctgaactatactttgaagaaacccctatagaaaaggaaagctccagctaaataggaagaattagaatattgagcttttttttcctgatttttctctttcctatctttgatggaaggaggaagtagaaagtggtaaagaattgaggctttccttcttggagagctgtaaatgacaagcattaggaaaggtaccctcctagattcattattctttcattctggtttcacttttaaaataaatggcaacttggcacacctaggctgttaacaaatctcaaagaggtttataaaaacgtatagaatacttggaagcaaagtatggatgactcggtatctgctttgttattcctcagaaatactgcactgagtatatgccctcattactggacttcattttgatacttgtctatccttcatagtgccctctacttttaaagggtttatatgttgaaaaactgctgtggccttttatgacctgtatataatgtagaataaaaataataaaatacttgatagctttttctaagtgaccaatgtactaactgagaataatggtgtgttgtcatttgtgctttttcagggtgtttttttggtttgatatcttgaaatatgattaaaacattggcttcctaaaggcagtttccaccagtttgccaaaggatcattgtgtcagcagcaaatcagctgaactttatttccaaaggcaaaatcctttctgattattttagtaacatagtacttttatgatgttgcaaataaatgaagggcccacagcccaagaatgaattaccactgtggttcaacttaggttatttttgtgagctgaaatgatcatatctcagttgaaaactggctaaaatttagg

SEQ ID NO: 11095 - DNA, 2156 bp, Homo sapiens
tgttttttaatttttcagaaacggcagcacaaaaggaaatctatattaatagaatattttgttgaacaaaggaggttagataagaactgcaaaccaacagactcagcaaacaaggaaagaaacgtgttagccataagacatgtttcaagtgaatcgaagtccaataactgtagacttcagaagaaaaaagttttcaaaaattttatcaaaacaggtcactgataaataactcctccagtaatagagctaggcctgaaaccaaaattaattaaaaaattaacaaaacagattgaacctgaattaaatttcttttgataaaaaaacttattaaaaataatcaaaattttcctcaaatttttattaccttgtccaaagtaaagcaagtgtcttttagcattcatgccagcttttctcatgttctaggaatgacagaaaccttacttgaagcaaactagtatttttgttgaaaatgtatatcagcatcagttaaagttgatttttcagacctgctcctcagtaataatactagctagtcagcattcacgcctaccaggacacaaaaatcctcttcaaaactactcagaaaagaaagtcattactcaggaatgatgtccattcaggagaaatcaaaagagaattcctccaaagttactaaaaaaagtgacgataagaattcagaaacagaaattcaggattctcaaaagaatctagcaaaaaaatcaggtccaaaggagactataaaatcacaggctaaatcttccagtgaaagtaaaataaatcagccagaattggaaacacgcatgagtacaaggtcatcaaaggcagcatctaatgataaagctactaaatccattaataaaaatacggtgactgtgaggggatattcacaagaatctacaaaaaagaaattatctcagaaaaaattagtacatgaaaaccctaaagcaaatgaacagcttaaccggagatcacaaaggctacaacaattaacagaggtttcaagaaggtcgttacgcagtagagaaattcagggtcaagttcaagcagttaaacagagtttgccaccaactaaaaaagagcagtgtagcagtactcagagtaaatctaataaaacaagtcaaaaacatgtgaagagaaaagtactggaagtaaagtctgactctaaagaagatgaaaatctagtaattaatgaagtaataaattctcccaaagggaaaaaacgcaaggtagaacatcagacagcttgtgcttgtagttctcaatgcacgcaaggatctgaaaagtgtcctcagaagactactagaagagacgaaacgaaacctgtgcctgtaacttctgaggtgaaaagatcaaaaatggctacttcagtggtcccgaaaaagaatgagatgaagaagtcggttcatacacaagtgaatactaacacaacactcccaaaaagtccacagccatcagtgcctgaacaaagtgataatgagctggagcaagcaggaaagagcaaacgaggtagtattctccagctctgtgaagaaattgctggtgaaattgagtcagataatgtagaggtaaaaaaggaatcttcacaaatggaaagtgtaaaggaagaaaagcccacagaaataaaattggaagagaccagtgttgaaagacaaatacttcatcagaaggaaacaaatcaggatgtgcaatgtaatcgttttttcccaagtagaaaaacaaagcctgtgaaatgtatactaaatggaataaacagctcagccaagaagaactccaactggactaaaattaaactctcaaaatttaactctgtgcagcacaataagttggactctcaagtttcccctaaattaggcttattacgaaccagtttttcaccaccagctttagaaatgcatcatccagtgactcaaagtacgtttttagggacaaagctacatgatagaaatataacttgccagcaggaaaaaatgaaagaaattaattctgaagaagtgaaaattaatgatattacagtagaaattaataaaaccacagaaagggctcctgaaaattgtcatttggccaatgagataaaaccttctgacccaccattggataatcagatgaaacattcttttgattcagcatcaaataaggtaatctgtttttattatgca

SEQ ID NO: 11096 - DNA, 1138 bp, Homo sapiens
caggaaccatttgttaaaataagatagtactaagcacttaatggaaaaaataattccagggctttcattcatattctctagttagttattgtggttctaatgcagtgatagtaagttatccaggcataaaagtgagtattttcaacacctggaactttgtgttctgatacaaggttgaatagtcttttatagactctacttttactcagtctttgttataactcatattatttcaatttttgagtctgtttggcttttttctttttttaaaaaaagctttctagttctaaaattttatacttatagggaattctcaagaccttttaaaactagatggtacctgaaactaaaatatctacatgttatttaaagataatgcagctgcctgttgttgtgaggtttttttctccctttattcaattgcctctgaaattacaggtgagcagaatggcaacaggaatcctggtggattgcagattggtgacctggtaaatatagatctcgacctcgaaattgtacagtctttgcagcatggtcatggaggatggactgatggaatgtttgagactttaactacaactggaactgtttgtggcattgatgaagatcatgacattgtagtacagtatccaagtggcaataggtgggtgatatctctcaatttttgacaatgacaaataaaactaatatagagaaaagtcttagagaaagcaaataaagtgatacaaccaaatactcattaaagctagcttttagatggtaagtaaaaatccagaatatatattggtaaggtggagagaaacaaatgataagaattacgtgtgtgtgtgtgtgtgtgtgtgtgtgtgtcttgtgtgtgtatgtgaatttatatgaggatgtttatgatacagtgttctgtacactatttttccttcaagaggagaatacattatatcactattaggtctgaatacagcttaaaagttctgtgttcgtattggactatatcagtctaccctgaataggaagggttttacattaaaactcctttggtgcatatctccagggtcatctcttattttttgtttttattgatacacaagaggtgtacatattttgggatacatgtgatattttcatccatgcatacaatgta

SEQ ID NO: 11097 - DNA, 1061 bp, Homo sapiens
gaccagccaggctaacatggtgaaatcctgtctctactaaaaatacaaaaattagctgggcacagtggcatgcgcctgtaatcccagctacttgggaggctgaggcaggagaatcatgcagtgagccgagatcatgccactgcactccagcctgggtgacagagcaagactctgtctaaaaaaaaaaaaaacaaaacagaaaacaaacaatgtatcaatatatatgtatttgtgtatatataaataaacacaaatcattcaggatataattgcaaaggattgccttactcttttgatcttcactgtttaagaattttgtattaaaattaagcaaagctacccattttgaggtttagctttgctcttgtaggtggaccttcaatcctgctgttctcactaaagcgaacattgtccgaagtggagatgctgctcagggtgcagaaggaggcacctcgcagtttcaagtgggtgatcttgtacaagtttgttatgacctggaacgaattaaacttctacaaagaggacatggagaatgggctgaagcgatgcttccagtaagtatgtttagaataattctgggctagaaattacaatatacttatgtcatttttaaaagtaaattaatgtagaaattaaattggcataaaacttcttagaattgtactctccatttgcacctagacatactcgtgcattttgttttctaatttatcccagttaaattagcctgggaagatccagaaaaggttacagttaatatttaatattttttgatagagtggttattggagaatgttgtgtggtgcaagtcagcagtggtttttctgatacttaaccccagaatgatataggtctatgcccatctggtctctagcagtgctggaccagtgcagctttcctgatgtgggggcctgcctctttaaaacttgagtatgaaagagcagctcagaaatgtgtgtgctttcatagagtgaatttgttcccaaagagctacagttttttatttagtcattttttcgtcaaatgttcatcaacaacaaacaaatttgcttgttctgccc

SEQ ID NO: 11098 - DNA, 1187 bp, Homo sapiens
gaattttcaacgaagaagagtgaaaacctatggaataaaattttgggaaaatgaacaggtttaggaatatgaggaagggaaggaaaggaactggcagaaatcagatgattccaaaaagggtttaaacatagatgtaagcttgagcccttcttggccaaattagtttatttttttattttttgttttttttagaaatccaattttctttttcaggctatattgatgatagattttagactacttgagttgcaagttctcaaaatgtaccttacagatttcagaagtaaggattgaacatcaaaatagatgtttatgaactcgtatgaataggatagactttatcatgatttgtctcatattcttgtggaagtagttttattattattttaaaagatattttttaacatttgtacttattcaaataacccatttcagtatggttatcctttgaaagttttttcattagtaataagtaaaatcattactttaagcatataaaaactagtgattgactttatggtatatactttagacttggaaacatgaatctatttttttccccaagactttaggtaaagttggccgagtacaacagatttattcagacagtgatttaaaggtggaagtttgtggaacatcttggacatacaatccagcagcagtttccaaggtggcatctgcaggatcagccattagcaatgcatctggtggtatgttttatattgtgtttctttaagagtaatgtggtttacattaaaacctttgctaattccccagttctcatatacagataatgttgtacatgtgcttggctttgtcccagattacacagccttacttgaatgttgaccaccttttaaactttcactaaaaatttttgttttttataatgtgttgaacaacctttattctggctgaagtactccctggagaagttccataaaatgtgtgctttttcttgggcatatcaggggattttccacatcaaatttgagattcctaaaattcagaattctactctttagtcagaacttttgttttctgccaaagaaccatcactttcttagacttctttattttttctgtatttccaacattattgctagcagatggctttccttcctgtatatttttacatatcagttattttttctcttaccatttaatgagttgttatacatgctacc

SEQ ID NO: 11099 - DNA, 1202 bp, Homo sapiens
acactgttcgtatttattgttatttgaaattcctcttgatatcctccatggctttcttcatgaccatacatttggagaaaattgaccaaaagagaatggaatcaataataacagttccttgtttgtttacataatagaagaattttgaacattatgatttggtcctggtggaagtgcttaaaatatctcaagtcatacatctaaagttgaaaagagaaataaagtcctaaatatccctccgttatcatcatcttagagtagatgaattaagcaacatattgattctcatatatttttattttctctaattcaatatatttaaataaccagaacacgtgactctttgtaaggagccacagggttggagaagagtagaaggcaaaagcataaaaatgattagctttagtggtaacttcttcagtaggtccagggtgttctcaccattactttagatatgttgaagtttcttatggatgtggacactttgccaaaatgagacatctttctcttttagcttttggtccgtgcaggtgccaagcttgatattcaggataaggatggggatactcctttgcatgaagctctaaggcatcacactttgtctcagctacgtcagctccaagatatgcaagatgtggggaaggtggatgctgcctgggagccatccaaaaacacggtgagtaaagatcatctttcattcagtaccagtggaagaatcttttcatgcaagatcttatatttactggtaatctaacctgtattggataaaatattttatcagagctatgtacttagaaacttagtttatgaacttagtactagtcagtactaacttattgctccacatttttaccaaaagttgttcagttctgttgttgttgttgttgttatgtggagtcccactctgtcacccaggctggagtgcttggctcactgcaaccacctgggtttaagccattctcttgcctcaacctcccaagtagctgggattataggcgcctgcaccacacctagctaatttttgtatttttagtagagacggagtttcaccatgttggtcaggctggtctcgaactcctgacctcaggtgatccacccgcctcggtctcccacagtgctgggattacaggcctgagccactgcgcccagccattcagttcttttttaacatcagccattcaaatagatacgtagtggtatct

SEQ ID NO: 11100 - DNA, 1918 bp, Homo sapiens
atgtcaggtttttcctttccttccatgccatgggctacccatctcttcccactagatcacctggtgaggagggagcacctggctgactcatgcagagtttggccaatcagagaattgtgtggtctccagctctactttccttaaacaaatcctttctgttttctgagctgcagtgctaaaacagatccctaaaaggtaatagcatcttccagactagtttaattatttcctttataagaatatgacataaatttttattatagaaataatgtcattataattttagtgctagtacttgtgggttttctgtatttgtatcaccttgaaatttgttccatgaatagaaaatacttctttattcatgttttcaatcacttagaattattttaaatttattttgggtttgtgagagataataagattaagaacttcatcatttcagtgactttcctccaactctctgaatctgctacctcttattatatgtcccttagcagtacttttccagttaggttcgttaccctgctcattagctaaacctctttatcttgtgcctcaaaagagcttttacttttcttagaaacatttataaaaaagaaaaaaactgacacgcattcattcaaaaaagtatttattgggctttagggattagatacacaacagtggaaaaatggcatcttagcacactcagaatttattgtgcagcagttgtgtattttaaggaatctgtagttaaaaggaagagatccaaaggtcctgataacatttcctaacgtttcagaagagttgtcattgagtagtgtttggatttcctctctgtatccctcaccctaccattttctcctttattcttctaagattgttagcgttgttactcaaaacatacacatacaacataccagatggtgctgttctaatggtatttgttcacgtaatttaacgttcttactgcttatactatatacatatttaattttgttgggagcaagaaggttttcaagaaaagataattttgtattagtgtaggaatatattagacaaatgtttagttggtcaaattatgcataagatatttgtaactttaaacattgcaaattgaccagctagctatggaagcataaaattaattgataattaatgttggaaatacatttctaaaatttatatttttatggtgttagcctgtaagagcattttagcatattgaaatgcatgctgcttaagatgtgtctggttcaaatatcaaaacttgctgggtcatttttacatagtagaaacatactgtctatgtgttgcccaattgctgtttgtccactctgaattctggaccctttttggactaagaattagttaaattcatgaactaagagaattagagatggggtagagtaggatcaggacagtggggttacaacagataggaaaggaaagtcagcatttgagtgtagagaaaaaaagaggatcatacagatgtcatcaaattataggctttaatacaggttgctttttttaatccaaaaggaaaagcacttatcctatcagaatgtctaccatgttttatagtaataatttgtgtaaaaaattgaatttttgaatagttttttgtattttttgtgatgaaaaactcataacataaaatttaccatattaactgtttctaaagaatacagttcagccatgtgaagtacatttacactgttgtgaagcagatctccagaactttttcatcttgcaaaactgaaactccatacccattaaacaactcccctttttgttttctcctcagtggaatagaattttgactccatataaatcaagaaacacctaaattctttagttgtttgtgtttgcaagatctaaggtcatggtaaacattaagttcttaaaatttttgggagggacagtgcacctctcctct

SEQ ID NO: 11101 - DNA, 1252 bp, Homo sapiens
tttgcttgaatattatgataggaatgcttactgatattacttgatagtcatatatagcctaggaaatttaacatatatataactatagcagtattaataatgatagttgtacttctttaaaacattaaatttgaggaaactttaatgctgtctcgtgtacattgctttactacagtgagggggaatatcctttagattgagcctcaatttactggttagtagtatgtgaaactctggtataaaaacgtaaactagacagtagagccgatgaattaaaattgtaaattgctacattggcattttctacctccttttctgtcagagtattactttttccagcatttattcttatttgtgagtaaagaggaaatgggaacctgaggttaaaattgacatttttgtttcattgagaatttaagcagtaggtacaggagaagtgacttgtcacattaatttggtgcctaaatctgtaactacaagttgtgatcgacatgtacaaaatgtctaagaaaggtcatatgctgaatattttacttttcctgtatagtctgcatgatttgtttcataaacccagcttatttcctccaaaaagcaaaatggtcctgtaatttttaaagtaaaataaacgtgccattttgtctgcaatctataatttcaggaagttattgaaagttctgactcagggctttttaacagttcaagcaattgtcagttatattttggaaactccatctgtgtaattctccagtgccttgaaagaattattaacttggcaacactattaaaactttataaaagatggtctttagtgcacgtgtatcattatatacacgttttaaagtcatattgcttagcttgttaataatgattctgcatgtgtgctgggtttgggtaattctttaaaggaagttttctagatttgcacttgatgtttgttttttaaaaactgattatttatggccgtgacactgttaccagaaaagtaattctaattaagttattatgcaaagtcatctataagtagcatctgggaagaggagatcgaggccacagtttgctattttagtatgaaaggaggatctgtttgggaaacatagattgtcttcccctcaaatgaggggaaaaaaaaaagaccctttgttcaaatggattctgttgtaaaaaattatttttaaaggaaatcacaaattgtatgtcattcttaatgctagtcttatagaataaatccataaaattgtttttatgttcagta

SEQ ID NO: 11102 - DNA, 1435 bp, Homo sapiens
tattttattggcccagagttagcctttctcaattatgtttccagactgtggccgtgattctaaaggaaaatgtgtgctctttagtgggtagaacaaatggaaatttggtttcagaatggctgacagaaatcgacataagtcatgtaatttttgttgatatatcatgaaaatgaacagaattctttttccatacttatatctaagaaaaggcatcataggtttctgaaagagataactatataacagctttttaactatccagtcaactttcagcttttctacatttaggtaaaatggttaggatataactcatggtgtggctaatctacatttatcaataaaatgtaaattatctgaaaggacagaatataagatttaaccatgtttgacgtattttaatttagttaatgaagcaaaattcagtttatatttcactagaactgtgtacttgattgattttcagagaaatatcacaaattagaaatattaaatctaaggatgaaaggtatatataaaacaatttgggggccaggcacgatggctcaaacctgtaatcccagcactttgggagaccaaggcgggtggatcacttgaggtcaggagttcaagaccagcctgggcaacatggcgaaaccctgtctctactaaaaatacaaaaattagccgggtgtggtggcacttctctgtaatctcagcttctcaggaggctgagacaggagaatcgcttgaacccgggaggcagaggttgcagtgagctgagatcatgccactgcactccggcctaggtgacagagggaaactccatctccaggaaaaaaaaaaaaaaacccaatttggataccaaattaatcaactaatttgagctatctggccttactcttagtagtttttagtacgtgctggacaccacttttaaaaagcaatcactgtgctagaaaagtatattggctttgttaggattaaagttcattaacttcaatgtaatcatgcctcctattactgaagtcagattggaaccactaaagatccaaactttctgtctggtaatagaaagtaaaaatctagacatcatttacatttgagaaagctgtttttaacattattttaaaatgccaaatatgttctttctagaaaaatatttatttttgtttttgttggatagcttttaattacatttcagagaggtgtaattttgggtagatgctcattacatttttgaaaggtttatgattccaaaataaagatttatatgactggtgatactggctttacagaaatttcagagaactaatttttaaaatctttagcatttaaaactttttttgttttgttttctgacatattctgacaaagagcagcaaaccactgctgtgtggcattcttggagtgtgctgtgaatgtgctttttaagaaattaaaaagagatcattttaaa

SEQ ID NO: 11103 - DNA, 1253 bp, Homo sapiens
aaagttagcacattctttgctttctacttcagcctcaaggacaggaagttcattctcgctctttacattggggtgttgatgtttgtggttttgttgttttgttcttcatgttactcatgatgtattgatattaattaacctaaatacatatggaaatattctttcattacttagagcttatatagttcctggtgcagatgtgcaaaaatagtgctttagtaattgctaagtcactatcttgcttttctctctactgtgattgagtatttcttacatggaactatagcttcctcttatcaacaaataagcaggaaatagaaattatgtaaataagcaatttccattacctacttcactgacttgacaaataggcatttggtctgctttaattaatatttttcaaaatgttaagtgcctgttgctgttacttaattttgcaggtagcattggaagtttctgtgattgtacttgagtgggcacttcttgttgaaatttaccattgagaccctggtaacactgaagtttgtgttgactttctgtaggtgttttcacagtcctgtgtttggtatggagagtgtggaattgcatatggggacaagaggtacaattgcgaatattctggcccaccaaaaccattgccaaaggatggatatgacttagtgcaggtaagttcattatcttaggcactgggaacacaaaatgctgatcacaagatcctctgtaattattccttaaatgttattgcagggtggaggtggagatgagactaacaggcttaagtcttatcccggactctcaaactctaacctgtggcatacagtgcagagaaagaacaccgtaactccaaaggcttaatttttcaggggctgactttatacctctcataaagtttcccaatagcaggttgctatttagagactgaccttggtacttcgtatgttgcccttgcagcatctgcaaaatatattagaagttagctggttttgattcctagatttcaggactcaaatggactctgttgctaagtggctttgacgtccttgtcccctggtcatttcagtgttttctctgtgttccactgagagcctgtgaattttggctgctaccaggattctgattcctgttctttttttaccatcctgtgatacacagggatattagaactggaaaaatcatgtgaaaagcctggttttagaggcttaaagtaatcaaaagtcaagtcgacatgataacagagttcctaggctcacttg

SEQ ID NO: 11104 - DNA, 1621 bp, Homo sapiens
ttgcctgacatttattaaaatgcatacaagtcagggtgtttggctaatctacaaataagtcttaaacctatgtttttaaatttttttcccttggtttctacttatcttttaaaaaaaaaaatgaaaaaacactcatgagataactgcatttcacccaacaaaagcagggtataaggcgatattggtgatgaaagtcttaggaaaaatgcataattttgctataaaatgtacttatttggaatactattttatatagaggtaagagaacactgctggggaatatgctttttatggttgctgttgccatatttactgaaggtttatacctaaatgtaactttagctttatggaactatatagtaatcccaaatcaagttattttgaatatttttatgctgtcatgcttgaatgttttagatgtaacctttgacatatttagaactctcctcctatacaatgtttattctcagatatagaggttatgtcattttataaagacttcattgataagatggcttttattcatactaatcctcccaatgttaccccttccatcttccaagaagaaaaaaaatgcctgaatattcagaatagatatttctgatttgaaaattctaaagaattaaactggaaaagtatttcatttacttagtgctctgaatttacttttacagttttctgcagtcagtatcattaaaatggttaagtttacatttgaactgaaaatatgtataaaatctagcaattcacaaaaatgccctagaaatatagattttaatcaccattacataatgacaaaccttgttaaatgcttccacttccagtggcaaatgccactagggaaagtaagttgcactcatgtaagtatcaaactatataaaaggaggccttgtgcatttcaagtttgcaaagtacctgtgtacttaaaatatgtgtggagacctactgtacagtagttttgcccctttaattggggcacattcatcttaaatcttatagtatttatccacccaaaccccagactgagatactgctcccaggggcctaggtagctgccagtccgtgattttaattgctgtcttgaagttaacaagtgttataatgaaataatctacctgatgctaaataaaggctttagaatgttccccaaaagtgtggtttcttttaaaatttcaaatatactaatgttgccacttaatactatcctaaattgttagacgtgtcctacgaaagaagtccttgtggtaccatagctcccagggtcaaggagatgataaccagttacctggcatgcatagtggtaagtaggcatttatctatccagagattaactgaatgctagatagatacagcatagagaggtgctaccgtattcattcggtgtgaatctcaaatgcagaatcaagtggaactacctggttagaaaatttgttactagatctgttagagtgggaatagtttaaaaaagtatacacataggagttggaaaatgctattgctttataagtctgaaaagatagatgattgataggccttttgtgtttggttggttggttgtagtcctcctaaattacaaaaaaaagcaatacaaaattgtatgcttgcatgaagtttattgata

SEQ ID NO: 11105 - DNA, 1217 bp, Homo sapiens
agaccctataagaaagaaagaaagatagaaaggaaggaaggaagggaaaagaaaagaaatagctggatgtggtggcatactcctgtaatcccagctactcgggaggctgaggcaggagaatcacttgaacccagcaggcagaggttgcagtgagccaagattgtgccactgtattccagcctggacaacacagcgagattctatctcaaaaaaaaaaaaaaaaaggaaaaaaagaaaaagaaagaagtgtaataagagggaaatgtgcttatgagagattcgtcagagagatacggtgtttctgccttagaaactgcaggaaagggggctgtgagccaaggaaggtggacagtctctagcaacgggaaaagcaaggaaatgaattctcccctagagcccttgcaacaccttgatttttcccaacaagacctattctggacttctcaaatacagaactgtgaggtaacacatttctttctgttgttttaagccaccgagtttgtggtcatttgttatagcagcggtagaaagctagacactctaatagaaaaagcagcctcatgctagcaagcatgtaggtgttctcatttgttttctgctgtatttgctacttttactgggtttttgccttttgttttaaatcaagtcatttccctctggcagcaaaactgctgggtttcactgccaggcctgccctggtcagacttgtttggggaggtggggaggactaatagcctgtggctagaaagctaaagactcccagtgttcttcctccaagttcctgccattcctctggagtaactgcctctcagtttgtttctttaatggatatccagcaccacaaaatggttagttttgacaattttgtccagctttatgctcattttttcaggataacagttgtcttatcctttcatagctaaaagttgctttaccccatattaatgtttttttgattatttaaatgatatgcaaaattaactatgacatagagtgtatttcttgtatattctagttgttgaccatagtccaacatgatacctaaaggttatttcgtaagcacgtgattggaagctttatgtgaatttatcatgagttaaagaacaaatttattattatattgtttcacacttttcattattctaatgactagatttaactaacttttaatacgttaccatgagtcaattctgtatgtgctaagcatgtttgaatta

SEQ ID NO: 11106 - DNA, 1156 bp, Homo sapiens
gtttgattaccaagcaaccacccacccatctagtccttgtgtaccccctccccacctccccccaacacaaaatttaatacgaaggaaccagtgagacacccagcaggagtacacagataatgtggggcagagctattgggggtgggagtcaggggtggagattacctgttaaaaaagagaaggtggaacagagaagataggtttatcttttcacgtgtgaatggtcactacaaagtatgggagtgcatatatattatattttgactcaatagtggccaaaagcacagtaatgcagtagcaaggctggctccagtcattgcagtagcgcctagcaaccacccagagagcagaacatggtgacctgctcttaagaaactcttggcctggtgaggctcatctaggaatttttgatctactctggtaatgttgaatttgaataccttataaagtagtaagaataggattttaagatgtgtacatttgttgacttttaaaaaatcaatttctttcagaatgaggaaattgaagcaatggcagccatttatggcgaggagtggtgtgtcattgatgactgtgccaaaatattttgtattagaattagcgacgatatagatgaccccaaatggacactttgcttgcaggtactttttcccccttccttgcagccatctttcagttacagtatgaactatattgttgacttctgtattctaatgattgtgttgttttctaaattatctttgttcttggcttttctcaatgattaaacacatgggcagttacatctcagatcactttcaaatcatacattaattgatagttccagtctttctaatccaatgcttttaatcatttaaaagtgttaatgtacccttgagagactgtagttttgcttcccttcattattctcttcatctggtaggagagggtccaaacctggaaagatggctaacatttaaaaggaaagagaggttagtaatgtagatgactcgtagaggagacagtcatttctttattaattgagaatcaatgatcaatgatcagttgtagttaggataaaataaatgaaaaggtcagctatggcttttcttagtgcttaatctttgatgactgcttgtatgtactttcaacataaaggatgcaaaacagtttttgc

SEQ ID NO: 11107 - DNA, 2038 bp, Homo sapiens
agaacaaaaaagtaagaaaagacaagaagaggaatgaacattaatacctgaaactataggaaaggttaatttgcctataattatatatacattccatagtcatcaaggaatatattgtgcagagagagtatccttgactgcttaagtcagccagttcagcatggataccaacattagcttttcttcttggttatatcatctgccaaaaatagagaacttatgatctattcatgtgtgtttcaggcttatttgggagaactaatttgaacttaatcaccacttcatctaattttagcaaggtaacagttgcccagggcagtacctgaattaactgtccatttcagtacatgtcaagtgcctttgttaggtggagaagaaatgtctctagaggaatataaatacctgatttcttgtcatcgagattcttgtactgttaaatgaatattgccttttactgctctttatggcttattggaataggagctcatttaagattgatcttggagagtttcttcttgtgattttagttcataagtatgtcacctttcattttatagtgttcatcattgagtaatggattaagtgaaaatccaggagtatccatctgcagttatgtgctgaggtgataattcatccaacatatttgttagcataaatattatgcttcagtttctgttgcaaattggtgattgtgaaattacagaaagtgattttctagtctgctttttttgtttaattcttgtaatgtaagcaataaatatggagtgtcagtagtctccttccaccccagaaatgtgttggtgtaacattctcgtttcttttaacaacctggaagtacctttcttgtgatcttcactgaggaattagaactatgatagaagttaggctgtggcaaatgggacattcgtagagtgggatagaggtggcagaatgaacctggtgtagggcaggagtatgttgtgtagttacatcaatttgatgcatgctttccatctgcactccagacggctttctcagttccaagattttgcagagagaaggagcaaaccttttcattggaaaaacagaaacaaccctcccccccattttttcccctctattcatcaaacctttatgtatctttcatcttccagttacctctaggcatttagatagtgaaatttacctttgagatataacaataagtgattaactgttcactttcagatgtaatggcaaacaattgttaaaagttattaactgatcacagatttgcctggacttcccttcccagggagggaacagaagttaggaggcaactttgggatggtgctagagcatggaaagcacagagaattggacaaacaggtctttttctcttttctctgatgttttacctttaaaagatccaacatccttaccgttggtatttttagtaaggttatagtaaatagctttacaccaggatggattctgaaatataaattctaaattatatttgttataactatattttatgttgtatgttatcaggagccatcagagaatgacctttttgtgtttggaacacttggttccatgaaaagtatgctttgtgttttaactgttaaaataatttaaaaattaattattttacataattaaagaagttaaaaactattaacattaaataatttcacaatttcaacatgtcaaacctatgaagggagataggaaacaatgagaaacttacttttgctcctttatacagaattattaactatattttactaactaaaaaactctagtattctttacctaaagtcaattggctggtaagagggagagatgcaaaattctccagctctgaacttggagctacttcacactctactcttaatggaaacttgaactaatgatagatagtatttttttcctctatttaaaatttttgtcttgattaggagatttttcagttctccatataataattttctacaatcagatctatgctgtggcatattttgctttatttaaaaatttttttttagagatgagttcttgctctgtcacctaggct

SEQ ID NO: 11108 - DNA, 2844 bp, Homo sapiens
aattcattcaacaaaattcactaaacatttaagttcccactctgacaagtattattctaggctcatttgctaatccctagcatattttggactatgaaattcatttgcaattgaatataatatcagaagaaattacagggtgatactgtatacctaacgatataaaaaaattttgtttattgtaggtacggctgcttttttgtggtatgacagtgttagaaatgattcgtttgtaatcttctttgcctgttatggtcaaactattatctaattatatttttaaatttatcttttagggacagtatggaaattaccagcagtgaaaaagtacttacattccagtagccagtatctattagcagccatattgtcacctcagcactgtggacacctccctgtgaagagatccttccattccatctagtttttggaaaaaccttgtggataagtggctgtttcatcagtaagcagcctttgtggtttagttataaaaggctttagtagctcaaaaatactcttgatttcacatttctactctagatggcaacattggacagaaaatgcaatgacataaccaatttgtaatgattttggaactgtgtttcaaatggactgttacagactgaaaggtgtgaacagctttgtatgtttatgaagggtaagggaatttaatacttttccacagatttttttgtaaggggaagagggaaatgtacactttttacagcagcaatattttgtatattatgtttatttcatgtggtgaatatgcaaggcggtacactacgcactggacagcatcagaaatcctctgttaatgtggactggaacatggtagatgcttgattgttttggtctcaaaatggtgtgctataaagataaaggtgaggggaagacaaagcacaccatatgtccactgttctgttctcatagaggaaattcaaatcccttttatctattagataatcaagggcactgtgatacagttttgagtaaaaagacattttttaaaagccttccagttttgtggattaaacctttttataaagatcatttataatactgttttaaaatgtgaggcaataagaattactttgtgttggatctgaggaggctttggtaaaacagtttcatctaaatgaaagtggtaatcctcttctaaaatagcaataactgaaaatgaaagtgttaattttaccttgtttgagttatcagggaacttagtaagtaatatcaaagcattttataaatgatatcaaagaagagtcaacattgatccagtcattttattttgtaatattgagggataattggttattaaactgaatagttcaggagactttacaaacctttgtttcaactttcttatctggaaataatatcatttataaagggacacttttatgtttttcccttttttatgttggttgatataacacaaagagatatttaggaaaatgcttattgatgaggtttattctatctgtttttaaagcaccgaggttgcattctagataaccttgtttattagcatggcatattttaatcattatttgagactgtcctgtgcctgattattttagctaaattcagggagattgcgtggggcaggaaagcatgcattgaaaaatttctaaccacggttatttaagcataatctgaaaacatctagcccaaaggtaagttgctattttcatcacagttgcctatgcccagggaataagatgtattctttataattgaattggtttttcccacgtctaactggaaacaaaacagaaggggcgtcataaatttgaataagcagaacatactgttctcaacatactgtaatcaaaaggaggaatttcagtgggtctctgtgtgtgtatgagagagagagtgtgtgtttgtgtgtttcaaggtcagaacaggtttttttgtttttgttttttgttctttgtttttttttttgagatggagtcttgctcttgtcgcccaggctggagtgcagtggcgcaatctcagctcactgcaacctccgcctcccaggttcaagcagttctcctgcctcagcctcctgagtagctgggatgacaggcacccgccaccacacccagctaatttttgtacttttagtagagacgaggtttcgccatgttggccaggctggtctcgaactcctgacctcaggtgatccacccgcctcggccttccaaagtgctgggattacaggcgtgagccaccgtgcctggccagaataggttttttctttcaacttgatcagtagaaaatggacatcaagtttgaacagataaatcatggacagccttattgtgattgaaatgcttgtaggttctgtgccaattttccaccactgtgtactttgttgctatttaaaactgtatcaactctaacggaagaataaattatttgtgattttaattttctcatttgtttctttaaattagatctctttgactctcttgtcttgtctggagactatgctgtgggtttttatataagttagtccagtataagcagactatatttgtattctaggactttatcaaaattctcttgccatgcccaagttaattagaattaaccgttcagtaatcagcatgttgtgtaggctgtttgttacagaattctttctccgaaaatgaagtccataaggctataatcaagatgactgaattagataaatgagttgaggagacaaaattgtactgaacccaacctggtgtagtacgttatctcatttgaaataagctcaactgacattaagaaataatttgtcttgccaacccatcttctgttgtcttattctccttttaatggaaactaaaattgcaattttaa

SEQ ID NO: 11109 - DNA, 1108 bp, Homo sapiens
tagtcttttctgttaagctcccggatgataccaaggacgcactagcatcacctgcaaacttactagatctcattagctaagtatttaggataaatctacatgcagcctgtacttcggcctttgtgatcttgtccacccctttgatacacacacacctctttgtttatctcttgccattcctcctctccctccctcagctgcagccacactggcctccctgctgttccctgctccctgaggcatgctcctgccccagggccttggcactgtctactctgcttggatcactctgcctcaccccatactggcatgactttctttcacttgttgcacaaatatcaccttattagacaggatttttctgaccacaatacataagatagacctcgcatccccaatacctaataacacctgaaatatgtgtttgtgaaatacatgtatgcatgtgtttactgactattccccccatttcaactgtaagttccatgtcattttattcactggtatatggccagtgcctggaagagctcctagcacatagtagacacttaatagatactcattgaataaatagcagaaaaccattcatttagattaaaacttaaaaaattcaaaatcaggctgggtgtggtggctcacgcctgtaatcctggcactttggaggccaaggtgggtggatcacctgaggtcaggagtttgagaccaacctggccaatatggtgaaaccccatctctactaaaaatacaaaaattagccaggagtggtggtgggtgcctgtaatcccagctacttgggaggctgaggcatgagaattgcttgaacccaggaggcagaggttgcagtgaaccaagattgtgcctctacactccagcctgggcgacagagcaagattccgtcttaaaaaaaataaaaattcaaaatcagatgccagctgctttatgcctctcacttaaaaaatatatgaaattactggctaagaagatttattttttaatctattgtagcacttatatttatttataatggagaaaacaataggaaaagaggttttgaaaagttccccaaataggtgattccatcctgagcagctgctctctggagcagtag

SEQ ID NO: 11110 - DNA, 1208 bp, Homo sapiens
ccattggcaagtttcagagagattggacagatacaagtccaattctgctcaactgctcgttgaggctcgagttcagcctaatccatcaaaacatgttcccgcatctcatccccctcacctctgtgcagtgtgtatgcagtttgcgcgaaagaaaaacctactctccctggtctgtcagcaccagttttgccgtagctgcttggagcagcactgctcagttctcgttaaggatggtgtgggtgtgggagtcgcttgcatggctcaggactgtcccactccatacaccagaggactttgtgtttccattgcttcccaatgaagaattgagagagaaatacaggtgctacctcttcagggactatgtgaagagtcattactagctccagctgtgccctggtgcagactgcctcatggttgttcgggtacaggagcctagagctcaccgagtatagtgcaatcggtgcaacgaggtcttctgtttcaagtgtcatcaaatatatcacgcacccacagaccgcatcaccatccgaaaatggctcaagaagtgtgcagacaactctgaaacagccgactacagtagtgctcacactaaagactgtcccgaatacaacatctgcattgagaagaatggaggctgcaatcacatgcaatgctccaaatgtaaacacgacttctgctggacatatctaggagattggaaggcacatggcagtgaataatatgagtgcagtacttacaaggagaatcctgacattgtgaaccagcgccaacaagcccaggcgagggaagccctcaaaaagtacttattctactttgagaggtgggaaaaccacaacaaaagcttgcagctagaggcacagacataccagcagattcatgagaagattcaggagagggtcatgaacaatctggggacatggattgactggcagtacctacagagtgcagccaagctcttggccaggtgttgatacaccctgcagtacatcaacccatatacatattacatggagtctggacccaggaatgagctgtttgaataccagcaggctgagcaggaggctgaaattgaaaacctctcatggaaagtggaacatgcagacagctatgacagaggggacttggagaaccagatgcatgtagccgagcagtggaggagaaccctgctgaaggatttccatgacacctaagttgggatgtggatgtgc

SEQ ID NO: 11111 - DNA, 1211 bp, Homo sapiens
acaaaaaaagaagggactagagaaaacaagatcagcccatcattgaaaatgattaacgctgaggatgggtaccatgggggttatgctcttctctttattactatgtttgaaaaattgccttaatgaagtttttttttaaagaaatggtaaaataaaggtcattcagtagaaatgttaactcaccacttgtttgtcactgtattcccagtgtatagaacagttcctagctttcctagacccacacacattggttacagctaatcatcatgaaagtaggtgtccaggtctgaacctttgctatttaaactgcatattcagggcctatagacaaattttaatgagcacacttcaataagtgaaggaagaacaaagtacctaattggagttaaatacaatcagcaatgaaagaacatttgtggaatttaatgttgcctcatccttggtaatcgttcgtttttatttccttctgcctcccaaccttgtaggtaccagtgtgctgctgcaacaaagtgagaaaaagcttgggagaagtgaaattcagttcctgatttcagacaatcagggttttagttgtcctgaaaagcaggtccttacactcacagtttgtgagtgtctgcatggcagcggctgcagggaagcacagcatgactcctatgtgggcctgggacccgcagcaattgcgctcatgattttggcctttctgctcctgctatgtaagtctttaaaagccactctgttgtgcttttgggaatctgagtgcactcctggagatgtgttactatggtagtcattgatttcttcacagttattctttaaccacactagagcactttgagggtgaatagggaaacaactgatgattggcaaatcaccaaagcataatataagactcttcagaattttgttttataaatgtatatccttttctggtttcagtaacttaggaactattggcataaacttcactggtattcccattttgatgagctctgtgagggcagcatgctgtctgttctcttcactgctgtattcccagtgtgtggaacagagccttgcatgtagtaagcgctcaaaaaagatgtgttgcatgactttgggttatgggcacaaggttttttacaaacccagtttattccaatcaatcctgctttgtacattcaacttatcagagctccgcctccctgatattccccgcttgccttgtttcttcg

SEQ ID NO: 11112 - DNA, 2510 bp, Homo sapiens
aattagcagtgactaatttcatgtttccaatgtacctgatttttcatgagccttacagacacacagagacacatacacattgatcttaaaatttttctcagtcactgatatgcaaaggaccacactgtctctgcttccaggagtattttagaaatgttccacaatttactgaagacatagagatgatgctgctgcttaggtgccttttagcaagctatgcaaacaatcctgataaaacaagatacatagagagtcaatctggcttctgagaatttaccaagtgaacagagtacctagttcatcagccgtccagtaaagcaacccaggaaactgactgggtctctttgcctaccgtattaacattaaacattgatgttctgtattctgtactttactgcacccagcagactttcaacaactcattgatccaaagatacatgcacagtctgagcaccagctatggtgctcataacttctttaagacttgaaccctttcaatctgtgtgattcattaaattggaccattgatgataagaatacacattgtatgtttctgtgcacatgacagtgtgtgtgtgtgcacgtacatactgtatagtcttaaaaatagcattatactggccaggggtggtggctaacgcctgtaatcccagcactttgggaggccgaggcgggtggatcaactgtggtcaggagtttgagatcagccaggccaacctggtgaaaccccgtctctactaaaaatacaaaaattagctgggcgtgatggtgggcgcctgtaatcccagctacttgggaggctgaggcaggagaatcacttgaacccgggaggcggaggttgcagtgagccgagatcgcaccattgcactccagtctgggcaacagagtgagattccgtctcaaaaaaaaaaagaaaaggaaaaaaaaatagcattatacctcttccttgtctcaaccgccatgaaaattctgaacactccaaattcagttgaataatccaaaacaaaatttataagtataaaataattttacttcttatagtaatagtatactttaaaaagcctcagggtatattatcttctaaacagctacaattcagtgcagctacattaaccaactatgttctctagttgagaacaactaggcctatttcactgctgtgtagcctcagtgcctaacatgggtgccaaataaatattcgtagaattacactgaattgtaaaaaccattcgtttttgtttacaattgccaaaaatctcaaaaggccctgtatttatgtaattctttgaaattattattttattttgatttctcagttattgactggctgggtgtgacttagtacataagtactcaatattataaaaacctcaaataattgacttgattttacacaacatccttcccttttctacaagttaatttttttacaaatcatttgggttatctcctaaataggttatattttattgcttctagaaacaatgtttcaaaatatatgtgcattatcagtaataatttgtataaatatttcccacaacaattttcataattttcaaagactaatttcttgactgaagatattttgctagggaagtgaaactttaaaattttgtagattttaaaaaatattgttgaatggtgtcatgcaaaggatttatatagtgtgctcccactaactgtacagatcaggacacatatttttagacatctaagtctgtagcttaaatggaggttactcttccatcatctagaattgtttacttagtaattgttgtttcttttattattatagacttactatcagttttattttgccaagtatgcaacaggtatatcactagtatatgaaaatgtaaatatcacttgtgtactcaaacaaaagttggtcttaagcttccaccttgagcagccttggaaacctaacctgcctcttttagcataatcacattttctaaatgattttctttgttcctgaaaaagtgatttgtattagttttacatttgttttttggaagattatatttgtatatgtatcatcataaaatatttaaataaaaagtatctttagagtgaccctttccccatagatttttatttctctattatattttacaaggaatataactcagtttgttagggagagtgccttaaaggcaggtgtttcttggactttgttatttaattagatctgcttgcaataaaaaaagttgtcggttatctaaaattcaaatttatcggggtacttggcattttcattgtccaactctggcaaccttgttcctaaggaagtgaaggttgctctctgcccagagtaacactggagaaatctgttgggtctggcagaagaaggctagtatatctaacccaaagagatgaaatcattctaccaatgtttgagaggctgttttaattgcttgttatagtttagaagggaaaagatcagagttgctgctataagagaagaaaaacaaattttcttctaggtccccagctggggctctgtaaca

SEQ ID NO: 11113 - DNA, 1092 bp, Homo sapiens
ttacgttaaagagcccggttaactatttatgtaaaagtatttacgtaacataaagcataatgttttatttattaaagatgtctaattgtaaaagtgcaaaataattttttcaggtggcatttcttgagtagtaaaattgctaatttagaataatggtttagagattcttaaattatgcacaagaaccagaaattgtaaagggcattaagtgctttaattataagatgaccttgaacacagtccttatcagttttcctttttgaacatgttttgttgcttttttgttttttcctctaaaactataggtataaattactaaggtattccaaggagcgtcagtacatcgatggactgaacaatttaatatataggccaaaaatactggttgataggttgtatacaaacatatctgtaaacctcatgccagagttagctccaatcgaagactattaaaagaagtggctgtcgtggcaaggtagaccacaatgctggatcataaacttggagcgcgctcttagtggaggtcagtgattggctgtgtcacagtgcccttttctctgagaagagccagcagtccacagtgtttacagagtgggactatatacagtcacccttctctcacccgtcctccctgctctgagacacacccctgtggcgagcaccgcagaaacgggaagccactacttaagatcggaagttaagagagctccctccgaagagaaaatttttatactaaaatctataatttaattcaagagaatgcttttatttccgtttaaacatattttgtatatatgtgatataaattaatgtgtgcaaattgtttaaaaattagatgtgttgcagttttgcatgtaatcggttatacctttattggacttttatagacattttttatttgcatgaaaaaaactcactaaatttacatcactaaacaaaggttaacccttgtgtgaaatgaaggaactgtcaataattgacagccaactaatacagtaaactgttatactagttttgagctttagacctcagccttttgtgtggaagaagtcacagctttcttaggctttaaaggaaaagaaggaaggactt

SEQ ID NO: 11114 - DNA, 1228 bp, Homo sapiens
acagcatatggaaagctccactaacaaaataaaacttatattatttttaatgactttttttttctcgccacaagtaatctatatcctgatgtatttgaagtagagcagaaatacaaattatttaaatgtgctgatgtaccaatggactagatactgttttcttctatgttattaaattataaaataatatagtaagtaaatttaaacagtgtatttgaaaatcctgaagtatatttattatttgtctatttcatttgggtctaattattgtaatcatttgatcatgatgcaacaagtttgaaaaataatagaaaaaagtcagatgggggccgggcgcggtggctcacacctgcaatcccagcaccttgggaggctgaggtgggtggatcacgaggtcagtagttcgagaccagcctggccaacatggtgaaaccccatctctactaaaaataccaaaaaaaagaaaaaaaaaaaaaaagatgatgaagtgtgagtacatttctatttttttctctcggtctgctccatgaagactggcacacaaccttttaaccgtgcgatgcttttcaatgtgggcttcaaagaggccatgaaagacagtgtctgggactgtgtaatcttccacgatgtggatcatctacctgaaaatgaccggaactattacggatgtggagaaatgccacgtcattttgctgcaaagctggataaatacatgtatatgtaagtagtgtgcactattcctgatattgtacgatataattgcacagtcatagcattgaaatggtagcagcgttatgtccctaaatctgagagaactcaagaaccccaagaatatcatctttaactccatcgtgtcctcctggggagccaggacacagagtggcttttcgttcccctgggtgcttccttacacagaggtttgaatgtggtgtggtgggaaagagagcctggtttctgtggtcaagcacacacagatttaaacttgggttctcacacttacagttccaggacttataggttagtcacttgcatctctgaaggtgtattccttgttcactgggataatagattccatccatagagctgctgtgagatcacatgtgctctgtgcctgctgtgtggtaggtgcataactcatcttgactcctgcctgctctcccccagtgatggtttggagggccacaaagccctctcttctgctgtttatcttcttcctaaggtgtgcatt

SEQ ID NO: 11115 - DNA, 1577 bp, Homo sapiens
ttcattatgttggtaggctggtcttgaactcctgatctcaggtgatccacctgcctcagcctcccaaagtgctgggattacaggcgtgagccaccgcgcccagctgaaagggatatgttaatgtgactttgggaaaaaaattaaaaagaaaaaaatcctgcaacttacattttcctcctcccttagtccagaagcactggaaatccatggatcattcacatggcttggacaaacacagtataaacttcaacttaaaagccaggagattcacagtctgcagctgaaagcatgctttgttcatacaggtgtttataaccttggaactcctagggtatttgccaagttatcggaccaagttacagtgtttgaaacaagtcagcagaattccatgcctgccctgatcatcatcagtaatgtgtgacaacttggaaatttgtactgaaatccacaataatcagtttttgctggatgggttttacagcagtatttgatatacctaacttgttatggaggttgattgatatctgatccctgcaaaatactttgacttgtcattttgttgatgatgcaaagcacgttggactgagaatacttaacattctttttctgtatttctttaaaccctgagaataatttacatgctcataatacaggatatcagcatatttgtgcaccttattaagccccatcttaagaaaacacaaagtctaagtctgctgttacaacttgtcaatggtatacgaatattaggagatgattctgagaaaggaaaggccttgttggcagtactcctgttaagccattagtctctaaattccagctttactgtgaagttctatagagtgttaaatacaaattttcctgtcttgcttcacacagttccttaaaatcagttttgaactttggtcatagagtcttcatatttcagtatttggtggtccctatgacttatacataactttgtaaaaagaaaaaaaaattttttctgatgctttgaatatagttttgaaaggagttttgacttttttcccctcattcatctcagtatagagtgcgctatttcacaatacgatttttgtcattaaaattaccatattctttattatataacgttaactattgagttgatctgtttaaaatataaatctcaagttaattaaaaataagcttttcaaaaatgtattatatttataacaaatatactgtaaatagaataaagacatgctattcactgtatagcgtattagtatctgttgattagaaagtctggtttcaaaatatttttttattcagagaatgggcatttggacataagaaatttcaattcagccctgctgcagatagagaaatgggagcaaggttgtttcaatgaatatctcttgtcattggagaaggagggaagacagggtgtaggagtgggtggcagggagtacaagagccagggtcagtcaagtctggagcagatggggtccttgtgccattgacagctaccatggtttgttccagtctcaatctcggcactaatcggagcagactgcaccaaagtggggagagatcaaaagaccccgttttcagac

SEQ ID NO: 11116 - DNA, 1203 bp, Homo sapiens
attttttagatatacttatgtggtaaaatcatggatgaaaatgatacactttaactttggaatacctctgggaagaagtgatgccagtgggggcgaaggagagtaataagattgggggtggtgcagagaggacatcgactctatctgtgatgttttttttttattaaaaatatttgggatcataggtgaaagttgacatttgttaaattttagtatacaaatatttgttatattagtctccatgccttttctgtatatttgaaatgttttatataaaaattgcttgtggacacgagggaaaatacattctttcagagtcaggaggaaaagaacatcagtattataagcaaaatccagataagctaggattaatgagaggatatttttcactcagaattagaaataggcaagagtgaatgtatatatatatatttttttatttctgtaccttatgtctatttaaaatatgttttatttgagggcaagtcttcataaacgtgttgttaacaaattttttttaggtgaaaaacaagcagctactcatgtaagtcttgatcaagaatatgattctgaatcctctcagcagtggcgagaacttgaggaacaagttgtttctgtggttaacaaaggagtaattccatccaattttcatcccacacaatactgtttgaacagttactcagataattcaagatttccacttgcagttgtagaaggtgatatacttgaatttttatttctgttttttatttgttttacttacagcatgatgaagataatttattgtttggcacacataattggtgctggggatgcaaaaataaattaggaactcataatttactgagctgcatttataaaaccagacaagggggactcttctacagctatttgcaatgtgatgttggaatatacaagagggaatggcattctttagtacagagaaattggggaaatcttttcaaggaggtaatgtagtattacaacagaatcctgaatacgtggacatttataaggtaataaaggacagtctaggcagaaatgcagagctatgaaagcaagatgcatttagaagatcgaagctgagaatgaggtgtgatgtttattaaagttattaatttaggccttttttttaatagaaccaattacagtggaagtggcttttagaaaccctttgaaagttctacttttgttgactgattt

SEQ ID NO: 11117 - DNA, 1012 bp, Homo sapiens
tagctgggactacaggtgccgccaccacgcccggctaatttttttgtatatttagtagagacggggtttcaccgtgttagccaggatggtcttgatctcctgacctcgtgatctgcccgcctcggcctcccaaagtgctgggattacaggcgtgagccatggagcccggccgtagctgtattttcaaggcctgttgtttcagctttgttcttaaaactcgaggcttaaatttaccctcctttctattactgatgttgttgctcagctgtccagatgtagcttattaacataatatccacaggccagtctggaagccaagatgggctgtgtgagtcataaaatatattgattattttagggcaataacagcctaaagatatctccatttaaattgagtcattattagcattaaaactttaaagttgtgcaaaacataaacagtgggcgttttgaagattctttttggaacagaccgctttgctattcaatgatctgactggagattgttttctcggtttggactttgaatattataatttaccatttacaatatttttccttctactaaaggataatataaatttgcaaaatgttaaattttttgtttaatctttttctttgttaaagtgaataggaaactagcaactggaaaaatagtcataaaatagcattacaagggctgaacaaattgcctttcctctctttactgttctttgttttgacaaatctatgtccattgttctggctgtgggcagaatttccatattcctccttttggcaaacttacttggtccccttccactttataaatgttaaccagagtcctttctgcagtagagattgtgagcgttaataccatttgtacattctaaatgaattactcttttccattgaaattaagttggaaaacgaataaatgcaaatgaaccttctgtattttattatcccatattgaagctacattttcagacatgttgaactaggtggtttatgctgatttttgtttgtaaac

SEQ ID NO: 11118 - DNA, 1100 bp, Homo sapiens
cgttaataatcttgtatgggagttggaaaggaaaattttggaagtcaagaaagtccatttaggccggacgcggtggcttacgcttgtaatcccagcactttgggaggctgaagcaggcggatcacaaggtcaggagttcgagaccagcctggccaacactggtctctgtgaaactccgtctctactaaaaatacaaaaattagctggacgtgttggcgggcatctgtaataccagctacttgggaggctgaggcagaagaatcacttgaacccgggaggcagaggttacagtgagctgagatcgcaccagtacactccagcctgggtaacagagctagactccatctcaaaaaaaaaaaaaaaaaaaatccatttaaccaaattgtcttacataatactgtaacaaaacaaattttgtgttagaaaagtatacttaattctttgactttttataactgcatacataagaattcaatatttttcaaatatttatagcttatttagaaatatttctataatataagcaatttcttaaaaaccatcagatgatacttacagtataagtattcacatccagactttttagtagaaaaccctaagggctttgatatcttttttgattgtaacattttaaaaattatgaaataaaagtactgaaaaccagacacaaaatttatagctgaatgccttattataaggaaatactcttttaggactcagccagtcaccccacgtgtcctttttgtgtcctgtcacaattacaaccccacaaaagtaactgctagactgatttaaatggtaatcactttgttgcatttgattactgctgccacacctaaatgcatatatctatattttaatattatcaatttaaagttgttattaaatgtatattttattttacatctcttttttaatctagaagttcctccttctttccagttccttaaaatttacctggtgaagaacctgatcctaggacctatagagtttcccatactttgtattttgctgattgcacactcatggcacggttcagcacattgccctgtcctctcgatattagcacacagtgcaggttcaggcacattgaatttgag

SEQ ID NO: 11119 - DNA, 1090 bp, Homo sapiens
tttcaggaataatcataaaaagaaatgatcatcagactgaaagtccagagcctgagaaatgaaaacatatttttaagcattggtgttgaccatgcagacaaacttttgttaattcagagcgatacaaaaggcactttgaatctataaaacttgaaaaagttaaaaattgtatgtcggataaagctttaagtcatctgtcactattaacctcagtgcagcaattctgactcctgtgcctggattccttttatgataattttgccacctacaggacagattaggtgctggtcgcctgaattattttgtgttctgaattattttgagctctaaaatggtaaagtacaaatactcattgttttactgtgcctttggccttttataaaaaggtatttataattcgttgataaaaaccaatatttgaagctgttgattaccaacaaaaaagtttcactctctttatagtgcttcaggatacaactttttcagggccttattagagaaaaactgattcacatgttattcttctaaagctaaattattaaaatgtaggttgaaagattggattgattgtgaatctacactaaagatatggttccaggcagacctccttagagacctccaggcagacctccttactgtcttcagtgatgtttaatttcattactgttactgggtgccaagtgtctttcatttggaagtgaacttactccagttattgaatgtttatcatatcataatttgcatttttccaacattgaaggtattttaaaaagtcactaagagattcattcttttattattcaactacaaaaaaatagtgtaatgatcagaatttaaaatgtgtgattctttttcttctgtaagtatgtattgctatgataaataaaaaatggcaggaccattgtttttattaaaatatctactgtgtctattcttaaacattaatcttgattactattttactcaaatttaataatgctttttaaattttcatcattgagcaacatctatcacaaaggtgtacattcatttaggccagtacttctcaactgggggtaattttgtctcccagcagacattggcaatgtct

SEQ ID NO: 11120 - DNA, 2194 bp, Homo sapiens
ttaaagttcaggtattcaaatcttgtatcttaaaagatactgttatatatgttttacataactgtcctgagtgtgtgtaatgtgtgtcaagatgtgtaatgtgtatcaagatgtctaatgttttgggcaaagtattagagtagttgaatatgtttttcctgttgacatgaatgttattgtttttagaatcttcagctagatgaagaaacccaataccaaactgctgttgaagaatcttttcaagtaaacatctgaaggctgtagacatctctgcatctttgtacctgcaagtgccatctttaagggggaaactacatgaagtcaccgttacagtaacttgatgtgtatattaataaaagtaattcagtcattttagtttttgattgaaaataaaggtagggcttctaaaaacttcatcatcttgataagttaaaaaatgaaagttatgacattagctttaaaggtgtaaaaaagatgtttcactaatgtaacggtgaaagagaatccctgttgtactttatctttttgtaatattatttttgaatttttcattattatgttgcttttgaaatttgatgcattcctcccatttactttattattgtacacatttaacacacagtagcaaattttgaacgatgtgattgatataacctaacaaatctgagccagttattattagagttgcagaatagaaacttgaagtgctaaatggaataatccaaaggaaattttttaaatgcaggttctagctgaaaaattcaactataagaaaattgtatttatataacatttactatttttgaagactagtgagatttctgtaataattttaattctttaaaaagtgaaagcttgttgtaaagatattttctttttgttattagaaggaaatacaaagagaaaaatttctttctttcatgggcatttgataatttcagtctttgactgatttgtaagcctagaatatactaagctgaataacagctctttggcctcagaattttcagtagccagtatttctgattaactaagttgaaactcttattagaaactttcagttggtgatattgtattctagaagatataaatgagaggtttggcttcatctcagtttagaaatttattcaaagctaaagatgtatatatacatatacttttgtgtgtatatatacacatatgtgtgtatgcagtttgtcaggttatatatagaatttctattaaggattttttaaatggacaagcaatagggggttgaagtgtttatctgatttgtttaaaattttgtatatcaccaaatttttaaaaagtgatagtcacagtgctaagttatctagttggctactattacaccttaaaaattgagtttacacacacacaattacctgtttatatggtgctcatttgttattctcaaatataatgtgtgaccgtgatatagtgagaaagattctaccaaccactgtttcactactttttagttaaaattgggtatgttcttaatattcattagtgagaatcacaaagtattttgtagaaggcccaaatcacagaataaaggactaagagtggatttgctgacattccatactaatatacattgtttatgctttctttaaaataactagaagaacataaaagaaagagaatctcagaagtagtttgctgctaatatatacatatattgtataaaaaggtatattttggttttgttaaaacccttgttgacttttctacactgaacattttttttaacttgatttaataaaaatgttaattttggaagtgcagttttgtaaaaacctttttcagtcaaacagtaaagactttatttatggattgtaataacaaccacaagaaaagccatacatcttaatgaacatacgcctttgttctgtcattttaaagagtggtgtttactatgtgtgtgcttgagcattttctttcagttacatgggtgtaatttaaaaaacagctcctttttaagacttttgaccatagtgttttccagtttaaagcaataactttcatagtttctttcaaagtttaatacatccaatatgtcaagttaaaccattctgggatttgcaaagtttaatacatccaatatgtcaagttaaaccattctgggatttgcaaagtttaatacatccaatatgtcaagttaaaccattctgggatttgggaacttctt

SEQ ID NO: 11121 - DNA, 1108 bp, Homo sapiens
ttccctgcgattctgcagtgaaaagtgatgcccagagatccacacacagaacccttctaaccagccaggtcaagacttatcatcttatctcctctggcaggtcccctgtaatcaaaagagaggaagtgtctatctaaacaagacccttttgggtccttagattcatggcaaaaatcatcatggcccccatcagaaaagaaaatcagcaataaaccaagccaagcaactaaaatgtataatgtggacctgactcatgttgggaggcagaattcagacactcacagatcaatcttgcaagttttctcttctttaagttgagctgctcaactttatgaactgtgaaatttacttacattctttcaacccacatatatcattgcagtttatgaagttgcagtgaactgcccattcagctaaattgcagtgtttattcttgtctcatgtcgaaatacaacaatcttatgggaaatattatgacagtccgttccaactgttctcagacacatgcataaacagtctctgctcacattccacagccacctgcatgttatccatacagctccctgagaagtccagggatgggaggtggggtgtggaaggatggagggtccttcattttctaaacactttgtataagtcactactcatcgtgcctagcaagtataagattaacattttgaataacaaactggaaaacaaataatccttcaaagaacctagcgaactgttcaaaggaaattttaatttcagtctaccagaaaagttaaatctgttgttggacgtagggggctttcagaaacatgcctcttatatcaatttccactatctttcaagttacctaaaggcaccaggctgcttgagcaagaagaataaaaggcctagagtgcaaattatgtgaagtagagtttttagattgtgggattgtaataatacgggattctcatggttacatcatgttaaatcacactgttcagtctttaaaacttggtgttttaaaatttgtctcattgtgatagccagaaacaaggaataaacgtgatttcagtttaaactatatacaaatatcttctgtaattttgctgctctaatttttaggctataaattttg

SEQ ID NO: 11122 - DNA, 1211 bp, Homo sapiens
aaaatctttaaaaaaaaaaaaaaaacacttttgaacaagtcccttctttcaggagggttgactttagacaattaactgtgttctgtgctctgtcattcagattgcttcttgctaattgttttactcttgtgcctgaaaatgttagtgatacgaattgacactttaatgttgtatgcttggtggggatctttttatcacaaggcattttccaagagtcatatgttgataaagggatatatgttgtccttagaaatcacacaaatcatgaccacaataatttatctgtaactgctgctaattttattgagcagagaaaaaagaatatacatatataaacatgtataggtgcatacacaatacacccggatatgttttacacataattttgattctgatattttagataacatctgttcacttttaaacaatctgttgaggttttgggactgttatctacattgattctcttaggaatagtggacagaatgactccaaagattctcagaaccctgtctcttgaagctcaatcttatttgggttcatcactgaaaacttagaacaaatcagtaaagaatcctgtattgaagaattaagtttgagtttaagcccactcaccgcagggctggtttttgcatgtaatactcccatgatgtctggggaaatgacagtttctgttgaattataattctccggtttaagggtctccttcccctggtgtctgatggtgagaggtctgaagagcatttgtcagagtacattaggcattctcaacctacttcatgctttacgagagctgagaaatcagacgcaccggcctttattattatatatgctacatctgttgagtatttttaaaataccaataagaggacttgtttatttcataaaccacttcttccctctctttcaaagaaaatacattattaccatacttttacattagtctgagaatttttgctaaatatgattaagtattccaaaatataatggcgtcattattcttgacttttttagagaatatacatcttaagactgtattagttctcagagcaaggcatcatctactcccctgcacctgagagtctggccccagattccagatgtgcggacagcccatgaccgaggtgcacacagtgccctcttgaataggaaggtcagccagtgaggcggcagcataacttgcaggatggacttatatcttaccatctctt

SEQ ID NO: 11123 - DNA, 1456 bp, Homo sapiens
gggaatgacaacttcggtcatggaggaaacttcagtggtcgtggtggctttggtggcagccgtgctggtggtagatatggtggcagtggggatggctctaatggatttggtaatgatggaagcaattttggaggtggtggaagctacaatgattttggcaattacaacaatcagtcttcaaattttggacccatgaagggaggaaattttggaggcagaaactctggcccctatggcggtggaggccagtactttgcaaaaccacgaaaccaaggtggctatggcggttccagcagcagcagtagctgtgtcagtggcagaagattttaattaggaaacaaagcttagcaggagaggagagccagagaagtgacagggaagccacaggttacaacagatttgtgaactcagccaagcacagtggtggcagggcctagctgctacaaagaagacatgttttagacaaatactcatgtgtatgggcaaaaaactcgaggactgtgtttgtgactaattgtataacaggttattttagtttctgttctgtggaaagtgtaaagcattccaacaaagcgttttaatgtagattttttttttttgcacccatgctgttgattgctaaatgtaatagtctgatcgtgacgctgaataaatgtctttttttttttaatgtgctgtgtaaagttagtctactctgaagccatcttggtaaatttccccaacagtgtgaagttagaattccttcagggtgatgccaggttctatttggaatttatatacaacctgcttgggtggagaagccattgtcttcggaaaccttggtgtagttgaactgatagttactgttgtgacctgaagttcaccattaaaagggattacccaaacaaagtcatggaatggttataaaagtgattgttggcacatcctatgcaatatatctaaattgaataatggtaccagataaaattatagatgggaatgaagcttgtgtatcatccattatcatgtgtaatcaataaacaatttaattctcttgaatgaaaaaaaaaagaaatatttttctgaagaatatatatttgatataacttctggtacaatgaagtatattttataatttgattcttttgtattttatgtttgttttatttatcacataataaagttcaaaggaagctatgtcagatttgaaactgacactgaaaatccctaacgtttgacttgtggctcagtttatcctcttgaaataaaattgttgggttttatgtgacattaacaccctgatgaaaatcactccttaattttgttagttgaattgaaacataaaagttcaagtcattgcaccttagtgcattttcttattagacacagaagctgaattatttacctgagccagcctaataaggtaaagggaactgattgaagaagaaaataaaaccgaagtcaccaggcacggtgg

SEQ ID NO: 11124 - DNA, 1206 bp, Homo sapiens
aagtctgggtcaccgggaagcaagagggagcgccactaaaggtatcttttgtgccttgtatttagccaccgcattgccaggatgggagtggaggcggacggtgcccgacaccacgactcagggagcgatacctgagctcgctcggcaattcccgggctccggggacgggcctgggcggggaaggagccggggcgcgcagcagcacccggcgagactgcagggcgcccgagtggtcggacgggggagcgagagctaaagcttgcggagcgcgccgagccgcgggcgctggcggccccggccggggagctgacgcgagcctgccgggccgcgggagctgcgggaggcggaggccgagctgggggcggagcgggcggcgcctgggaggcggaggcggtgtctcccagagctgcgcaggcgttgctcgcaccttgttgattagtcagtgctgggagcgctgctatggcgtttctcagacccgcggctcctcctcacacgctcgaggcggagggaaggaggggtaagaggaggaggaggcgagcgggcggccgccgcagctgcagacccagggccagaggaggaggcggagcgggagccgccgcagccacccgggccgccgccgccgcccgcagccgcgcggctgctctgagtcttctccgggcgtgagggcacgcggggcgccccagccatgccccgcagcggcagctgagccgggcgccggccccctccctccgggccgccccagtcgccgcgcccccccggctgcccgcggccggagctgcccggcgcctcccgcgcgccccagaccgcgagcgcgagcagcggcggccgccgaggcgcgggtggtgccggtggcggcggcgggggagcgcgggacaggaggcttcggggaagatggacccggcgccctcgctgggctgcagcctcaaggatgtgaagtggagctcggtggccgtgccgctcgacctcctggtcagcacttaccggctgccccagatcgcgcgcctggacaacggtgagtcccagctggggcgcggggcagacgggcgaggacagccgtctccacgcgggtgtgcgcgcgtgtgctggagagggtgggacccgcggggagtgggctgcccgcccctgagcgccggagttggcccgagcggctgccgcagccctggcgcgttgctctcaactccccccagcagcagacaaggaggtgga

SEQ ID NO: 11125 - DNA, 1097 bp, Homo sapiens
ctacccacctttatgtctgagataccatcatatccaggaagtctttagtgactcatagaccagatttaggtatccctgccatgtactttgatggaaacccgcatttttcctaccaaagcacttaccacactttactgtaattactgtttagtatatatgcatatcctattagcccttaactctgggagggcaatgaccaggtctacctcaatgcctagcacatagcaggtgctcaataaactagtagacttgaattaacctcagcaggaagctcaggattgaggagacaactggcaagggggcagaatgaggcaccattcctcaggtactattttactgcctcagatattattaaactaatagcataattcaatattttcacaacctccaaattcaacatttcagatagttgaataactctcagcacatgcctccacctgacaaaatacaaatgctcttgccaggcacatttgccatcttataagaagctctttcaggatctctgccccaatcctggcattactgtgaaggtgcccaatggaaattatatctgagttggcagagagtggagtgaaggggatattgatgagtctcatccagaaatgggttaggcatttcaaggaaatatctaccattctttttggagaagacttgggtaacatttttcttccatttaacacttcaataatcataacaaacatctttgtgtgcatgtcttcttatagtaccgaactgggagggaaggacagaagttctgctctcaggaaacttttcttttctgtggagtctcacccctacagtgaactccttgcatttcacaattgtacaactcttacccacagagttaaactctggtgtgtgttctctgatgctgcataaggcctgacctatgcctaaatgtttttctacattcactacattcataaggcttctctccagtgtgaattctctggtgctgggtgagggctgagctctgattgaaggattttccacattcattacattcataaggtttctctccagtgtgaattctttgatgttcaataaggatagaactcctaccaaaagccttaccacatgcaatacattcatagctt

SEQ ID NO: 11126 - DNA, 2469 bp, Homo sapiens
gaatcagcactcaggtctttttcttcagaaatgaagacaaaatttaaaatatgaaatgatgcagaatagttttttccctattgactgtcagaaaatccactgggaaatgtaaaaatcttcactcaccattatgatatttatcttgaaagaaatggtgtcatacctgcctagaaactgaaattttaaacttaattcaggtcttaatgcctaaattttccatgtgatgtttatagtctgtattacttctccaaataatgaactacctgattcattgtccctttcttgaaagtttcttttttaagacaaatacattatttctgcattgatcattgaaatgttctttatatggatacattcccttatatattaaaaggcaacaggaattacaaagtctgaaaaccattttaaaccatcttttaaaaatttacccttatttccttttacctaatttgaatatgcatttgagaaaataagaggataaaggatggctaagagcctcaaaatgaaccataagatctcagataagaagtgatggtgataaaacatcaaaaagtgaatggaacaccttgattggggaagatatgcaaatactttgatctaagaattgaaatgtatcaagaatttatattttgcctgcaggaaaattcaaaagctactcatcctctctataatttggagtcatcttactaatgaaaataatgttttcccatatattattaaaaagcatacagtctaaataataaacagttgtaaaataatgaaggtagaaattataacactagggaaaaatttgtagcggatggcagtgttgaaggcaaatgtaaacataagggtaatggtctgtcatggcttttagaaaaagatgatagagttcatcattattttgccttcatctttgttaaggacagaaaattccctgacaggtgggcaagtatcaggttacctattttttattcctttggtacaaaagggttgaacgtcaggctaaaaaagcagccatgcatttattattaaacattttctaccgacaaggcactgtgctaggtactgtaatcctaccataagtaggtaggtatttcttccactgtaaatcataggggtttgctgttttatgtgagttagcctcttccccttgtctgagcattcctcaggggaggtcacctgtgaggttcccagaactgtagttttttttaccagggtgttgtatttggagggggaggaggactcggctcaaaagagctagctggctctccagtgttcagaggtgagtccacgatactcttaccacaatttggaagtttgtgaatctttttaaagaactaatcaatctctaatagcattgaggttgtacctacatattaagttgaatggactgttctatttaaaaaataaacaactagacaattaactagtttattaacctatcacaattgaatttttttttaattttcagtcttaacacattttttaaaatgtattaaagtaatacattgtagtagtaggattatatactccttggctgagaattccaagtactgtggttctactgtttagtggaaaactctggaagttaaaatatagaatatgagaggaggcttttttataatgggcatcattgtgtggaaaatgacccatgtgaatacaaatatttcctagttcagagattttggttatatctggtgcttggatcaagtttaaaaatggaaggtgagattttgcatgagcctattaaaaagcatagtaataaatgcaaggccagctggtggaaaagtgaggcagaatggagcttgtttataggttttctgataacaattataaaaaatgtgctttatagattaagatttattgaagtataaatatgtagtaatgatataatgtattttaagttatacaagaaaatgtagggacttttgtttgggtctttttctctttgtggctgaggggaaacaagtcagtgtccaataaagctgtaaactcctctgctctaagataaatgatgtgatttatttatttataactggcttctttccaagtaggttttcaggtggcatatttggaagacggctggaatgacagaattcttgtatcagagtaggtaagaagggagcaacctctcaatggctattatgtcatgctttttaagatcgtatgcggttcctatatacaaggaagcttccctgtggtagatttgtcataaatgccaaagatatttggtaatgtgagtgtagaaaaagtagtatgagggttggcaaatactgtttttgtcttggcagctctaatatctgcattgttcagaaaggattctgaggctaaggcaaagctctgtgggaaaaagggactggaccaaaaaaaactggatggtggcacacaagaagaggaaatgatgagatgtgtactttctatctctggttaggcttagtccccactagacaaattgattttaaatactatgtagtgatttttaaattc

SEQ ID NO: 11127 - DNA, 1202 bp, Homo sapiens
tcaactatgaatgccattgcagattcctccctcttcattcctacatcaccctcttcctcttctacttggctccaatcctgcttcaggatcacctcataccctgcctgacactttcagtgtcctcctgacaactttgaatgactttgttcatcacggcatatctactggtcatttgcctctgataagaggtcagttctggtattggtctgcaggatccaaaagaaaaactcagacactttaagagaaaaacaattagctggacttgagaaatcctcttaagaccaaactcaggtccagtctgctctgactggagtttgactctttcttaatctggtattaggcatggtttaaaacgacctgtaacgttgaaaatatgctcttcagagccagaaggcagtccctgtaggtgagggggacccattttcccccatctcccaagttaaagcatggatctgtccaaattttaaatgtgtttcatgattgatttggcacctggtggagggctaaacatgtttgcagtaagaaatctcttaatttctgaatccatagtcattggaaaaagataccagatatttgttactctttccagtgactgtaaattgggagagtttaacttagtaaaaataaagggtaacgaaagaaatcaatggactatggaacttgaccccattatcaaataggacagatatcctggggagagattacaaattatgccctcttacaaatgcatgaaacaatagtgtcatttaaaataatattctatctgatgggaatgtgtgggccttatttggatcctcattcaaacaacaacaaaaaaaactttaaaattttgagacatttgggaatctgatatattttgatatttgataatattttggaattctcacaaatagttgtgattatgctattgtaatgttaaaataattcatatttttagagacacctactgaaatatttatggatggaatgatatgacatctgggatttgcttcagaatgatatgagagagaggaagtggatgagaatcgtgttgaaataagattggccatgagtcagttatagttgaagctgagtgataagtccatgggggttctttatactattctgcctttggtatatgtttgcatttcttcataataaaaaagctttcaaaaagaatgagatatttttattactaaaaattgtgatgaaatcttacccaa

SEQ ID NO: 11128 - DNA, 1193 bp, Homo sapiens
gaattcacaaatagactagtgaaacagggtagggtctagaaaccagctcatttttgtatgtaatcttgatttatgacagagcagtcactcatagttacagcagaagaaaaagggaccattacataaatagtggtggaacaactggttatccatagaagaaataaatgaagttggatacttactgtatatcatagttaaaatcagtcccttgaagattaaagtcttaaatataaaaaacaaaaaaaaaatttttttaattagttgagtgtggtgttatgtgatcccagccgtggtcccagctactcaggaagctgaggtgggaagatcacttgaggaggtcgaggctgcagtggcccctgattgcactactgcattccagcctgggtggtgacagagtagtgataccctgtttcaagggaaaaaataaaaaataaaaacacttactatacaattgttctgtagttggcattaaacaggaatgttttgaaagatttcttaacttgcttttatgacatcaggagaacagtggtgtgtcccatcatcgatgtgatcagtgatgatacttttgagtacatggcaggctctgatatgacctatggtgggttcaactggaagctcaattttcgctggtatcctgttccccaaagagaaatggacagaaggaaaggtgatcggactcttcctgtcaggtaattaatttgtcagacattttgcctaaagtgttattggcagaaggttgtggagctttgggaatcatatcaaatggataagtgtattttgagaaacgtgaagcattcgtataccttatggtagttaacagccatctttcacatatgtgagtgttttaaagaaggatttctcctctaataaaattagaaatttttgcttattctataaatctagtgcacatgagaaatgatgacatgcgtgttttttcattcctttatgaacattttgcaaatgcgtcagatctgtactttaattcagttattaaggataataatacttagcttaattaattgtgtcagtatgtgaagatactacctaaaactgggtccttgcattaaaatgtacaattttaaattcagacttgtaccatctggatgacagttattgactggtaaagttagaaaagcttgtgtaaaacataaaaatagctagaattgacacaaaatataaaaaaattcattaat

SEQ ID NO: 11129 - DNA, 1641 bp, Homo sapiens
caaaaaaactatattaaacagggtttaaaggaaattaaaacagaactatgagaagtacaatttgttatagtatagtatcaaatttctatatagattttatacctcagtggggaaaaataactgattccaatgacattcattttgttttcatctgtgatagtcatggatgcttttattttccttggggtgctgaaattgagctgaaaaaaaaaggctctttgaatatagttttaatttctctctacagttttttttgtttggtttgtgggctgttggaattgtaatttttaattgccttctaaaaaatggaaatttaacaatgtctgatctcagctgaacaaattagatgtttcagttgctcttgggtcaactggcttacagatttacatgtgcacacacacacaaatttcttatcacattttcgacttcttcacttgacctaactgattatgcgaaatacccaagattcatgctactgtaccacagatttgttttcacagcaataaatcttcagttctttgtttatgattccacttaacaaaaggcctgcagaagtgatttattatttgggtatttggagataatacatttgatggttttttggaaaacctttttcactccatactcagatatgcttcattgtcaaatgcatatttagattagattattgaattgtaatgtttatctgctgctttttttaaataaaatttgactgaaaatgtttaattggcattttttaatgacttagccaaagaagtgcagctattattccatattaataggcttgcatttcttttcctaaatcttatttaggctaaatcagttttatttttctctgattttttttaataccacagaatcacctgagtgtcaattgaaagttgtcaattaaaaggtaaccttttaatctcgtaggaggaatctcattaagacatttttcctgatatgtagagcagtctgttggcaaaaatgcatatattttctttcatatttgtaaaattatatttaatggaattcttttctttgattatcaaggactttcactgcaggcagtgctatttcttgtgcctaagaatgtttccaaaagtcgcatcgctaatgatatttgccaagttgagtgtacacaaagtttctcatatcctgttcaagttaatcaacatcaagcacatggggatgctttagggtgagtctatagtacaaaatgcataaaccatgtccccaggaaatttgaaaggaagcaggtgctgaatggaatttttttccttttccatgagctgtgttaattctatctccagtaggcctaatgcttgaataagcaagatgtctaatcaataaattattttcatgctcagaatttcaggtttttgtactccagcatagcttggtcttatttcttactgtatgaaagcttaacagcaatgtgatttaaggttttgttttaaatgggagatgtaagtgatttaattcatgggtacttttagaacctgatagataatcccattgcctttatttttctaattaaagaattcctaaatactttgaaaatacaaaatattcctgaatagttgtgccttacattggttttatttgaagttagagtggatccctgtttatcataattacttgtaattaggcagatgc

SEQ ID NO: 11130 - DNA, 1250 bp, Homo sapiens
taatgcttacatgttccagccccactcccggctcacactcttaggcagaaattcattgctcctgtaaattaagtaataattaataccgctaatgagaaatctgggagtacaggaggtgattttaaaaaatgctcgtatttcctttgattagagtagcaattgttagggatacatgagccagatttggttttatgtaaaaaaaatctttcagttgatgagttcttgtttaaattgtattgctgtggcaatttcttattgtaataatatgtaggagaatttctaatttgaatccctttatttacagaaagctcactgtaaatttgtaggaatgtcatggtactaccccattaagttatttttattagtgtttagttattgattcagcagtctctaattgtgccaaaaatggtgcttagattagattgccattgctacccatgggagctgctacttaattattcccacctcaaattcccagctctcaagttagcactactcctttgcaatttactccttctctgctcgtataaataccctcagatgatgatagttggtggccactatacctttgaagaggttgcccacttctacatggaaaggaaaagatggtttttttttttaaaagatgaatttgataattaacttgccactatttcaccttgtgatgaaacctcaattttaaacatagtgttaattgttttattgtccacagaattaagggtaagtaatgtcatacaatttttgtctttagtcttttagtatggtttctttaacttctattgagcttctgttgcagatattggacatgggcgtatcttctaacgatgtcgtcaccattagtatattcttcctgctaaaaataaatatcaaaccctgaagcctgtattgtctcatgtttttgaaaattgaagagaagactgtaactttattctgctttatactttctcacttatgatgatggtcatttgtcactgtttacaaaaacagaatttatatttgaagtgtaactgtagaaaatagatcagatgccactccccacaacccccttttcccccagtgccttccagccacatttcatagttgacagtcatagattatgaggctgatgataataataatgttaacattcatgtgtcaggtactattctaggcacttcacataagcaactcatttaatcttacacagcaggatgtattatccacatttgatagatacagaactgaggcacaggaagattaagtaacttgcc

SEQ ID NO: 11131 - DNA, 1509 bp, Homo sapiens
gtatgtatgtaatcatgttttaaggaattaactcacagtatatctagctacaaataaagctagtatactgtcctataaatttttctaaaaactaatctgtagttctaaaaacttaaatgtcactcttattttcccttacttttttttaaaggtacctgaaatgctgcacaatgatgctagtgaccatggatgtagccgctgggggtatttctttttacagaatgctgggatgcttttgggttttggaattatgttacttatttccatatttgaacataaaatcgtgtttcgtataaatttctagttaaggtttaaatgctagagtagcttaaaaagttgtcatagtttcagtaggtcatagggagatgagtttgtatgctgtactatgcagcgtttaaagttagtgggttttgtgatttttgtattgaatattgctgtctgttacaaagtcagttaaaggtacgttttaatatttaagttattctatcttggagataaaatctgtatgtgcaattcaccggtattaccagtttattatgtaaacaagagatttggcatgacatgttctgtatgtttcagggaaaaatgtctttaatgctttttcaagaactaacacagttattcctatactggattttaggtctctgaagaactgctggtgtttaggaataagaatgtgcatgaagcctaaaataccaagaaagcttatactgaatttaagcaaagaaataaaggagaaaagagaagaatctgagaattggggaggcatagattcttataaaaatcacaaaatttgttgtaaattagaggggagaaatttagaattaagtataaaaaggcagaattagtatagagtacattcattaaacatttttgtcaggattatttcccgtaaaaacgtagtgagcacttttcatatactaatttagttgtacatttaactttgtataatacagaaatctaaatatatttaatgaattcaagcaatatatcacttgaccaagaaattggaatttcaaaatgttcgtgcgggtatataccagatgagtacagtgagtagttttatgtatcaccagactgggttattgccaagttatatatcaccaaaagctgtatgactggatgttctggttacctggtttacaaaattatcagagtagtaaaactttgatatatatgaggatattaaaactacactaagtatcatttgattcgattcagaaagtactttgatatctctcagtgcttcagtgctatcattgtgagcaattgtcttttatatacggtactgtagccatactaggcctgtctgtggcattctctagatgtttcttttttacacaataaattccttatatcagcttgacgtcagatgtctggttttctttttaaaaaaaaattttttttaccattggaaccatttttaactgtagagttcagtagttttaagtatattcatgttgtgcaatgaatctccagaacttcttcatcctgcaacactgaaactct

SEQ ID NO: 11132 - DNA, 1211 bp, Homo sapiens
agttgttgaatcttctgaactatcatgttggaaacattggatgtgctcttctatctagggaaaaatgtagccttcatttttgccacatgtgttgccagaccggacatcatatgaaagttgcaaaaaaaaaaattctgaaaatccagcctcacttagaagtgaggcaatattttcatctctttataaagctatttgtgattgcgttcttcaccaacaatttttttttgctggaggggtggtggtaggggcagtttgccacaaagctgaagaaacgcattctgtcaccaaaaaataccatttacattttttctccctttacagatttcttctttttctggaaaaaagtttaacatttaaatgaaaatttcatttgcctttttagtattaacgtgccgtgatatttagtctaacaacttgtccctgaatatctctgttgctgtaacactttaccaccttcaagacagcaaaggaggtgtgttttaagtgctatgccactggttttcaatccttgacctcagaggaaaaaataattctacattatgttttatgacagcttctctgtatgttttttgtaaagttaaatattctagacaaagtcaggtattatccataagatatcaaacaattgggagaactttacctgcttggttatatttatttcctcttttataaccagggaaacacaattaccacctcttttttagagatgatgaaagtgcttagaaataaagctccagcacccttaaatgcctgagctccacctattctacaaggctgtggggactctttggcatcctctgtgttgcatcttttcactgaaactttaatttgaatatttgatttttcaccaaatgtattttctttattttttccattgttaggataattacccttagaattctgtagcttctggagatatttacaaatatatatctgttaatctttccttaactctatgcctagtgctagtatttaaggacatgggagcttaggggctacttaataattaatgccttattcaattaaaaaattttaacctgtgttttcctgactttaaaaaaatacatgtttatcatggaatattttagaataatatagaatattgcttcattcccaaatcatcagtgtgtgtggtatattcatgtttttcatttaatcatcactgtaacagctagatgaataacagtaggtctcgtttgacattacagtga

SEQ ID NO: 11133 - DNA, 1281 bp, Homo sapiens
agtaaatgctgtctcctgttcatttttgaatataatccagatatgaaaacaagtcttgcctgaagcaatgagggagaaatagcagataggatctagaaacactggactaggtgagggaggttgaaagtgatggatgccacagattgggtagcagcaggtgcaggtcagaccctggacctggagtcaagaatggccctcatgctcagccctgccagctgattcatgctgcaccttgggttagccagggtccctcttcagagcccagggtcaccaaaagctgcagatcccagagctgtgagagcaggaggagcgggagaagtgtcaaaaacaaaatttgatttcagaacagtgggctctactgagtctgagaaagatgtcctagtagcaaagagagagagagagagagctaagctgaatggaaccaggatggccctgctgatgctgcttatccacttaaactgctctcttccttagcataactgagtcattcattcatttattcactcattcaaccaaatatattttcttcagtaacactttattgcatgccaggcagtactatggagatgtaagtgggtattgtccctcagatgttgcaagtggggtaccgttgtctatttgactcataagctgcagacagaaagctgtctgtagttctggctctggggcttttcacaaatgtttgttgcttcacccaaggtattggcagcttcccactggtatcagagctgctgcagatactctataagcagaaagcacctcgtagtatctcaactaggacagaggatgtcagagcttctcaaaaaataacttgtaattgaccgattaatttgactgagtaatagggacagtctgtgcctaattggaaggaaagtcaagaaacaccttcaagcagaacaaggtgagatgttagttgaaggcttccattctggtgtctatgtgaagacacatggggttttatggtactgatatatttaatctatgggatgtccttgaaagtcccagcataggaagaggaaggtagaatagtaagcttgacaagaaacctgaaaaatcatgcatcacacattttggaagacggaacagaatccaaaaaaagtagcagaggaaatagaagcagaaatctgataaattaggggaaggtcaaaacacctgaaaggcccagtgtattcgggcaaatcaggttcagaagtggaggccacgcgagagctgaccacttcatggaggaaggtaaaaactgcatccgagagagaatgtgtgcaaggggtggagggcagggga

SEQ ID NO: 11134 - DNA, 1108 bp, Homo sapiens
gggaatagaaacgggcagaggaagacagcatgccagggtgatcttgtccttgtgataattatatcttaccactgggaagccctaatagtatttatatccatgaccccattttcttaaaaattaatttttgggggtacgtagtaggtgtgtatatttatcatcactagatcctcactggaagaggcttagtaaacgtcaaggatcactgaactgaagtctgaatatctagatttctgggaatttggactaggcacataaccccaaaaggtttattttctcccatataaatttgcctttcttatccctgttctcacttttcccaaagttactaaagggatcaaataaaataatggatttgaaattgctccatgaactcaaggatatcaacatttatgagatattttgcatgttttgggggacagataagaagtgccctgcacattttgggattgaaaacatactgtggtagtggaatggttagagacttgctcaaagtgccacagcttgtttttagcagaatctttctcatggatctttatccaggaggtatttccattataatctggggttgcttcttccactgcaggaaatcagaagaaaaggaaggaaatcaatgagaagtatattcatgaggcagatttcataaatcatcaagtgtccgtggagctccttagatgcaatttctttaactcacaaaatagaaagataccccaagccttatccaaggtaatggtaattgtgcaacatggtagaatgctggcagtagtgcagagtcaatgacctaaacagagcctatgcacaaaaacaaatgacaagggtaatgatatttgttttgtgctttacagtttccacagacttttgtgtatatcagcatatttgattctttcagcaatcctataatatagggatggaaggtgtttttattatccttaaattttaaatgcagaacatgaggcctggagagttaacttgacttgtccaagattgaaaaacctgtaagaggtgagtctagagtcaggcctggatgttgagacttcaaattcttatctccatggtgctaatggcactaattctttatattaagccttgggcaaatggttcattatgc

SEQ ID NO: 11135 - DNA, 1153 bp, Homo sapiens
cctgattaactcttaatggtaaatatttttagcacttaggtaatttttatagtagcctccaatttaaaaccacaatattgataaaattgtaaaatatattttctcagatgccatgaagtacaccattgtggtgtcggctacggcctcggatgctgccccacttcagtacctggctccttactctggctgttccatgggagagtattttagagacaatggcaaacatgctttgatcatctatgacgacttatccaaacaggtcaaaggaaataaatttttagaatccatttatttgtactgaagtaaaagttcacatatgcaacttctatttaataggttaacttcacaaacctattctgtaccataggctgttgcttaccgtcagatgtctctgttgctccgccgaccccctggtcgtgaggcctatcctggtgatgtgttctacctacactcccggttgctggagagagcagccaaaatgaacgatgcttttggtggtggctccttgactgctttgccagtcatagaaacacaggctggtgatgtgtctgcttacattccaacaaatgtcatttccatcactgacggacaggtattattttaatgattaaaagaaatgttaaaaaagatttggataattctaaggcattggttgagactaatggtatattgactgatttgctaaatgcattttactttttattatggaaaatttcaaatacatagaaaagttaggagaatggcatagtgaaaccccatgtatctgtcacccagttattgcatagagtagcatgtttcgttctagtttcatttttaaccactactgttctcccttctagataattttgaatcaaatagaaattatatcacttcatttgtatgtatttcagtataaatatgttgcctattatgtttttttctcatctcatgcacatctcctaattgcagcaataaaatatacaggtcaggtcgtgaaagatttggggtactgatgctttgcattgttaggttttgagtttcagctttttggcataatgacttaaatttgaagatagttgatttcttactttaagcttgctagcgtgcgtatttccttacattatagatcttcttggaaacagaattgttctacaaaggtatccgccctgcaatt

SEQ ID NO: 11136 - DNA, 1404 bp, Homo sapiens
gttttgattaatttttgaaactgtttatggagcttctcacacataaataagatgataatcaaatttgtcttaagatttccatttggccttcatcactttatttcatactgatcacccagcccaagaatcattgccaaagaaaatacagtggaaaaaagcttattaacctgtccaatttctttgcttctgtaatagttatttgaggatatgatagtgagcatattaggcttatcaatgtgctgtcctaagattattcaaaatagcaattttaaaagtcttaatcagagagggttgtttgttagttggaaaagtactcaagaataaaccaggtgaaaaggacaatactgcttccccccccaccccccgactattttcttatgtagtattggtgtatggggaggagtgcccattcagcttcattgatgttcaattgtgtcttttgtgcagggtatgtccttgaacttggaacctgacaatgttggtgttgtcgtgtttggaaatgataaactaattaaggaaggagatatagtgaagaggacaggagccattgtggacgttccagttggtgaggagctgttgggtcgtgtagttgatgcccttggtaatgctattgatggaaaggtaggtttaatgttcgttagatatagttgcagcttctaacaaacatcaaaactgattatgcttagggtttttctttttattttttaacagggtccaattggttccaagacgcgtaggcgagttggtctgaaagcccccggtatcattcctcgaatttcagtgcgggaaccaatgcagactggcattaaggctgtggatagcttggtgccaattggtcgtggtcagcgtgaactgattattggtgaccgacagactgggtaaagactcaaaagcatattaaaagttctaactaaaatttgctcaatggaaggattatattttagtcttggaatggtaaatggtaatggggacattagaatctaatacgaggattaatagtaaaatttcagctgggaagtgaagggggccagcccctccacacctgtgggtatttctcatcaggtgggacgagctagctcagtcggtagagcatgggactcttaatcccagggtcgtgggtttgagccccatgttgggcaccagatgaagggggccagcccctccacacctgtgagtatttctcgtcaggtgggttgagagactgagaaaataaataagacacagatacaaagtatagagaaagaacagtgggcccaggggaacggcgctcagcatatggaggacccatgccgccactggtctctgagttccctcagtatttattgatcactatctctactatctcggtgtgggggatgtggcaggactgtagggttaatggtggggagagggtcagcaggaaaa

SEQ ID NO: 11137 - DNA, 1070 bp, Homo sapiens
gaccagatttttattattattattattattattattattattattattattattattattttgagatggagtttttgcccttgttacccaggcttgagtgcaatggtgtgatttcagctcaccgcaacctccgcctcctgggttcaagcgattcttctgcctcagcctccgcctcccgagtagctgggattacaggcatgtgccaccatgcccagctaattttgtatttttagtagagacagggttctccatgttggtcaggctggtctcaaactcctgcccttaggtgatctgcctgcctcagcctccaaaagtgctgggattacagctgtgagccactgtgcctggcccagattatttttttaattgaattgaattgtcttccatagggactgctgagatgtcctctattcttgaagagcgtattcttggagctgatacctctgttgatcttgaagaaactgggcgtgtcttaagtattggtgatggtattgcccgcgtacatgggctgaggaatgttcaagcagaagaaatggtagagttttcttcaggcttaaaggtaaattataaaataagattttggtgttttaggatctaagtcttctcagttattcatttagcgattcaaagattgtatcagatttttaaaaaactttgtcttaatttgcctcagatttttttcttgttattatcatagattgtaaagagaataaacttaagggtttgaattagccaagtttttttactctagggactgatttatacataacttgtagccactggctccaaaatataaaattgaataaactttcaccccaaatccaagaagtttaagtctgttctgtcttgctgttaagattattttatacaaaagcaaagcatttgataacttcaacaaaatttttctggtggaaattggaagtccgtgactttgtatttctagtgagtagacatattgttcaaaggcgagttttggtgtagctatcagaagctctctaatgtaagtctactttgtattgggttgagcctcatctgtcagggtatgagaaataagttgtaggagttaggga

SEQ ID NO: 11138 - DNA, 1245 bp, Homo sapiens
aagaatcagaatgtaccataagaaatcagatgcaaagcacgttaatgtcattggtaagttttacagagtctaaaaggattagcaaagggtagcaggagcttcagggaattcaggaaatgccagcattggaattttgtggcattagttactaccttctttcttataatatgttgtagttactagtgaattcttttaaaagcaatacctagagttagaacactatgtactctgcacagggggagtgaagtaatattggcttagaagacttcaccttttgtttttcatggtttttgtttgttttgtttttgtttttgtttccattgttaccgttgctatggccctttgcctgtctctccaaatcccctggtggctcttcttatcattaagagtatgagaattaccattttcagttttcattcagcaaacaaatttaccaagtgcctgctctgcataaggcactgtgaggggtgggtgctctgggggctgctgagatgaatgacacacaccgcacatacacatgcatcagtgtctgcctgcctccacctgcccagcctgttcttcttcttcttcttcatcttcttcttttttttttttttttgtaaagacaagtttattcctttacgcttcttgttgcattagttctcctgtatgttccttcttccacaggaatgtatttgtgcatatgttctttgatcttctctgatagcatctcatttgatctggcctctgtccttcatcagcttttattttttttatttttattttctgcttttgttagataaggcttttaagatcatgaacctccagctttagcaactcatatatcagtctctcacatggccacaattctagacaaaaaccaaagacccagaggccagagcaaagtaggaccttctgaagattcactactggtgtatccttggaccttcacattttactttaggattaatttattgaattttactgttacacatagtttttgacttgaattaaaatactagacaaagcagaaatgtacaatttctggtctgtgttttccaggaaattcatagagaagagaatagagtggatgatgtgacttgaagtttttgcagcttattttttcccccactgtcagggcagaggcccattttaatgaatgtttttgcatgacctgttcttatgttaaccacatattttttttcccaattccacacagcaggtgatttcccgtgtgacatattttcttcatagtccctaatatag

SEQ ID NO: 11139 - DNA, 1149 bp, Homo sapiens
acatcccataaactttgcttttattatcaattatgaatatgaattgtctggtttactaatgtagtcatttgttcatctttacttttagcagattagcaccataactaacttaaaactaagtttgttacctgctttttatactgtcacaaaggtttttgaaaaagctggggacactattttgtcttttagttttaaacttttttaaggcaaagcaagctccccaatccctgttctccaatatgtgtatgatgtgacttccatgtagatataaaaatgattgtgccctaaccaaacttcctcagattgtgcactgtttgtttaaaataatcacgtattttagtctgatgctgttgtattttttcattttatttaaaacactacttacttcttattctcttaacaaattttaaaaggtagtgatcttaaaaaaaaatcactggataactaggaaatatttttgttgttgttttgtttcttaaagagtacagaggccattgaagccttttgctcctcttaccgtgaaaatgaaatgttagccattgtatggctaggaaccaatgcacttggcagttaatggatctgctgttgctggagtgtgagcgtggacttgatgcagtgatgacaaatcattgcttagaattaatgttttcaaatgtgcaactctagtttttaaaacaaaatttggttctttacattcattatttcgtttttgtttccctttagtatttaatggtctttggagaaaaaataataaaacagagtgttatatatatattttttggtgcaagataagattttctgttttttgaaataagtctgtagcataaaggttaaactattttaagacaaaataaaatagagtgtatttaaacaatgatatcttctgaggtttttttttttttttctttgtccctatctgcttcagttaattaggtggtacctggagcaatttccaagttaccttttaaatgtgaaagtggattctattttgttaacaagtcttatctttataagatgtctgagttttcaaagcaagagctgtatccttgcaaggttacttgcaaaactactcccaagaagttttgcaagtaaccttggataattgttggatgttgataaaaatagctttgcattagctttcctgtaacc

SEQ ID NO: 11140 - DNA, 1119 bp, Homo sapiens
tgcctcagcctcccaagtagctgggactacaggcacgcaccaccatgcctggctaatttttgtatttttagcagagatggggtttcaccatgttggccaggatggtcttgatttctgatctcgcgatctgcccgcctcggcatctcaaagtgctgggattacaggcgtaagccacagggcccggccaagaatcttttatgtgtagggattgtgagagagtcaaagatgcaaaacccagcccctacctcagggagtggtcaggcacctaggaggaggcagcaatgcatcttacatgtactaggagaggtttgaatatggtgactgtgtcagaactccaatcagcacatggcctgaccttggattatttaaattgcaaatatattcatatgaaatatctgaaaaaggtatataatgtaccccttttaaattcacatctttagcaaatatcctttaaagaaaaaaagtttcataaagctgagatgggaaacttgagattgacagttcatgtcatccctctttctctcccttccttcaacaagtatttatgggaactcgctatatgccaggaattggtctagacacacaatgatgtgtgtctttcagtgaggccaagagaacagacaaataaaaagcagtaacagctccctaatggctctgtgtggagcatcccgagaacccacaggaaggtgcttcataggaggggcagcaagtggctggaggggattttcctggaggaagcagtgtgggagatgtgacctgaagggcagcagagcagtattttgttagatgaaggagtggaggttgagctagggagccagggagaggttatcaggtaaagggagaggcacatatgaaggctctatgaaccaaatgtatgggaggtcagaggagggtgtcattaatttcgcatgagggcaaaggcatgagagatcaataaaggcttcagggaggagttgctatgtgatggggcattgtgagatgaataggagtttgataaacaaaggttgaaagcactctgggcagagggagtgggcagaatccataaatgcctggtctatttagcatgtgatgctcaggtaaccatgtctagagcaaagggtacaggagggtaggacttgg

SEQ ID NO: 11141 - DNA, 1210 bp, Homo sapiens
agtgtccctcagctcttgccgggcctctgactctccctcctctcttccagacgcctaccctgtatgcatctctttcaccaactgtgcgtggaccagtggctcgccatgagcaagaaatgccccatctgccgagtggacattgagacacaactgggagccgacagctgagggaggaattagccagtggacaccccatttccttcaccaggtccccccacggccatagcccttgcagccaaactttgccttctgagccatttgacgtagaggaaaagcctgcaagcacattttgtggaaagaggagttggtggtatcggtgtcgagggagaggagggggttggggaggacccacctctccagaatggcgactgtccccatccgcctggctgagcaggagagagggagctggcggtgcccagcgcaagggcgggaaggaggggcccaggctgcggagaacccaggtgggatcctgaaggcactagctgacagacgggcccctcaatcctgtcctctgaaggattgtatatatacctctcgaccacgtaggaaccatgtaggggtctctagctatttctgtggatggcagccggagcatgttagcttaagaaaaatgttgtgtgtggtgctctagtcatcttgtggtggacatgtcgctattaccgaattcgcaccaaatatttctcattgagtttcttgttttggtgcctgaccgaaccaacgacagccccaatcttcccgtctttatgagagaaaaggaaaaaggaatcaaaggtggaagaaaaaaaaagccaaattctgtttacggtgaaaaaggattttgtttttcacccaatttgggaggcgggaggggggggttctcgttttatttttgtttttgtttttaccttggcttttgtttttctcatgtttacagtgcacggagtgtggaagggggtctaggagagggagagctggaaaaggagctgatggggtcttatcctggcctctgagggttcagcggaggtgaggaaggcagcagagctccagcaggtgaagggagagttcatctaggcggggctccccaggcccagggctcaacttcatggccccagctatatccccccagttccacactaaaccagggagggctcggccctcagctactggtacccaatgtgttcctgggagccgagagacccatggtcactccaactccttcctttaggctgtg

SEQ ID NO: 11142 - DNA, 1634 bp, Homo sapiens
actctttgataaccttgggcaagtccctttctttctctgtgcctcagtttccttctcctttgaggggggagagagaacagtgcagccccatttccggtcctgctacctcacctagatgttgtgaggattcatattctctgtccagcgtgttctatgctctcttctgagaaccttgtggggtgtcgggatgggggtgctgggagacacagacctgatacagtatgtctttctgcaccacctcacaattttcctgaaccccaaagggagcagagagataagaggacagaagaatggagatgggaaaatccaccaaattccaacccaaacccaactttctttctccctatgtggaagacaccagattagctggaattctgccaccttcctttgtgccccaccccccactgttccctcatttgcactgctctgtaagcctccccctcacctccattcataacccagtctcaatgccctcgtatcaataagaccggggtaagggggacaggatacttgtcacatatttgaagaaattccatacagtgaaggaaatttgagtctgtattgctgctacaagggtaaaaccaggaccaatgggtaaaagtaacaggcgggcagattttggcttgaggaagagcttctagcacgactggttcatgcgggaatagctgctctggccacctgcaggcagaaagtgggggaagtggctcctggcaggagatttctcccagcactaatatcctggtgttctataaaatctttattgagtgcctaccggtgcaggcgctgggagagacaatagctttgaggagctcacaatctagctgaggagacaagacacatccaatgctgcaaaaatggtgaataacctgattcagggttagcagcaatgagtatcacagcgtccaactcagtagctccagtgtatgaaaatgtctccagggctaaaggctggagatctcaccagtggggaaagtacatctgagtcaggattttgggggaaagctagttactgatagccacaggaagttgagacttctgccccattctctccaatggctgggtgaaaaccaagaattcatcggaagatggctttggcctggaggtagctagggtggtctaggaagctcactcctctcttagtctcagtctttcattctttctgctgagactggcctgaaaggctggcaagtgggagggagtcagtggggaggccaggatagaactagagctggtgtcccaggttccagtctgggctcttcactgacaaagtgggcaacactagaaacttccctttgtctctctgggccttagtttcctcagttacaacctaaggaggttggattggatgcttgctaatttccttctgacactcacactccctaacatcaacacatcttcaaggcggcagagctgtgcgcccacccagctattgaaaaggactttctgtgggcacacactctgtttcagactgggctgggggcacacgtgctgggtgagacagtgggccctcgtcccctcccccctcccaattctctgccccaggctaatattagggactggggaggggaccaccagaggggagagggaagctgcttactttgggggtagaccctgaagcccctcctccttccccc

SEQ ID NO: 11143 - DNA, 1094 bp, Homo sapiens
agccccccgcctgtaggcgggacaaacactccctgcgtggggctgtagcaacgtctgtcaggcccccttgtgtttcatctcctgcgcgcgtagagcaaatgctagagcgatttcagctgatagaaaaacaaaaatgaaaaaaaaaacacaaaaaacaaaaaacatggcacgttgctagtttacagggttttgtgagtttaaatgccttatatttaacaatcataatttatgactaacttgtagatatcgtgggttcttatttaattatttttatagttgttttgcatttttaattataatttatttatttagaaaggatactaattttttttattactcctattacctcattttggcgttgtttctgggagtggaatgctttgcatgcattggtacgatgacaaacaactacgaatacaaaaaaaaaatttaaataaaattctgcaaactttatttcgtccgaactatcagggtgtgtgattgcaagctgtcctaccgtggtgctggcctctttggatacattccatacgaaatgcaaacctttgattctgtatgctgtgatctagtgaaaaactccaatatagtgactgtatttagcacatatataaatataatttgcacttgtcagcagactggggtaatcctttcacttgctacacttggcacccccccgcccccaccacaaccctgcctctccatcatgaacctgcctttcctcctccctcgctcctcccacaacctcagcccacccagccggtatcctctgaggaaagtcttggggcactagaggccactgtctccacctggcctccaactccagaattggagccctccagacattacaagaggaacatcagagagccaaaaagcctgacttcttagaaggagccctggactggggagccgggaggctcaggttttcaaatctgctccatgacagacgtcccaatgaccttgagcaagtcccttggcccctgagtctcagttttctgggtggggtgagtgaggagaactgggagatctttagggtcccttagattcaagtagaatgtgacacagatcccgtgggaaaccactgtgctgtgctgtctcac

SEQ ID NO: 11144 - DNA, 1853 bp, Homo sapiens
aaaaaaaaaaaaaaaaaaagagggaaagagggagaaaggattgggaggagaaaaggagagcaaagaagaagagaagaatagagagagtgagctgagaatttgagcttgctcagagttgactttcgggagggtttttgtcctataatatgtggcatcctgtgggtgacagggaggtgagttaggtggacacgtataggacgtgccctttcataaggcttgggcagtcatttggcgagtgagctgaaatccatgtcttgttagagatagggatggggtaggcagaaaggagctccaaactatgggtttgggattggcacccctatcctatcatcacccagagtcttcattgttgagatgctgcccatggaaaacagattgggacatagattttggaatcaaggtctctgctcctggcatctcctctgtgcgtctccctctgcctttgctccctggggactgtgggcaggaggagcttcttcggaggaccgggagtgggcctccagtccccctgcccctgtagaggaataatgagggaggacatggggaagtcactgtcaaaggctggcacagctgtgagcccaatgcctctgagcgaaaaggagagagagggagttcacgcccctgagagtagccccctgagccggctgggacctggactgcctgctttcctcctgcctcttcccctttccctccttcacagcttatcctccttcttccctctttacatcactgcctttacctggtggggatgaggccccatggggaaggtgctgatgtggagggaggaagtggagaccgagattcgccatactgcccagggaggctgtgtgagaactgggctgtgtatggtccctaaagcctcaactctgccccagctgggcgatgggtgcccctctctgggcttcctgcctagcttccccttctgcctccagcctggagccttgctttccctggagacaagcccgtggagtcccccaccacactggagggagcacgaccaccacactgctgggcctggcagacaccacatctttggcagggctcctggacgggcatgccttatgctgctctgcagggtcagagtggaaaggggccctttgccctggctggcctgtgccctcacccttgagcccctccccccactccacccctggcctcggatgcggctaatttctcagccatggagccagctgcaccagccctcgagggggtaattttgttgcccctggcaagtgaaaggattatcctcagtgttgattgtccttttttgtaatcctcctgctgttctgttctgttgtgctgtgcaacattttgctacatagactattttatagcagaaagctagaagaatatttattatgaatattaaagcaatagtgcatcaatgaaaaggcggagacattaggaattgtgtaaatgcttagattcacttttggtggattttttgtactttatttataactaataaaaatgaactgcattgctaactacaccttatgcctgctgggtgtttattttggtgtgtacccagggcatgtcggaggaagcctcgccaggcctctgtctttgtccaagataagaggcactatcagttatctatctagctctcaccaacttgccttgttctctctcctttttctcttattttcctcttccctttctgcccctctttcacccttttcttccccccccttcttgtctcttatctatttctttcttgtatctctttatctcttaaagaatctgttctatgactgtggaccaatcatctaattgacctatttcctgaactttaggtatgaattgtaaagcggaattttttttttttggttggagtgcagtggcacaatcac

SEQ ID NO: 11145 - DNA, 1236 bp, Homo sapiens
tgcagtgagccgagatcgtgccactgcactccagcctgggtgacagagtgagacatcatctcaaaaaacaaaacaaatcataataataaaaaaagaatgtgaagcacagtgcctggtagggtggaggaatggatgggtggcaaggagacttcaggcacagatcagccctggcagaggacagcagagaggacagtgtgtgtgacattgctgggggccaccctgctgggcacagagctgtgggcgacttgcccagatggagatggcccaggtccagggacttggagaaccaggtagggggcagggggtggggaggcctgtgggtaagaaagtgccccggaatggaccaaaggtattaatgagttttaatggagctctcgaagcaatagtttcctcagatcccaagtcctctgaggaaagccgagccagcagggcaggtaaaggatggccggaaagctctctaaggtcctggggtatgttgttgagccaggccagcactaccccatcgatggtaagccaaaattcacaggacacaccagcaacaggatggtaacgggttcctcctgtaccagcagtggccgagtcacccacagatgccacactctgcagtgagagccctgtgtatctcttgccagaaggacagggcagagaaccagtttggactctgggctgcacactcatctccaggtcctgacagggaatggggaggctgagaggaggcagtggattcgagggcaggacatcctgagaggcctgctgtggggctgagcgtgcgccctgcctcctggctgcccttgaatctgaggcaagcgactggggcttcaacagggctatgtgagatggggtgtgaccatacacggcagacaagctgcctgcccactctggagacatggctgggatgagatgggctggccccggtcacagagaggtgagtggcctgaacggctggagtgtgtcagagagaagggtgcccgagggcctcttgtggagtgtctcagatcctaaacaagaggacagtgtggagggtgaacccacacaagtgctcatgaaagtctaaacacctgccaggtctggaaacaaagacactagccacaatagcagccctcagacaggaagctgcctgctgccttcacctctcttcctcccgcaggagtctgaaaccctgggtcaccaaaaggcaggaggaggagggacagggcaaggcaggggaagagaggggaggctgactcacatacacac

SEQ ID NO: 11146 - DNA, 1106 bp, Homo sapiens
gatatagtatttctttctaataaagttttatgttgctgctctaaatacagatgcaatatttattgactctgtaatcagatagaaaaaacttaacttggtttgtgtggtatgacttataaagaaatgatgtatatttgttattttgttaccctttagattgtcagagactcccccaatttaatcaacaaagttttataaagtaaatgaaaatattaatagaaattagtttatttacttggttcttataactgatatctctgtgcttttataattgtgatttgtttttttgtttttttttctattttctgtgaacagttttaatgttcggttttggtgttttacactgaaattacatataaatttttaatttatttcatacaggcaacttgcattttaaaaaatacactttgaagtttatcatcttgaaattggggcttacgttgtttatctgtcttgagcattagtactttatgactttggccttatggcaacatcatgattattaatccgtcagcctttaatgtggtcactgtttcttatccagaccctgactttctagtagtttattttgctagcccagatttctgcttaaccaaatataagggagtttcagaggggtgatcttagctgtcacctagattctgtcagccaaccagtgattgtctggaatatcttaggaaatgaactgtaattgtcagcctcctaaaatcaatttttttttttttttttttgaggctgagtcttgctcttgttgcccgggatggagtgcaatggtgcgatcttggctcaccgcaacctccacctacagggttcaagcgattctcctgcctcagcctcccgagtagctgggattacaggcatgtatcaccacgcccagctaattttgtatttttagtagatacggggtttctccattttggtcaggctggtctcgaactcccgacctcaggtgatccgcctgccttggcctcccaaagtgctgggatttacaggcgtgagccaccgcgcctggccaaaataaaatgtttttatctttcttcacttagaactatgaaggccttttcttgttctggtaaccccccacagtgtaattggtgctgaaaata

SEQ ID NO: 11147 - DNA, 1113 bp, Homo sapiens
gttaatggatggagtctacaaatcagtgaaaaaagtttttgttaaaataaagagcaataaaattatgtaaatattcaagtaaccttttttctaattaaaaaaaaaattgtaatcactgattctagaatgacagcaacttctgtttaaccttacgtgaaggaaaaaaaatatatggaaagaacttaatgtttgctgaatgagtcctttccatggagatttgctctgtttcattgaagtaatgaagtttcagtacgtggccaaagcttggattccacttttcgtcctgcatttccacttttcttcgtgattgcatcaaagaaaaatggcattcgtgttacttggtttttttcctgcttatcatttacactttgacgttgtttgctaatgagtgctgtgtgaagttctgggatttggctactcttcattggtgattatgtttaaaagcactatgcagattctgccctgacataaagtgtgttattatgtttttagtaattgtacatttttcattctagagttttctataaatttgaggcttgccttctcaaaaaagaaactatgcagccattgaatgaaatgtctttggggtacggtgtgactggaatgtttgttagaaatttgttcacactatcaaatattgatatcttggagccagcagaagagcagattttgggaggtggtaataacaaaatttaatttcttcccaacaacttaattttctcatttattttacagaatagtagtgaaatatttgatgaaactttgtattttggtagcactacatagaaaatgtgttttagatttatgatgatcatatttctcaccaatgtaatttcagtctcagcagtgattttcaaacttagggaaagggacagcattagattttttttttttttcatttttttaaaatgatatcttacctgaaactacaaacgacaaaagagaattagaaatgtttgaattaaagtgaagaagggttgggggagatgggcctgaacccacttcctgtctcaatccatgctaccccaaacactccagggaacctctgaggttttattgggtgcactttgaaaatttctcttctatagtgtgtttgtttgattttaaatcaca

SEQ ID NO: 11148 - DNA, 1148 bp, Homo sapiens
tagttttcttctctaggtttatgaagttaattttgacctatgatttattttttttctccccttagtgaggtctttattttaagcacaatgcttatcctgttggtgaaagtttatgttactgaaacaattgataattggctcggtataattttgccacttgaaatttgtttagattatgtgaataaaatttagtggaaaagaatagacattttatagtatccatagaaaaaaatggcttttaaagttattctttgcttcttagatatagttactccacatgtaatttgggagttggtattttaagaagttctttgtagacccagctagcacaaattgtaaagtatttgtaaagtatatacaaagtctaatgccaaggtacaggtgaggattcatgtcggtgacaaagatggaaattcagagattcttaattcccaactgccttttatggctgtaacatgggttgttggaagagtgtctgcatgtcatctcagtatgtgttataagcaagcattctgaaaggatttgtttcctaaagaccttgaattaaaaattaatcctgaaaaaaggtaatgagcatttctgttcattaaagtgatcctaccatttagcagtagcatagacacaatttaccaatcacttgccctgttagtttttcagttctctgaacctggattaatttttaattgggggaaatttacattatttcagaatttgggcataaagtgagactttatttctttttagaaatgtgcaaacttgagaaaaatgcagtaaaatatgtctgaactggctatttggtaaaaatgtgtttcaagctgatattgagcaaacaagactaatatccaaggctgatatttagccagtattaacagttatggtgatactggttgttattattgaaaagctttcttaccagttgataactgaatagaataggatctattttgctttagaagaattgctagtttatcatcatgtatgaattatgtagcagttactatatctaaatagtttagttttactttgattttattgttaatgtgctcttttgtgattagtaatttggttttatttttatgcataatttttatgtagttagtcatactgtgaagagttttggtattgataaacttaataatttataataa

SEQ ID NO: 11149 - DNA, 1205 bp, Homo sapiens
tacattgtatattgggaggggttggttttgaaaaggagtatattcattggtgatagattttatagtcataaagcaaataactgtttgcattagagcataatcagataatgaagtggttagtagaaaccaatagactatagattaccaaaattaagatcttgtacaacaaaatataattaacaccgtaacttgaatgtaatttttacgggattgtcttatgaatggtaatgattctaagtggtatgtgaaatgctgttactagcacatgccaattgatagaatgctggaaaaatcacattttacattatattttagataggatttttgtatgcttgagggtgacttggcttatgtttttttttctttccttttagaatatggtttctagttttagggtttctgaactacaagtattactaggctttgctggacggaataaaagtggacgcaagcatgacctcctgatgagggcgctgcatttattgaagagcggctgcagccctgcggttcagattaaaatccgagaattgtatagacgccgatatccacgaactcttgaaggactttctgatttatccacaatcaaatcatcggttttcagtttggatggtggctcatcacctgtagaacctgacttggccgtggctggaatccactcgttgccttccacttcagttacacctcactcaccatcctctcctgttggttctgtgctgcttcaagatactaagcccacatttgagatgcagcagccatctcccccaattcctcctgtccatcctgatgtgcagttaaaaaatctgcccttttatgatgtccttgatgttctcatcaagcccacgagtttaggtaagtgtttgagaattcagtttcttctgaacaagatagtaaatgaaatgagagaccttcaactattgattaatgatgtgctgttaatatagtgaaattgaggcatcaatgccgaatgtttgaatatacggataaaaattcggcaaccatgactgaaatctaatagaagctttatttcatatcatttgatctttcttcttctccaattcttttattgtaaaatacacataatataaaatgtatcatcttgatcattttaaagtgtacagttgagtggtgttaagtatgttggtaatgttgtgcagccatcactgccatccatctccagaactcttttcatcttctgaagctgaaac

SEQ ID NO: 11150 - DNA, 1159 bp, Homo sapiens
ttaagggttttagtggctcagagccccagctgtagagcttttaacacctgtggagcttttcaaacaacgaaccctgaacctcacctctgtaaattcatgcgttagatttaggatgggttgagaagactgaactctgaagttatatttatttttacctgccatttttaatttttgtgtagtaacagatgtatacaagttttctaagttcttttttttttttttgttaatgaaaactttccaggatttttattagactcttgtgaatgttgttggccaaagcttaatgtaaagcgaagaatttactcgctcttatagagcagagtaaaagcagtcagtgctcagattggagtgcaaccagcaactggaaagtgatagaaaccaaagaagcttttttttctcttcctttctgccttcctctctgttttggtttgtggatcagcttcatcctcttttcctgtaaatcagctgtctttacttcttgcatttttagaagatggcccctctcccacaattcatatgacgtgcccaacagagactaactggggagaattttcagaggagtgaggggtgcaggctgggcacatgcagtaagcatcatctgcttttctttgccttaactgctctgtgcagacccatgttaccctacacttgaagatgaactgtaccccgcccttacatcccattacagacagtaatgatgatgatggtatatacccattttaatatagtggttattccatgcctggttctggtctaagcattttttctatacttatttaattctcacaattttttcaagaaattgaagcacagagaggttaacctgacctaaatcacacagcttgagatttgaaaagctaagatttttaatcttagacatgtagcttttagagtctgggcttttcagagcccgggctacactactttgttctggtaccttggggtctaggtggagcttctagccatcatcctgcgattgctcctaaattaaatgattggtaacatccttcttgtgtgacattataataaaggaagaaaaacagactaaaaaacggaatagaaagaaagaaaaggggaagaaataatcttggattctcaaaatgatggtccttggatcagaatatattgtggtggtcagagtgatgctcaagtaaattat

SEQ ID NO: 11151 - DNA, 1249 bp, Homo sapiens
aactctccaggactggaatatctgattgctcagtgttaatagtagttcatgctgtggtgagattgttaaaagggtgcaagactgttgcttctctttttttagatatttttctatctctcacttctcagggatgaaattctttttcaaagttttgaagttccttgcaacttagccatgatgtgagtggttatccctagataaaattaaaaggatttttaaaaagtaattactgcacataaaatgataaataggtaatttgaataattttattttaagctccttggttaattattttgtctattgtctcagctataaattcaaatttatacatactattgagtattaatattctctgatttcagggagaattctgtcagtcacatgatgattatgtttttgtttaacattctttccatgcacttgttattttattaatttgcctgaatgatgagaccagaccagtgtctacagattttcattgtcagaaaaatctataagtctgccctttttacaatgatgatttaaaaaaaacaacagcgtaaatattagcccacaagagcagtcctaaacaatcacaattacactgtactacccaagaagactgtttattgtgaagcatttacctttcaaaaaatcattacatttctatttcttggtggagcagcacattgtggagtgtgattcttaattcttcattgagtttgtcaataggacattgatgctggataggttgtcttttgtttttatgtctcagaccatcttgtgagattgtttgcctatctcataatacagttttatgcagaaaggttgaaactatgtaaatggtttttatggaaattatcagttacaatattttaaaggtgtagaatggcatctttgtttataggagaacatttgtaaataaagttaaatttctaagtcaagcacttgtttttgtaccttagtataaacctgtcagtgttaactgcattaatctccattttgggtgaacacctcttattatatgttctttgctgtaaaattgccgagtatagagttaatgaaagtaaatatttacatgtatttttttttcttcagtgaattaactgaattgctgacatacatccagaagactcatgagcaccttttatttcatgacttcagttacttctaaaactatggagcaggtattaagtaccttttggcctttcctaagttagagatcagtgatctttggactataggcttgcagctagtccaaggaaagtac

SEQ ID NO: 11152 - DNA, 1336 bp, Homo sapiens
aaaacaagtcccaggcacaccagaaggagctgaccaccttaggtgttcttgtgatttatccttacttccctatgttgtcatagttgcttctaaactcagctgcactatggctgtcaacatttctgatacttattgggatatgtgccatccagtcatttagtactttgaatggaacatgagatttataacacaggtaatagctgaaggtaccagtatggtggtgagactcacacttagtgatccagctaaggtaactgatgttataatggaacagagaagaggccaactagatagctaagttcttctgaacctatgtgtatatgtaagtacaaatcatgcgtccttatggggttaaacttaatctgaaatttacatttttcatagtaaaaggaaaccaattgttgcagatttcttttcttgtgaggaaatacatggcctttgatgctctggcgtctactgcatttcccagtctgttctgctcgagaagccagaatgtgttgttaacatttttccgtgaatgttgtgttaaaatgattaaatgcatcagccaatggcaagtgaaggaattgggtgtcctgatgcagactgagcagtttctctcaattgtagcctcatactcataaggtgcttaccagctagaacattgagcacgtgaggtgagattttttttctctgatggcattaactttgtaatgcaatatgatggatgcagaccctgttcttgtttccctctggaagtccttagtggctgcatccttggtgcactgtgatggagatattaaatgtgttctttgtgagctttcgttctatgattgtcaaaagtacgatgtggttccttttttatttttattaaacaatgagctgaggctttattacagctggttttcaagttaaaattgttgaatactgatgtctttctcccacctacaccaaatattttagtctatttaaagtacaaaaaaagttctgcttaagaaaacattgcttacatgtcctgtgatttctggtcaatttttatatatatttgtgtgcatcatctgtatgtgctttcactttttaccttgtttgctcttacctgtgttaacagccctgtcaccgttgaaaggtggacagttttcctagcattaaaagaaagccatttgagttgtttaccatgttactatgggactaatttttaattgttttaatttttatttaaactgatctttttttatatgggattacattttggtgttcactccctaaattatatggaaaccaaaaaaagtgattgtatttcacatatggacatatgattttaagagtacatgtttttgtttttttaatttggtgttac

SEQ ID NO: 11153 - DNA, 1315 bp, Homo sapiens
aatttgtctgtgtacattttcctttcatggacagaccattggagtacattaattttcttaatctgccatttggcagttcatttaatataccattttttggcaacttggtaactaagaatcacagccaaaatttgttaacatcaaagaaagctctgccatataccccgttactaaattattatacatccagcagattctgggatgtactaacttagggttaactttgttgttgttgataatactagattgctccctctttaattcttcttctggtgcaaggttgctgcttaagttaccctgggaaatactactacaaggtcaaattttctagtatcttacagcctgattgaaggtgattcagatctttgctcaatataaatggattttccaagattctctgggccatccttgacccacaggtgatctcgctggagtatattaacttaacttcagtgccagttggtttggtgccatgagatccataatgaatccagaacttcaccattgcttagatataagagtcccttggaagaataatgccactgatgatgggggtcagaaggtgtattaactcaacatagagggcttttagatttttcttcaaaaaaatttcgagaaaagtattcttttaccctccaaacagttaacagctcttagtttctccaaatatgctctttgatttacttatttttaattaaagatggtaatttattgaacaatgaaatccgtaatatattgatttaaggacaaaagtgaagttttagaattataaaagtacttaaatattatatattttccatttcataattgttttcctttctctgtggctttaaagtttttgactattttacaatgttaatcactaggtaacttgccatatttctggttctatattaagttctatcctttataatgctgttattataaagctggtttttagcatttgtctgtagcaatagaaattttactaagtctctgttctcccagtaagttttttcttttctcagtaagtccctaagaaaacatttgtttgccactcttactattcccaatcttggattgttcgagctgaaaaaaaatttgatgagaaacaggaggatccttttctggtgaatataggttcctgctttaagaatgtggaaatccattgctttatataactaatatacacacagattaattaaaattgtgagaaataattcacacatgacaagtaggtaacatgcatgagttttgaatttttttaaaaacccaactgtttgacaaaatatagaacccaaattggtactttcttagaccagtgtaacctcacacc

SEQ ID NO: 11154 - DNA, 1251 bp, Homo sapiens
agatggtagaagctttgtactccccaagtccatggggaaacagtttatctttctggacttagttttatcacatccagctctatattagcatattagcataggtgagaaatatggccagactagacagagatcaggtcatcaggggagcttccgagcttcagcaaagcccacaggtagctctgcgaactcagaatgctaccctaccttccctgcaggccgctgttcatgtctggactcctgggggcgctatttaatgtttacccccatctccagtgccccctccaaggctgtgcagtgtcttggggctctcagggccaacatcgaagagatgggggccacctcttaacacctggcaacagtctcccctcatcctgattcctgacaacagacaaaacaccggtttctagggtttatctgtttgttttttgagttgagggttcctcagggccttggcattgctagtgatggtcccctttgctgtgtgagaaccccctcaaccccttcctcctccctctggggatgaagtgggagtatttggctccccatttttgacaaaagggctcagtgcagggaggtggaggcctctgaggtttgaagggctctgtgagttagagttgtcacatgttctcctggttcttgaatttgcagcaggtcctgaaaaggaaggctctgctggccccgtgccttcctgaccttctctctccttccctcccctctcttttcttgccaagtttgctttggtttctgagcagcccagagaggaggagggttcgtccccagggagagcccagggctggagtccccaatccctgtgctatgggcacaaagagacttcagctcttcctgttgccttggctttttcctgagcaaaaacacaacaaacaaaaaggccagagaagagcacagactctgtccctctcacaactctccagaagagaccccctgattcttcacaccaccggatgccactccagccagcaggattgctacacacaccctctgttctcagaagtcatctgcctgggcagccgcctctcagattcctgtcttcgtttcagacacttttctctgaagcatgcccatgtccaccagccaacgtgcccccgtgttcccccccatcagccaagtgattggggctgaaccagactttaaaagagaggaaaaaaaaaaaaaaaggaaacatgaataaattggaatccagtggtgttggggcttttgtttttattttgtaaaggtgatgacttcttataa

SEQ ID NO: 11155 - DNA, 2249 bp, Homo sapiens
ggttttctcatcaggatgacaaggggctggaggagctggccttcaaggttccatccagttgaaagatctgtaactccaggacgttgctgaggctttttgaggccctaaaagcagactacccaagctattaagggtccctttgcatctgtgctctgcagagaagaggctttgttggccaggtgggcacagatgctggtgtactggactcctgatgggcaggggcctggagagaagcagcacccagcgcttcctatgcttaaagaaaggcagggtcctggtcaaagggctgtaagagcctgggcaagtccaggactagcctcaccgcctccttctttctgtctcgtcctgagagatgagctggtgactgggtgcagtgggggggcgggtgtcttcattctaggagtcaccaatgcctgtccccactaaccctctctgccaatgtgttttctagattcccaacttcttctggagcctggggatcggtcacactggtgcgtggtggcatactgggaggagaagacgagagtggggaggctctactgtgtccaggagccctctctggatatcttctatgatctacctcaggggaatggcttttgcctcggacagctcaattcggacaacaagagtcagctggtgcagaaggtgcggagcaaaatcggctgcggcatccagctgacgcgggaggtggatggtgtgtgggtgtacaaccgcagcagttaccccatcttcatcaagtccgccacactggacaacccggactccaggacgctgttggtacacaaggtgttccccggtttctccatcaaggctttcgactacgagaaggcgtacagcctgcagcggcccaatgaccacgagtttatgcagcagccgtggacgggctttaccgtgcagatcagctttgtgaagggctggggccagtgctacacccgccagttcatcagcagctgcccgtgctggctagaggtcatcttcaacagccggtagccgcgtgcggaggggacagagcgtgagctgagcaggccacacttcaaactactttgctgctaatattttcctcctgagtgcttgcttttcatgcaaactctttggtcgttttttttttgtttgttggttggttttcttcttctcgtcctcgtttgtgttctgttttgtttcgctctttgagaaatagcttatgaaaagaattgttgggggtttttttggaagaaggggcaggtatgatcggcaggacaccctgataggaagaggggaagcagaaatccaagcaccaccaaacacagtgtatgaaggggggcggtcatcatttcacttgtcaggagtgtgtgtgagtgtgagtgtgcggctgtgtgtgcacgcgtgtgcaggagcggcagatggggagacaacgtgctctttgttttgtgtctcttatggatgtccccagcagagaggtttgcagtcccaagcggtgtctctcctgccccttggacacgctcagtggggcagaggcagtacctgggcaagctggcggctggggtcccagcagctgccaggagcacggctctgtccccagcctgggaaagcccctgcccctcctctccctcatcaaggacacgggcctgtccacaggcttctgagcagcgagcctgctagtggccgaaccagaaccaattattttcatccttgtcttattcccttcctgccagcccctgccattgtagcgtctttcttttttggccatctgctcctggatctccctgagatgggcttcccaagggctgccggggcagccccctcacagtattgctcacccagtgccctctcccctcagcctctcccctgcctgccctggtgacatcaggtttttcccggacttagaaaaccagctcagcactgcctgctcccatcctgtgtgttaagctctgctattaggccagcaagcggggatgtccctgggagggacatgcttagcagtccccttccctccaagaaggatttggtccgtcataacccaaggtaccatcctaggctgacacctaactcttctttcatttcttctacaactcatacactcgtatgatacttcgacactgttcttagctcaatgagcatgtttagactttaacataagctatttttctaactacaaaggtttaaatgaacaagagaagcattctcattggaaatttagcattgtagtgctttgagagagaaaggactcctgaaaaaaaacctgagatttattaaagaaaaaaatgtatttt

SEQ ID NO: 11156 - DNA, 1525 bp, Homo sapiens
gattaaaaaaatacacgatttttttttttttttttggcagaagaaaaggagaggaagaccagcggggctttgcaaggaaacggggggatgtaactcgtggatacatttttccacccatcaaacatcttgttatactttgtaaacattttctttttttaaaccccagttccagccggacgcccccagacctctgaggttcgaggaggtggtggttttcatttggggctttgcatatttggttgttaggttttgcgagagccttcttattttgccagacgtctcatgcggggtgaagtccactcggccccctcccctgagtcttcgtgtgcgcggaattcgaggagatccggttactaaggatatagaggaaaaaaataaatcgcttgcttttttttttttaattgcctgcttctccccacccccaaattaagttgcttagcaagggggaaagaggctttttccttcttccaacagcccagccgaacgcctttcgttttttgcccccgcggaccttccatgtaggaagccgaggctggcgagcccgacattcgggagccactgcgggggggcctctttttggggaggcgccgacgggggcaggctcggccgtccccagggaagcggcggccgggttcctccggggcgcgccggggccggagagccgcgcagggcgcgggccgcgcggggtggggcagccggagcgcaggcccccgatccccggcgggcgcccccgggcccccgcgcgcgccccggcctccgggagactggcgcatgccacggagcgcccctcgggccgccgccgctcctgcccgggcccctgctgctgctgctgtcgcctgcgcctgctgccccaactcggcgcccgacttcttcatggtgtgcggaggtcatgttcgctccttagcaggcaaacgacttttctcctcgcctcctcgccccgcatgttcaggaccaaacgatctgcgctcgtccggcgtctctggaggagccgtgcgcccggcggcgaggacgaggaggagggcgcagggggaggtggaggaggaggcgagctgcggggagaaggggcgacggacagccgagcgcatggggccggtggcggcggcccgggcagggctggatgctgcctgggcaaggcggtgcgaggtgccaaaggtcaccaccatccccacccgccagccgcgggcgccggcgcggccgggggcgccgaggcggatctgaaggcgctcacgcactcggtgctcaagaaactgaaggagcggcagctggagctgctgctccaggccgtggagtcccgcggcgggacgcgcaccgcgtgcctcctgctgcccggccgcctggactgcaggctgggcccgggggcgcccgccggcgcgcagcctgcgcagccgccctcgtcctactcgctccccctcctgctgtgcaaagtgttcaggtggccggatctcaggcattcctcggaagtcaagaggctgtgttgctgtgaatcttacgggaagatcaaccccgagctggtgtgctgcaaccc

SEQ ID NO: 11157 - DNA, 1251 bp, Homo sapiens
aaacagtctgtaatgttcagtgcagatgcaactatccttgttttttcctcagaatattttaaatccatggttggttgaatccagggatgcgaaacctatggatacagagagccaactgtgtaaatttagttttgctttttatttataagctgtggaggccaaaagaacctagctgttaaagtggtcatctttttcaattcatatgactgatcagaatcacaactcggatagttttaaaataagctgggagactccctttcccttccatcttaacgttttgataccaaattattttaccttaataaagcgagtgtaacactgcctccctatagtgaatgcacagacttctctacttatcctgggcctggacacaacccaactcagtgtcaccaagaatccaaaattgaagtcaaaaaaagaatgtgtcttgtggttccaaaaccatggaagaagaaaaaatggattaaatggttaaagaggaagcttagggctcattggcattcccccattccttgttttagacgtggttattatcggtgggtgaaattagcctcagcctctctgtagacctccagcatgtccttgttgctgctgtgacgtgggtttgcagggtgaatttaatcaactccaggcttccttactgccaggccaaggctgccagcctcttgaaagctcactcgtttcagattttgtttttttgggttttctaattttttctaattgagggcctgaagccattatttaagacttttccaaacttctcttgccttcaagtgttcatttgactattttatgggggtggggggaggtggtattgtttgtgttttctaagcaaaccaaaattacatattttttaatctgtcaagttaacctttgacaaaagtttaccttaattcagtaaacatatttgtactttggccaattctgaattaacttgaaaagtgttaagatatttttaaatttttaggcataaatatagcacatatagagttatgagaattgccttttagtttacttaaacataaagatactcatttcaagtttaaaatgtaaatgatcttgtgacgaatgaggctattcacatttcagatgaacttgtttcaatactttgaggcactttctatttgtcataacttccctgagattgagtcactatgttttactcttatttatccacgtatgtgttcatttttatacattacattttcccaactctaaatcaaaactgaatgccaaggatattttgttttt

SEQ ID NO: 11158 - DNA, 1136 bp, Homo sapiens
ttgccagataatgtgttatgcactaaatttataatagctcacagtgttataccgaatgtagataaagtaactggagttcaagagttcaagtgggctgggcacggtggctcacgcctgtaatctcagcactttgggaggctgaagcgggaggatcgcttgagtttaggagtttgagaccagcctgggcaacatagtgagaccttgtctctaccagaccttgtttctccccactgcagaaaaaaagtatttaagtaatttgatcaatatcttatgatgtgataagaggaaaagcaaggattaagcctcaaaattgctctcaaagcccatggtcttcactgttgtgtgcagtgctcaatttctgtgagttgtgccaatagcccttttgtattaacagatagtgttaatggcagaattatttctgtattgttattcagaattagatgactcccataaatatgagtttgatttttttttcctttttgtatagtcttccatacaccagcaaacttgtgaagaccttattatataactttatcagacaagaaaagccacctcctccaggggcccatgttttccctcagcagtcggatgggggaggactgctttatggacttgcatcaggagtagcaagtaagttttatcagattttttcaattctttggtgcacataaattttatctatttaggcataagaaattctgtttgcttggctgccaccattaatagttacattgaatttgtgcagctggttcaatgtgaaaacaaagtaattaaaatattaatctttctgttttgtgcggtgatttatgtaaaatgtatgcaaataatgaatggattacctacaaaacatcgtttttcaggaagaatgtttacacataaatatgcgtattgcatgaattgtagctgtatagtaaaaataaaattaagcatttgaaaacttataacactacttgtattataagaggaaatctattttaggttattttagggtatattttggttaggatttcatgtgactaattaggtgcagttttcctattacactaagtgctttcttcagtgacaactgaatattttgcagaattttgtaataagctgtgaaatggcacaaacttgagttttgtttgattgggtgc

SEQ ID NO: 11159 - DNA, 1202 bp, Homo sapiens
aagactaaagaaattttcctaaaggaccccatcatttaaaaaatggacctgataatatgaagcatcttccttgtaattgtctctgacctttttatctgagaccggaattcaggataggagtctagatatttacctgatactaatcaggaaatatatgatatccgtatttaaaatgtagttagttatatttaatgacctcattcctaagttcctttttcgttaatgtagctttcatttctgttattgctgtttgaataatatgattaaatagaaggtttgtgccagtagacattatgttactaaatcagcactttaaaatctttggttctctaattcatatgaatttgctgtttgctctaatttctttgggctcttctaatttgagtggagtacaattttgttgtgaaacagtccagtgaaactgtgcagggaaatgaaggtagaattttgggaggtaataatgatgtgaaacataaagatttaataattactgtccaacacagtggagcagcttgtccacaaatatagtaattactatttattgctctaaggaagattaaaaaaagatagggaaaagggggaaacttctttgaaaaatgaaacatctgttacattaatgtctaattataaaattttaatccttactgcatttcttctgttcctacaaatgtattaaacattcagtttaactggtagttcattttcttttaaagtctattgaaatattcaaaagggaaatttttcaccacgtcagaaggcagaatttggatgttgtgatggcatctgtgtagtggtgggacaacaattactattgttgcgtaacaagacactccaaaatttagtggttttcagcagcagtgactcgactgggcagttctttgctgttctgggctcactcatatggctggctgggcctgggtctggacctgggccgctatgtgatttttatcttgggctttgaaaattcagtgtagggacctataaatattcaaagatgatgagatgcatccttatatattttttgtattcactctgaagctgggaaagattaaaaggaactcctgcccttgggtccctaatgaagtctgggtcctaactcaggctctattaagttctgtggctggtcaagtcactgatttaccttgggctttatttgatataaatcatgtaaatcagcaggtctcagcttttctgtccaaagc

SEQ ID NO: 11160 - DNA, 1202 bp, Homo sapiens; identical to SEQ ID NO: 11159

SEQ ID NO: 11161 - DNA, 1267 bp, Homo sapiens
tttatccagttacctcctcttctcactcctttcccgtaacacacacaagcttctgtatgtgtttcatataccctaaatctactctataaccctaaatccactcatctcctttttagtttgcctccctcttctggtgtttgtttttgttctttgttttttgttttttttgattaaaaactttcagctttccaaagtctgttgcctgttgtaattataccaaaattgaggactggggaaaagattgagcagatgagctgaataaggatgagtaatgcagatgtgatgttattagttctatttcattaatctgattttttattagagtagatttcagtcactgctttctttttcaggcgtcgaggtggaaaatatgccgttggatcagcttgcattggaggtggccaaggtattgctgtcatcattcagagcacagcctgaagagaccagtgagctcactgtgacccatccttactctacttggccaggccacagtaaaacaagtgaccttcagagcagctgccacaactggccatgccctgccattgaaacagtgattaagtttgatcaagccatggtgacacaaaaatgcattgatcatgaataggagcccatgctagaagtacattctctcagatttgaaccagtgaaatatgatgtatttctgagctaaaactcaactatagaagacattaaaagaaatcgtattcttgccaagtaaccaccacttctgccttagataatatgattataaggaaatcaaataaatgttgccttaacttcagttaatattttcctgtcatttatatttttaaaaattttaaattgtgataagatacacattacataaactttaccatcttaacccttttttagcgtacaattcactggtattaagtacattcacatttttatacaaacatccccactttttatcaacagaactttttcagtcaccacacatggaaacaataactcctgattctcccatcccccatcccctgacaaccaccagtgtattttgtttctataaatttgatgactcgaggtacctcataagtgaaattataaatatctgtcctttcgtgactggcttattttactttactttatataatgttctcaagattcatccaccttatggtgtagcatgtgtcagaatttccttctttttaaaggctgaataatattctgctgtgtgtataaaccttacttccttcttcccagcttaaaggccatctttcatcctttattttctccctttaaaatg

SEQ ID NO: 11162 - DNA, 1099 bp, Homo sapiens
tggaaagtgttggaagaatgaagtggtttcctttttatgagtcacctagattgaactagttcttgtaaatctctgttcttgttcagatacatccattaatgggataaatttttcttttgcctttttaaagggtatgtcctttattatctgctgtacatttatgccaggtattaatatctgttgattttcaagatttatattgtgttaagaattactattcttagccacatgtaggtagggcctgttactcaggcaaacatgattgaaaccttttagttttctcctcctacatcttggtaatggatactttagcatttgctttacagttactttaaaagcatttccttttgagacactgtaagctacagtacaatatttgtttgatttaccattaatttgtaaaatcagtgtgtttcttaatacattgtttgggtacggtaaaaggagtttttattactgtttgtttttaaataggaaatttgtgttaaagaagctgaagttgttttatgtggaggaaccgaaagcatgagccaagctccctactgtgtcagaaatgtgcgttttggaaccaagcttggatcagatatcaaggttggaaccataaaaatttaaaagaattagttcttattagcattatataagtacttttaataacatacctttttatgggagagaaaactaattttgaagccaatttcgttgatgaggattggcaagatatgaatgattagaagtttgtaaactatttcaaaactctattttggtggttagttttgacattttaacccatatgaaattagattctatctatctcagcagacctctagtagtataattatcctgtgtaagtggccataggcatgggagagatggaggaagggaagaagtggattaaaaagatagacaaaagagtgaattaatctcactactaaacaattagtaatctgagtaattaaatctttaacgtgacttatagaagttttatttctgggacagtctcagaatagatttcttcatcatcacagaaaacatctttgaatacagattatattgtcccaaatcaaacaaaaactgattcttttatctttgagagctacaa

SEQ ID NO: 11163 - DNA, 1184 bp, Homo sapiens
gtaaagtggatttttgaatctggcaaagacgaatatgatcatctcttgacatgttggattatccattctcctttcatcattacataattgatatcttttcactttccctaaactttgtaggttgaaaggttgagtcttctggactcgcctgtctgctagactgtcttgaaaaacctcaaagcaagcaggctttcttgaagggaggagagaagtgaaattggaaggaaatgtggctatttttctcttccaaagtagtacagggagtaagaagtgggagatggtctcaggaatatgaggcaggatacaaacacttgagggcagaattttgttggcagttgggtcaggagaaatagactcttgttgccttgtgtatttcccggttgatatgtgtatttaaagaggaagagtggagggcattatcttagaggaacacacttattacaatcaggcagagcaatccaaatcagcctgtataacaaacagttgaggaacttaatttcaaagctctgaatctagttataaatgattgttttatctcttgcaaagacagatctgagtaagtgtctgtaggcattgattaagtgacttcaagcatcaagggagataattaaggtggttgaggaatagtctgttctttcaaagagttagcagttgacttggaagacaaaaattccatgaagagaatatatgaagtgcctcgtgagcaatccccagggcaccgtttccctcagcaggtggatggagtgtctctctttgacttctggagcctcggtgcagcccaggcagaagagaagggttcttacatgcaagaaatcactgagagctctggaatactaacccttgaggctgctattatttatttatttatttatttatttatttatttatttatttatttattgagatggagtctcactctatcgcccaggctggagtgcaatggcgcgatctcggctcactgcaacctccgcctcctgggttcaagtgattctcctgcctcagcctcccgagtagctgggattacaggtacctgccaccacacctggctaagtttttgcacttttagtagagatggggtttcaccgtgttggctaggatggtctcgatctcatgaccttgtgatccacccaccttggtctcccatagtgctgggattacaggcgtgagccaccgagccctgccac

SEQ ID NO: 11164 - DNA, 1233 bp, Homo sapiens
ctgtctctagcatggtttagggagtgccaaggctcaatgtagatggggtcaccttgtcagagcatctgttcatacagaaactgggtttcctgcagaccccaggtgctgcataggattcctcaaaccctacaggatatatctccccactggctgctgtccattttgcttgttaccctgactccccctcttcagccagagcagtctttgtaactaaagctgccagcctggctcatctttcctgacaacgtgcatctcctgccctgtgatcacctttgtgcttggctcctgccctcagcctgaatgtgttctaggaggctgaattcctgcttcgagtcctgcccaagagccagtcttggctcagccctacctcactctctcccaattcttcattcataaagtgccaaaaagattagacctgtaatttgttagccagctttacagggccaggactgagtgagtgcctccttaaactttgtatcctgtgtgcctcccttgccttaccctagtcccagccctgcagctttaagtaattcagacatggattagccatttcccagttctgtctcatacagtccagcctctgccaccttccccaccccttcctttattccatcctaactagttcagccctagtcaagactggatagactgatactgctttgtttcccccaggaaccaaccacccaaccccagtattctggtaattttgacaatgatctatatgaaatttatttgattgacatttagactcatgagttaagcttctgctgaccatttatgttagggtacaatcagaggagcagaaccactaagataaagattatgtatatatgtattttaagggatttattatagggatctgaccgcatgccattgtgggagctggttaaacagtctctgtaaggctgttgtctttgcatctaatgctggagcttgaagtctgcagggcaggcactcgggaagggaagatggatgtaaagtgtgggagaccgaggacacagtggagcccacgagcacgagctggaacccacgaggatggcctggaacccatgtcagtctctcaccacctccagcttcgatgatgtgggtgtcctgcagaagaagctggtgcccttcctcacagagttaaatatgcatctggcccaggaattagagaagctgaaaggatgatcctggggaaggtggagcagctgcaggcctggctgcaggcctgactactgcccacaccaacga

SEQ ID NO: 11165 - DNA, 2257 bp, Homo sapiens
caaaaacacgagtatcgatcctttgttttctgtctgcaactcattgctttctactctcacccttcctagctagcgctgatgtgtgtgtttggagagcataaaacaaattaattttccgaaggtcagaagggataattctccaccgtaatttgcacatgttaaacttgggggagcaggcactgacataagaggcacagcatctgatggtcttatcaaatcaatccatcttctgtctcttccaggggagtgctacgcacagcaggagggtggctgggcagtgcaaagccccggaatcccctgagcaagcagtgtttcagctggctggacagatcaaataacacttgggctggttaacaaaagacgcaagtgggaaggtgttggaagccggagtgtggaaatttacccaacgttatttctttgacagggaaggagacttggtctgaaagatgccacattcctgcagcctctcttggtgcagtggaatacagtcttgggcgaggtggcgtggatgagctggtgaaagaggatgctgcccacatccaaaggctccagaggatcctggcctggcagctgagctcccctgcatttggaacctcaggcgtaacttggtgtagagctcatgaaaggtgcttgtgtttctccagcttttttcaccagtgcttaccagactggctcaggttttggaatctaaggtgagctggtagaaacaggagaggtagaaagaagcccctggatgcctccagaattcattgatgggatccctgcatactgcttggaacacagaaagaggctgtgacacagctgagctttggagcatcttaaggagctcagctcagcaaacaactcttgcatttcagccagaaagagcctcttgtaacaaagtattcaaaggggagagtttctgcatcttttactttgcagtccactatggtagaaaacttgacattccatagataatgatactgggttttctttccaagatgccagctttaaaagaaatatgagccattctaagctttaagaagggttcaggaaacacaggaattagtagacagccctcccaatgcaggttaagacgacagcctgcgcccccaactagcacagctcagcgagcatgaccatatgccattctcgtctccagagagctggtggcagtgacctcactaggagaaaacacatccctcagccgtgggacttgacagaatgaggtgcgcgagggaggccgctagccgagacttggcctttcctgactgcccctgtgttacctgggcagctccagatcactgagcccacaatggctgagaagggtgactgcatcgccagtgtctatgggtatgacctcggtgggcgctttgttgacttccaacccctgggcttcggtgtcaatggtttggtgctgtcggccgtggacagccgggcctgccggaaggtcgctgtgaagaagattgccctgagcgatgcccgcagcatgaagcacgcgctccgagagatcaagatcattcggcgcctggaccacgacaacatcgtcaaagtgtacgaggtgctcggtcccaagggcactgacctgcagggtgagctgttcaagttcagcgtggcgtacatcgtccaggagtacatggagaccgacctggcacgcctgctggagcagggcacgctggcagaagagcatgccaagctgttcatgtaccagctgctccgcgggctcaagtacatccactccgccaacgtgctgcacagggacctgaagcccgccaacatcttcatcagcacagaggacctcgtgctcaagattggggatttcgggttggcaaggatcgttgatcagcattactcccacaaggtatgtctggctggaatggcggatactggtggtccacagaatccccaagaatacttgcagcattcccaagctattcctagctccatggtagtcagaggactagagttagtaattaggggaggctggagggtgctaggaagatcactagcctgaaaagttgttggaggcgtggagggagatctggttcttggtcttggctctgctatgtggctttgatcaccctgagctgtgcctgcagaagctggactagacgatctccaaaatttcttccagctctaaattctatggcttgaaaactatgtggttggtgaatttgcctctagcatcttcttatccctgctgtccacttagccatcccatgtccttcctgtgtgctcaggacacaccctgaggcttcccaccctgtgagcctcatgc

SEQ ID NO: 11166 - DNA, 1180 bp, Homo sapiens
catgagccaccgcgcccagcctttttttcctttttctttccatcttgctcagtgccccagcctggagtacagtgctgcaatcatagctcactgcagcctctaccacccaggctcaagcaatcccacttcagctgctgcggtagctgggactacaggcacacaccatcacacctgtctaattttttgaaaaatttttgtagagatgggggtctctctctgttgcccaggctggtcttgaactcttgggttcaagtgatcgtcccacctcgacctcccaaagtgctgggattaaaggcatgagccaccacgcctggcaagtagttttcaatcttggctgtacttttagatcccttgaggagctttacaaaatactgatacctgaattctagccccagaaattatgatttggttggtctagggtgcagccaggttagccctccgcagtgattgagtcattagggtcctctgactttttcttttgaactgtttcacttgtgttagctttacattctttaatacagtgttacacacatgtacagtgtagccatctcacacatctaacttaacgggtcttttgaaagtattgccacatttgctttgcttctgtgtctgtctctttcttttctctcccccttcctgtcacctattcctttctcctctgtttctttcttcactttcagtttatttgaactgtctggtagtaagttttaggaagctgtatttcccatgatgagaagttagtatatcatcactattttaaataggaagttgattttcttttaaagtatattctcaaatgcttacttgtactccttttggagactaattactttaagtccccaagttagcatctgaactccctgtgggcttggtctggtggctcacatctataatctcagcacttcaggaggctaaggcaagaggatcacttgagcccaggatttcaaggccagcctgggcaacaaagtgagacctcatctctaaaataaataaataaataaataaatataactcccaatgcaaattgtcttcttagggcgttaatctacttggtaaaccttacattttcaagcccccaattaactagtcacttaactggtttctgagaggcaggttgcattgggctttttctgtcagggcttaattaatacactgtgagacatttgctcagctaggccag

SEQ ID NO: 11167 - DNA, 1204 bp, Homo sapiens
ggtaaatttttcataaatattagtaatagacttttaggtttaactagtgctgatcctcataagtaatcctttaaaaaagtgctggtaagattttcctttagggtgactagtaaagtcagtaagacttgattgagcatgccactatcataatgagaagacctaactttaatatttttggaatgtcaaaaacagtgacattttaattaagtaattttatttttaaaaattatttttaatggctaatattttgtaagaattttaagtaattttcaactctgagcatcaaattttaattatgtgcattgaatctctgacttaaccagagcaatttcatcttttcccaagtagtcagatctacttcgtaaaatgtgttctgatgtgtgtcttttttttttttcttttttaggttatcctgaatacatgtctaacaattttccttgcaacgttagctgttgtttttcactgtttccaaaggatcaaaattgcttcagaaattggagacatatttgatttaaaaggaaaaacttgaacaaatggacaatatgtctattacgaatacaccaacaagtaatgatgcctgtctgagcattgtgcatagtttgatgtgccatagacaaggtggagagagtgaaacatttgcaaaaagagcaattgaaagtttggtaaagaagctgaaggagaaaaaagatgaattggattctttaataacagctataactacaaatggagctcatcctagtaaatgtgttaccatacagagaacattggatgggaggcttcaggttagtcttataagagtttttctataccctctatggtggcagatttaaaaacttgctacgtttcctttcaagctactacagggtaatttaatttgtgctccatctcttcagatactgtgcatcctgtacaaatatgcattatgggaatttctggaagaatatgcaaaagataaaatcttaaagttttttaatgttctactcagaaaaatgttcaatggagaaaatttggaaaataaaaataaaaagcagaaaacccacacttcgcaagaactacctttagcactttggtattcatttttgtagcctgttgttttcttttttttttttttcctagacggagtcttgctctgtcacccaggctggagtacagtggcgtgatcttggcccactgcaacctccacctcttgggttcaagcaatcct

SEQ ID NO: 11168 - DNA, 1999 bp, Homo sapiens
tcaccctgtccctctgatgtcttccaaatcttttctgttaggtctgtcagctgctgctggaattggtgttgatgaccttcgtcgcttatgcatactcaggatgagttttgtgaaaggctggggaccggattacccaagacagagcatcaaagaaacaccttgctggattgaaattcacttacaccgggccctccagctcctagacgaagtacttcataccatgccgattgcagacccacaacctttagactgaggtcttttaccgttggggcccttaaccttatcaggatggtggactacaaaatacaatcctgtttataatctgaagatatatttcacttttgttctgctttatcttttcataaagggttgaaaatgtgtttgctgccttgctcctagcagacagaaactggattaaaacaattttttttttcctcttcagaacttgtcaggcatggctcagagcttgaagattaggagaaacacattcttattaattcttcacctgttatgtatgaaggaatcattccagtgctagaaaatttagccctttaaaacgtcttagagccttttatctgcagaacatcgatatgtatatcattctacagaataatccagtattgctgattttaaaggcagagaagttctcaaagttaattcacctatgttattttgtgtacaagttgttattgttgaacatacttcaaaaataatgtgccatgtgggtgagttaattttaccaagagtaactttactctgtgtttaaaaagtaagttaataatgtattgtaatctttcatccaaaatattttttgcaagttatattagtgaagatggtttcaattcagattgtcttgcaacttcagttttatttttgccaaggcaaaaaactcttaatctgtgtgtatattgagaatcccttaaaattaccagacaaaaaaatttaaaattacgtttgttattcctagtggatgactgttgatgaagtatacttttcccctgttaaacagtagttgtattcttctgtatttctaggcacaaggttggttgctaagaagcctataagaggaatttcttttccttcattcatagggaaaggttttgtattttttaaaacactaaaagcagcgtcactctacctaatgtctcactgttctgcaaaggtggcaatgcttaaactaaataatgaataaactgaatattttggaaactgctaaattctatgttaaatactgtgcagaataatggaaacattacagttcataataggtagtttggatatttttgtacttgatttgatgtgactttttttggtataatgtttaaatcatgtatgttatgatattgtttaaaattcagtttttgtatcttggggcaagactgcaaacttttttatatcttttggttattctaagccctttgccatcaatgatcatatcaattggcagtgactttgtatagagaatttaagtagaaaagttgcagatgtattgactgtaccacagacacaatatgtatgctttttacctagctggtagcataaataaaactgaatctcaacatacaaagttgaattctaggtttgatttttaagattttttttttcttttgcacttttgagtccaatctcagtgatgaggtaccttctactaaatgacaggcaacagccagttctattgggcagctttgtttttttccctcacactctaccgggacttccccatggacattgtgtatcatgtgtagagttggttttttttttttttaatttttattttactatagcagaaatagacctgattatctacaagatgataaatagattgtctacaggataaatagtatgaaataaaatcaaggattatctttcagatgtgtttacttttgcctggagaacttttagctatagaaacacttgtgtgatgatagtcctccttatatcacctggaatgaacacagcttctactgccttgctcagaaggtcttttaaatagaccatc

SEQ ID NO: 11169 - DNA, 1091 bp, Homo sapiens
ttttgaatttttagttttttttttttaacccacttcccctcctggtctcttccctctctgataattaccattcatatgtgagtgttagtgtgcctccttttagcattttcttcttctctttctgattcttcatttctgactgcctaggcaaggaaaccagataaccaaacttactagaacgttctttaaaacacaagtacaaactctgggacaggacccaagacactttcctgtgaagtgctgaaaaagacctcattgtattggcatttgatatcagtttgatgtagcttagagtgcttcctgattcttgctgagtttcaggtagttgagatagagagaagtgagtcatattcatattttcccccttagaataatattttgaaaggtttcattgcttccacttgaatgctgctcttacaaaaactggggttacaagggttactaaattagcatcagtagccagaggcaataccgttgtctggaggacaccagcaaacaacacacaacaaagcaaaacaaaccttgggaaactaaggccatttgttttgttttggtgtcccctttgaagccctgccttctggccttactcctgtacagatatttttgacctataggtgcctttatgagaattgagggtctgacatcctgccccaaggagtagctaaagtaattgctagtgttttcagggattttaacatcagactggaatgaatgaatgaaactttttgtcctttttttttctgtttttttttttctaatgtagtaaggactaaggaaaacctttggtgaagacaatcatttctctctgttgatgtggatacttttcacaccgtttatttaaatgctttctcaataggtccagagccagtgttcttgttcaacctgaaagtaatggctctgggttgggccagacagttgcactctctagtttgccctctgccacaaatttgatgtgtgacctttgggcaagtcatttatcttctctgggccttagttgcctcatctgtaaaatgagggagttggagtagattaattattccagctctgaaattctaagtgaccttggctaccttgcagcagttttggatttc

SEQ ID NO: 11170 - DNA, 3206 bp, Homo sapiens
cctctcagctgcagagcacttctccatgattcgtgcatctcgaaacaaaaatgggcctgccctgggaggattatcatgtagtcctaatctgcccggtcaaaccaccgtccaagtcagggtcccttatcgtgtggtaggattagtggttggacccaaaggagcaactattaaaagaattcagcagcagacccacacctacatagtaactccgagcagagataaggaacctgtctttgaagtgacagggatgcctgaaaatgttgaccgagcacgggaagaaatagaaatgcatattgccatgcgtacaggaaactatatagagctcaatgaagagaatgatttccattacaatggtaccgatgtaagctttgaaggtggcactcttggctctgcgtggctctcctccaatcctgttcctcctagccgcgcaagaatgatatccaattatcgaaatgatagttccagttctctaggaagtggctctacagattcctactttggaagcaataggctggctgactttagtccaacaagcccatttagcacaggaaacttctggtttggagatacactaccatctgtaggctcagaagacctagcagttgactctcctgcctttgactctttaccaacatctgctcaaactatctggactccatttgaaccagttaacccactctctggctttgggagtgatccttctggtaacatgaagactcagcgcagaggaagtcagccatctactcctcgtctgtctcctacatttcctgagagcatagaacatccacttgctcggagggttaggagcgacccacctagtacaggcaaccatgttggccttccaatatatatccctgctttttctaatggtaccaatagttactcctcttccaatggtggttccacctctagctcacctccagaatcaagacgaaagcacgactgtgtgatttgctttgagaatgaggttattgctgccctagttccatgtggccacaacctcttctgcatggaatgtgccaacaagatctgtgaaaagagaacgccatcatgtccagtttgccagacagctgttactcaggcaatccaaattcactcttaactatatatatatacataaatactatatctctatatggactcgtaaaggcatgggtataatggtaccccccagtaaacttcctaatgatttcttatgactgttatcaggctttattgggattaggctaaagttgttagtaaacttataaaaggctgctatggtaacactaaacctaagtggtctcttgtctattagtttggtttgaattattagtactatcctgtagacccagagacatagtttatataagaattgctaaagctgaagttcaacttggctgagtgaagataatcataggttgtgtgagcctatgaaaaagtgtatacgtctaagatttcaaaacaatgggtcccaaagcctaaccactttaagagtttatggagggtacttggcattacagacgattcatacacttccagtgctgccttctttacactgccagttttgacaaaacaggtttgttttttattttacaacaacatatgcctaattctgcaggattgcaagtaactttttaatgcattgtgattacttattggtaatgatagggctgatggcagtttactagatcactggttataatttgggacaaaaactgctacatcaactttcatctcgcccagagtgctcaaggctggtatgatcagtggatcaggaatgcaattgtgaattcctgcccattgcctctcttggtgaatgtggaaatggccacctgggttttcccatatcaggaagggctttgggatggcacctatattggctgataattgaggatgcaaacattccattcattagtgtgatcgagctgttaatttttagactatagatcaaaatgtgaaacattttatgttcaatccatatttgtcttgcacattataaatatatttttattttttagtaatttaggggagggaggagggagaaagggataatgatgcccttggcataattcacaaaagcagctgtgacaacctccaatcagtttacttcatttcaaaactatttccaatcacaaggaaagatttatttaaaatatactcgtacatttcacctgtggatgtctataacttcatcctcagtatgttcccaaatctgtgctggcattgaaaggacaaaacattatactagtgggtttttctactaattattttttgaagcattattttcccaacacaaaagagcttttttctcggtataatgaaaattgaaatcctatgtgtattcaatagtaaatagacaaattttattttttatttccacttgaagagttacatttcgtataaaagtttacaaataacggtttttattttgattttttcagtataaaaaaagttgccttgatggcatattatgatgtaatgctaattgcttgtaggatagtaaatggtcagtattgaaacctaatctctagctgccgtcttgtagatatgaacgaatgttcaccaagcatgtattttgtattttgttgcattgtacactgcaactaataagccaaggaatcgacatatattaggtgcgtgtactgtttctaaaaaccacaaactaagaatgataaattatcaatatagtttagtatttgctaattttactacactcttttgttatgtatatgtagggaagtcatagggattataaattcaatttgagtaaaatttaaaaccatatattttatgataaagggcctttaacttaagatggccaaagcactgatattatatatttgctgtaaagagaattataagagttttatttttctgatattaaaagttacttaataaagacttgtttccattaacttgaatgtattctccttggtgtttttcatataatcatcagtttatactagaagattagttaacagaatcgaaaattttcttttatagactccctattccccaaccagctatctgtgctcactcttgtagttattttgtgtgtgtgtgctcttggttttgaatgtgtcgcttatgttcctgtccaagtttagttttttctttaaatgagtgttaaattacagtaaactggaaatttggctggttgtagatttagttgcatatttgtgtagttgaccacaaaccactactgatctaattgtaaatagtta

SEQ ID NO: 11171 - DNA, 1267 bp, Homo sapiens
tatcagactggctgaggggcaaggcagaagtcaattgatacgattcagctctgtgtccccatgcaaatctcatctcaagttgtaattcccagtgttaggggagggacttggtaggaggtgatcggatcatgggggcagatttccccctcgctgttctcatgatagtgagttctcatgagatctgatggtttagaagtgtgtagcacctcctcccttgcactctctctctctctcctgccaccctgtaaagaaggtgcttgcttccccttcgacttctgccatgattgtaagtttcctgaggcctcccagtcatgcttcctattaagcctgtggaactgtcagtcaattaaacctcttttcttcataaattatccagtctcaggtagttctttatagcagtgtgacaacagacaaatacatcaatcgactacccagtggctccttaaggagcatgaccagctgaactgctgtattgtggagtatcagaacaagggccaggctaacaagtgcatccagcatcagcatgggttacaaagaaatctcatttattttgctaccgtcacagacaccagcccaaccagtacttcaaaagcaatgagacaatcttccagttggctgttgtgaggagtaattgaatgtaatccatctcttagaaaatggagacaggatttttaccaacttaattgcttaaaacatgaacgaaagccctatggctcttttaaaaactgtgagtgtgcaaagaaagctaacttaactgtattctcaatgtaaatatttattttaatgattaagcaaatccctcaataaggtgaccccaggtgttctctttcctggatgtggagcatgtttggataacaaagacatcactggcatctgcaagcctactttttagtttcaacccaaagaggaaattgagtaggcctcaggcaggaattggtgggactcctgactgagcccttgctacatagacaggtaactctgtgctccttcctaccagtttgtcaatgccttgaaataaagcttacttttccacacaatcctccttctcctaatacttctcctcctcctttcttcccaataaaggaatctgatggaatcaagaatgtaatgaagcaataaaaggcctaattgaagctgaaagccaattccatccctgaccttttgcaggaacttattttggtcactgaagtgttgatgttgcactacagtgttatatcatgccctggttaccaggaagaatatctccccaacctcaggacaatcaagg

SEQ ID NO: 11172 - DNA, 1148 bp, Homo sapiens
agctttgtttgtctagtgctcttttgctataaaatagactgtagtacaccctagtaggaaaaaaaaaaaactaaatttaaaaataaaaaatatatttggcttatttttcgcaggagcaatccttttataccatgaatattacaaaaaaattgtcagattctgaatatttcttctttgtagatttttggaatcattatgagtaaaagtttgttactttattttactatttaaaagatgttattttaccatgtgttaccaagatgaaactgtatgggtagcttttttgtttgttttttgttttgtttttgtttttgtttttgtttttagttgtaggtcgcagcggggaaattttttgcgactgtacacatagctgcagcattaaaaacttaaaaaaattgttaaaaaaaaaaaaagggaaaacatttcaaaaaaaaaaaaaaagataaacagttacaccttgttttcaatgtgtggctgagtgcctcgattttttcatgtttttggtgtatttctgatttgtagaagtgtccaaacaggttgtgtgctggagttccttcaagacaaaaacaaacccagcttggtcaaggccattacctgtttcccatctgtagttattcgatgaagtcatgtacatgaccgttctgtagcaataaatgtgccatttttataaactgtttctgacacttgtttcatttcattttgcattgtccatatagctatgattctcttctgtaagtaaaacgcatctatatttcattttccaagtgttggaggtattgacagcttaacaaacaaaacatacaaaaaaaatcacaaaaacaaattgaaaagcaaagcacatgattgatcaaggaagagatgcccttaatgaaaatggaacgggatgcatgcaaaacaaaaagaaaactgtctagaggattaactaattgaaggaatataattaatgtgtgtgtaacactgaagctatgcatttgaagagctctgaactgcaccagtgttttcggttgtgctgcaggttgctaagtcaagtcagccttaaccttttgcaccagttggtcggctgtttggcagaacattctcagatcttttcagtcaaaaatctaagatgatttattttgtatcactttgttaaaagctgaatattgtta

SEQ ID NO: 11173 - DNA, 1195 bp, Homo sapiens
ccaagacatggcaaaaagagtttgtctgaattgtaatgttgcgtttgtgaacctattctgggattttcagaggtacaaggttagaatgctacaatgttaccactgtgccttccaatgtttatatcatcggaaacataacataatcaaagtggctgtgatttaacaaaatgattaaagtgttacctacctgtgtagccgaagtagtgtgcagtgaggcgtttctgaatacatggtcagatttttggaaaaaaacaaaaacaaaaaaaacaagtaaagttcaaaaaccgtcaaatgagaaaattgcaagtagtgtgacagagctgattgattttgttgctttcttgattttttttttcaaaatgggtttactaaaatgtagatgacttaactgcctcctccttcgtctgaaaaatgccaatattcaatcatcatgcagcattataacaagccttataagtcctaaagcattaagttgcacttttttgaggaggggtagtgcagtatttctctggccagtatgaatgaagtttatacttaccatatttgatagaaacatagatcaagctatggcacagcgactcatcagatagctagctttgacgtctgggcacaattgaaccaacttccatcgtgaatctttataatgattgactttggtgtatagtgcagtaaacaaatagtgctcctagttaagtatttgtcagcatccttttgtctctaacttgtttctatttttacagccacacaattcttggcatgtattaagaaaaaaaaaaatccctgttcaagtagtttttccacctatcagcactgagtaaatgccataaatccattgaaatggtctaaatgttccatctgttctcctgttttgccagttatatagtaatgaaatacatttgtaaattttatgcaacaaatggcaaacgtatcattattttgaaattgtgtatgtaaaagttatatttttacatgtagactcttgttattatgtgttttaatacattgtatcagtttttgtttttttttaaaaactgtggtttaaaaagaagtctcatttaaatgaaatagctacaagaatcagaattttatgttcatttctgaaaatgtaagaacaaataagatagttaccacgtggtcatcttttacaaacccataaacattttgattagctgtgtgtgtgttgaaaaactgtaaa

SEQ ID NO: 11174 - DNA, 1126 bp, Homo sapiens
atctgacactaatgttgtgtacaatctagtttgcaactctgagagacaatatcaaataagtactgtcaaatattcctcccagttaacctttactgtcattgttctttgaaattgtctttgggattggttatgttctctcgctgtagctttcgtttatctcagagcacaaaccctaaaatccatgtgcagtctccatgttcaagtatagatgtctgtttcaggacaatcctgggtcgcggtagtgtttccctctctgtagtgtgtgtttggtgtcatgcccttggaaaggctggccaaatggcagcgcaatgcaggagggtgccacggtcaactttctctctggcgaacttgcttccctttcaatctggtcactgctcatggtcgaggtggaaatcttgagctcagtgatgaacttggcttatcttcaatctgaaactgcactcttatgtaaccgaatccatttcttcaccaaaaattaaatagcgctttcaaaagctgtcaggcatattcttaggaagtgtcctgagacggagctggagggtcctggccttctggctctggagggagtgctggcacagctgcttctttctgggccaccaggaattcatgaattatttgttctatttgtggcctgaagatgtggtttagttttggatccaccacctgagaactaatcctgtccactccagcttctgacctccctgactgaaccacactctgcctcagaccatcgtgcagttggttgtcgtttgctggaggattccattcctgcttgtccagatgtgtcgacacaaaattatccgctttctggctcaggttttggtaagctggcttggtgtccacgtcagccttgcagtcccggcggaagctgtcaaaaaggcccctgctcttgagctgccccacgatgatagcgatgagctgagggtcgccagggggcaacgaggccgggttgatggggccgccgcccccgctggcccgggtcgaggccgggcccgcaccgccgctgccgccgccgccaccgtccgccatggctgcgcaccgggcccacaaggaaaccgattatagcttcttctccaggacagaaagcctagaatgtgtagaggtggctaagggggcggtgaaggag

SEQ ID NO: 11175 - DNA, 1167 bp, Homo sapiens
accccgtggcgttaggcaaatgcccaacctccagatacctccgatgtggagagggtgttatttagagatcaaggaaggaagtcatccttccttgatatatatacagcctttgggtacaaattgtgtggtttcttgaggattggactcttgatggatttctatttttatataactatacagtaagcatttgtattttctctctctaggtataagttactagtttggaatgtccatcaggacctttaataaatgagttaaaaatttgtcttatgagacacacctatttaagtacagattttggctttattgcccaaaaccctcctgaaagggtacggagagtcccctctgtgggctggcagtgtgaatgagatctgtttagtctcgtgcatatagttgctgttttttaaatgaacacagttgagtatttgaagtgaatttgaaaaagaaatgttacttaatctttccctaagcccatgggttacagaatgctagggaggcaatttggttacctgcaatggctgcttttgccagcgaggccaccattcattggtcatcttggtatttgtgtgtgaatctcactttcctcaatgtaaaaaggaatcaagtatggatttcagaggtgctcttagattccccatacacccaagggtaataaacgtgtacaagtacagtgttcatgatacgtgccttggtgggagtccgtggtgccacagggaaggggctcccactgcttctggtctccagggacagtgctgctggaaaggctagtgatgagcttcaccctggagctcctcccgggaccttgcaagcctctccatccagcatcttctctatcttagttgaatgccttctttctgaacatttgttttaagaattattttataaagtcaacaatactttgcttgaattctttcttaatttacgattttttattataaaaatgtatagtgatacaatgggacatgtgaagaatacagaaaagtaaccactttaatgcaataactgttatcataatattgtatttcgtggtagtcctttcctgtagatatttttaatgccatttaatgccattgtcaccttggatttatgagtgaaaagtgtttctaaaaatatagaaataatgtcagatcagagtctgatcttctatgtttgtatttaaatggatta

SEQ ID NO: 11176 - DNA, 2120 bp, Homo sapiens
tttgttttggccaagttatatgttaatttcatttgaaaacctgtttaacggccggcttgttgattgcaactgagttttaaaaaattgatcctaccagtatctagtacccttcttcattttcctcttataaatagacattgacttattttaaaagtttttaaaaatctcttctttccagggtagtacttattccctggttgattttttcataccaaattatttctttatgcatggttcatgaaggcatagagattaagtgctgggattacaggcacgagccactgaatctggccatagttgaattcttaaccacagtgagctaactcctttcatggtggaaaattttaactgtcttagatgaaagttttaacttaagtatttactcctctttctttctttctttttttaaacagagaaaatacggtacatgtccccatggaggatatggcttgggcttggaacgattcttaacgtggattctgaataggtatcacatccgagacgtgtgcttataccctcgatttgtccagcgttgcacgccataaccattttctccagaagcgtggaggaaagattatgaaaggaacaggctctttaaaaaagaaaacaaaaagccagaatcttcctttttttgtttcattggggtttctctttctgtttttctttctactaccataaaaactatctcaaatcacctgaacatcaagtgatattaaggttgtcatcttaagaaaaaatatccatttttttcttaagttcgggaaacaaagttcggggaaaatacctggcatgaaactgtagttagggatacatttcagcattttactcactttatccaagttattcattttattcaagttatatgtatgtataattcaacaattttagattatggtgtaagatactccagtaacttatctttctgtccttttaagtgtaccttgaattctttgatttattttattgcatcaatgaattaaaacaaaaatcttgggggaagaaattggcaatatcgtataaaaatctgctcatattagaacacagtataattcagcagtaaacactagaatcaaatgaatagccttttgtatcagttattaatcttttctaactctgcttagctgctaataatcctgaggcatagaaattgaagaatttgtaaaaatagaattgccttaaaggatttgaagtaagaacataattttggggagagttttttagtgattcacagtatccctcttagcattaatttaaggtaaagaggcagattgattttccctctttcctggtaattcctaagtaattaagaataaataagttccaaaagaaattgtagctggaatcttaataacaattgtgagtggctgtttgagttgcccccaccatgtccttagatctaatctgtgctaccttattaactcacagcaggcttactgaatggcttcatttcagatttagttgatttctccaccaaatgcatgtcatgtattctcaataggctgtattcccagcagtcaataaatgaacacccgtaaaaactctttgctggcttaattttcttaaagctaaacatctctttgtcacattcgttcatgcttttgcaattattttatcttttttatgatgtatatatgtgaaattaagtactactaaatttagtagatattgctaacgttatatggtaatgagaacgaatgattttttaacgttagatatgtgggtcatggttaaatcttttttgtaatcttttttgtgttactgttggacacattagattttatcctgttttgcaattaagtgaaatgacaggtcaaaatgaggcatttaggctgggtgcagtggctcacacctgtaatccctccactttgggagaccaaggcgggcagatcatctgaagtcaggagttcaagaccagcctgagcaacatggtaaaaccccatctctacaaaaataaaaaagttagccaggcatgatggcaggtgcctgtaatcccagctacccaggaggctgaggcaagagaattgcttgaaccccggaggcagaggttgcagtgagccaagattgcaccattgcactccagcctgggctatagagcgagactgtctcaaaaaaaaaaaaaa

SEQ ID NO: 11177 - DNA, 2122 bp, Homo sapiens
tcagtgagccaccgtgcccagacacaaatatcttttaaaaatggaaacgcacaggctgcgcatggtggctcatgcctgtaatcccagcactttgggaggccgaggcgggcggatcacgaggtcaggagatcgagaccagttttgccaacatggtgaaaccccgtctctactaaatatacaaaaattagccagacgtggtggtgggcgcctgtaatcccagctgctcgggaggctgaggtaggagaatcgcttgaacccaggaggcggaggttgctgtgagccaagattgcgtcactgcactccagcctgggcgacagagtgagactccgtctcaaaaaaaaaaaaaaaagatatttgtgtgtatgtgagtgtgtatttatccagaaagaacattggtaaaaatatcaatataaaactaaactaaagctgagaattaggaggttcttaaaaatctcagcttaccaaaactttgacataaattaaaatcctcaatactgttaattttttatttccttttccctctttctctggaccccacttttaaaaaatgcaggctccaggtggccatgagctgagttgtgacttctgggaactaattgggttggcccctgctggaggagctgacaacctgatcaatgaggagtctgacgttgatgtccagctcaacaacagacacatgatgatccgaggagaaaacatgtccaaaatcctaaaagcacgatccatggtcaccaggtgctttagagatcacttctttgatagggggtactatgaagtaagtatgcattcgtcagcttttgcaaagaatatgttttttgccgttttgaaacttgaatagtggtgctcacgatagcattgatttattccttctttgcatttgaacaggttactcctccaacattagtgcaaacacaagtagaaggtggtgccacactcttcaagcttgactattttggggaagaggcatttttgactcaatcctctcagttgtacttggagacctgcctcccagccctgggagatgttttttgtattgctcagtcataccgggcagagcagtccagaacacgaaggcacctggctgagtatgaagttgtctttttgttttatttctttctaggtaatatctttagagaagaaatcttagtgtaggtaaattatgtttatgttttaaaaaaaaccaactgatatattaagtggttaatggaagaacatataacaaagttttgccaccttagatcgtagctaagttctcttttttcactttgacttgatcttttatatataaaggagcaaacaagaaattgctactcagtggagaagaggggagtccacagctaatttgcaaagttgggaattggtagcattgttggcattttatggacagcttcccaatgttaaaagccttgctggataaaaaaccagtgcaggagaaaagcagtgctgagctattgtctcgttcttcaggtacactcacgtggaagctgagtgtcctttcctgacttttgacgacctcctgaaccggttggaggacttggtttgtgatgtggtagatcgaatattgaagtcacctgcagggagcatagtgcatgagctcaacccggtaggtgcagtgtttatggaaagaaaaagtcacagtccttttttggaagacaatgaagtcttcaccctcagtttttgtagatttgatggcttggtgagctgaaataagtgactaattattttgaagactagaatttgatgttagtcactgtcaataattttataatgttttcagttatataacaggctcatgttttccattttaggaatgtctacatagttttctagtctgaagttatatatatatatatatatatatatattttttttttgagacagagtctcactctgtcgccaggctgaagtacagtggcgcgatctctgctcactgcaacctctgcctcccagcttcaagcgattctgcctcagcctcctgagtagctgggactacaggagcccaccaccacccccagctaattgttgtatttttagtagagatggggttttaccgtgttggccaggctggtcccaaactcctgacctcaagtgatctgcccacctcagcctcccaaaatgctgg

SEQ ID NO: 11178 - DNA, 1184 bp, Homo sapiens
gtggagatgggatccaaagctagttttggctgatgaaaatacaggctcatgccctgtatgtgaggacagtgggacagtaatttaaacagaagtatctagaggagtttccttattgccttgaatgtatttctttttaacattgctatggacatttaggaaaagatgccactgatattccaaaaggggcattccatacacctgagagggatccctgaggctccagggtcacctgggccaagccaggtatacacacgtctcatggcaagttggctgttatcataacttccctggtgttgttttgttgcaagggcagcattgtggggctgtggtttgaattgcttttttgtgtctcttgaatacacgaagttcctcctatagtcattggctctgctgcctctgatgaggcacttccgtgttccccacatttgaatttgctcccgattcgagagaggcaggcatccgcggcagcagcttccaacccagacaggcttaagccgcgcgagggtgcccgggtgggtggctgcgcagggccctacctgggcgggagcggctgcagagccctgtccacgcggtgcctccccagcacggcacctcccactccaggctgttggttacctggccgggagctggcggagaccaggatttctcctcgccgccgttgctgttgttaggggaaacagaccatctgcatctagacctgcctctctctccgctccccacttcagacgagctcttcctgcctggaatctggtaagtgccaccgaaggttccgttccctttattactcgattagtgcccacagcatcaggagaaggttctcttaccgtgaatccattagctttaacccaaatgtgcaggattagggggattatttgaacttgcttgctttctttttaaaatgtccattagacattttttgcatgcttcaaaatcaaaaggcggcacagtgaaaacattttaattatttatgtatttaacctgtatcatcttgtttctaacctcttttcttcagggtggtgcagtcaaaaattacacagatattgctctggtgcctctccccccttttatgaataaattactgcatttgtcatcactgtgttcctgaaatgtcaaaaatagacactgtaaaggaatctgtcatgcagagttcagaaattttcaaatttctgagttcaaaacctcag

SEQ ID NO: 11179 - DNA, 1183 bp, Homo sapiens
tccagcctgggtgacagagcgagactccatctcaaaaaaaaaaaaaaaaaaaaagagttaaaaacatgcaaattcttaggccccacctctgatcccctgatcgactgaatcgaaactctggggtggacccaacaatatgtagcttagtaagccctccaggtgatcctgatccacactggggtttgagaactgtttccccacactacagcttcaaaatatcttgaggaaataacttctcttagatcactcttagccacacagagaaatacttcctgttttatgtctaaatttatcttcctaaagctttgaagggtggagcacactatcttcagaagtgtagatacttttttcacattcctttatgggcaacatgctagggtgcatctcagcagaagggtggccaagcctgggaggggatgaagacagagctggcactaagcagggacatggggaaacaagggctgatcttagccattatttgattatttgataatccaagattcactccaaagaggagcacagcatagtctggttcagcacctgggtttttaagactaataacactgagtcagagattcacaaggttgtggggggaatctttggacctaggtagtagagataaaatgacgggaatcatctatactggccaacattgttctagaaattgtctgaataaagcataacagaatagagaagggtccaaccctctggggatatagcattgacaaggaaaaaatgacctcagatgactggctgcaatttagggcaggattctactgctcccctccccctcatttctgccaacccagcattagctaagaaatccagggatccaggatgtacaagtaatgagggcggaaggagcacataggtggtccaactgtgctgctgaggtcttcccagcactgtttgggatctgttccagagaagggaaggactgtgcagatagctggtggctactgctttgtctgcctagagtggagtagcactctgttctcaggaatactgctttccacagtgtggtttaatgggatcccccagtttctgactgatctgcttccctaactcagtgattggctacagataggcatgttccccaaattcagtcctgagacttctgaccttcaaccagatggaagatcttgggtttgctcaggtggcaaacctgtgaggtatgagtctg

SEQ ID NO: 11180 - DNA, 2816 bp, Homo sapiens
[321 bp omitted]cgatctccagtgctgaagagtttgatgacgacgagaagattgaggtggatgacccccctgacaaggaggacatgcgatcaagcttcaggtcgaatgtgttgacggggtcggctccccagcaggactacgataagctgaaggcactcggaggggaaaactccagcaaaactggactctctacgtcaggcaatgtggagaaaaacaaagctgttaagagagaaacagaagccagttctataaacctgagtgtttatgaaccttttaaagtcagaaaagcagaggataaattgaaggaaagctctgacaaggtgctggaaaacagagtcctagatgggaagctgagctccgagaagaatgacaccagcctccccagcgttgcgccatcaaagacaaagtcgtcctccaagctctcgtcctgcatcgctgccatcgcggctctcagcgctaaaaaggcggcttcagactcctgcaaagaaccagtggccaattcgagggaatcctccccgttaccaaaagaagtaaatgacagtccgagagccgctgacaagtctcctgaatcccagaatctcatcgacgggaccaaaaaaccatccctgaagcaaccggatagtcccagaagcatctcaagtgagaacagcagcaaaggatccccgtcctctcccgcagggtccacaccagcaatccccaaagtccgcataaaaaccattaagacatcttctggggaaatcaagagaacagtgaccagggtattgccagaagtggatcttgactctggaaagaaaccttccgagcagacagcgtccgtgatggcctctgtgacatcccttctgtcgtctccagcatcagccgccgtcctttcctctccccccagggcgcctctccagtctgcggtcgtgaccaatgcagtttcccctgcagagctcacccccaaacaggtcacaatcaagcctgtggctactgctttcctcccagtgtctgctgtgaagacggcaggatcccaagtcattaatttgaagctcgctaacaacaccacggtgaaagccacggtcatatctgctgcctctgtccagagtgccagcagcgccatcattaaagctgccaacgccatccagcagcaaactgtcgtggtgccggcatccagcctggccaatgccaaactcgtgccaaagactgtgcaccttgccaaccttaaccttttgcctcagggtgcccaggccacctctgaactccgccaagtgctaaccaaacctcagcaacaaataaagcaggcaataatcaatgcagcagcctcgcaaccccccaaaaaggtgtctcgagtccaggtggtgtcgtccttgcagagttctgtggtggaagctttcaacaaggtgctgagcagtgtcaatccagtccctgtttacatcccaaacctcagtcctcccgccaatgcagggatcacgttaccgacgcgtgggtacaagtgcttggagtgtggggactcctttgcacttgaaaagagtctgacccagcactacgacagacggagcgtgcgcatcgaagtaacgtgcaaccattgtacaaagaacctcgttttttacaacaaatgcagcctcctttcccatgcccgtgggcataaggagaaaggggtggtaatgcaatgctcccacttaattttaaagccagtcccagcagatcaaatgatagtttctccgtcaagcaatacttccacttcaacttccactcttcagagccctgtgggagctggcacacacactgtcacaaaaattcagtctggcataactgggacagtcatatcggctccttcaagcactcccatcaccccagccatgcccctagatgaagacccctccaaactgtgtagacatagtctaaaatgtttggagtgtaatgaagtcttccaggacgagacatcactggctacacatttccagcaggctgcagatacgagtggacaagtagagtatcatttaaatttttgtgtttcagtgatgagtctgtaggcatgagtgcttgataagatgcccttgattttagggtgggaatgcagtgaaatggacgtgtgtgtgtgtgtgtgtgtgtgtgtgtgtgtgtgtgtgtgtgtgtgtgtgtgtgtttggggaggggagggggaatgcctgtgcagccgggcacatgatccagtaaggattgttttcatagaatagaaacaattagctggggatgtggtggtggcagtggtgttggaggtggtagcaggagtggtagtggcagtggtggttgtggttgtggcagcagtggcgtgtgcctgttgcgccagctatattcgggaggctgaggtgggaagattgcttgagcccaggagtttgaagctgcagtgagctgtgattgagccactgcactgtagcctagcattggggcgagatcatatctctttaaaaaaaaaagaacagaaacaatgttgaaacatgaatcttattttagtaaaacgagttttttgaggggaggataatatatat

SEQ ID NO: 11181 - DNA, 1189 bp, Homo sapiens
tctaattaatttttattattttggagaaagctttttatgaattgtgaggactgtgactactgtcaagatgtgtatgcctataaacttgttactatatattaaagtcttttgctcacataaatttgtaagaatacctctttgccctaagcaaaatgcaaaagtaatggaattggaactctgctgaaacaggtgtttttagctcatactttgagacgagcctgactagatagcacatactgtgattttacaggatagagaattgtacgctggacatgtaactttcaagttggcttttcccttgggcttagaatcaattactgtagtgtttgaaatgaaggatgtataattatctggaggtttaaccaaggttctttgcatattagaaagtacttagtaggaccaaccctgtttccccctttggtttgtttagaagacttgcactatctgccagatgctgcttcctaaccagtgcagttatgcatcacaccagagaatccatcagcacaaatctccctacacctgccctgagtgtggggccatctgcaggtcggtgcacttccagacccacgtcaccaagaactgtctgcactacacgaggagagttggttttcggtcagtatatcattcacttatgtgcaagtaaaactcgttcacttacaaccgcacagcattttgagtggtttgcacacacagttttctgggtcatacggtgatacctcgattaacagatcctctgggaacctagctcgtttgtagagtccatctgtttgaatcctcttaatgtaatattggccctgctggtccgcacaaagtggagggtcatggggcctgtccttttaggcacactcttgcatgtgtgcaggtgtggctttgactgtcagctttgactgtaccctttgtagcagacttttgttatcatactctttgcattttaacccctgcaagaaaactatacattccgcacctcttaatatttccccttctctaatgaaaacagaaatagtgcgatggtcttttacttttatttggtccacattgaaagatggggtgtatgttccagccttgcactccaaataaccttctcctcctccccactcctcctcctccccactcctcctcctccccactcctcctcctccccactcctcctcctccccactcctcctcctccccactcctcctcctcccc

SEQ ID NO: 11182 - DNA, 1205 bp, Homo sapiens
agaccatttgagttttatttttcttcttcatgatcttttctcttaaacatataaaaataggctgggcatggtggtttacacctataatcccagcattttgggaagctgaggtgggcgaatcacttgaggctaggagtttgagaccagcttggccaacatggcgaaaccccatctctactaaaaatacaaaaagtaattgggcatggtggtacacacctgtaatcccagctacttgggaggctgaggcacgagaattgcttgaacctgggaggtggaggttgcaatgagccgggatcacaccactgcactccagcctgggcgacagagcgagacgttgtctcaaaaaaaaaaaaaaaaaaaaaaaaaaaaacccataaacaattaagttgatttataataggaaaaaaactaaaatatacttccgaagggccattaaaaacctaaaagggctatgaaagtgtgttcatctcacccagtttttgcagttacacgtgtgttatggtcttgtgctaatgaccgtgtgtttatttttctaacagatgtgtgcattgcaatgttgtgtactctgatgtggctgctctgaagtctcacattcaaggttctcactgtgaagtcttctacaagtgtcctatttgtccaatggcgtttaagtctgccccaagcacacattcccacgcctacacacagcatcctggcatcaagataggagaaccaaagtaagtcataccgactttcaagttttactccactgctttattagcaatttagaagcaaggtagtagtcgttctattgaataacatttaccaagatctgaaaaattatgcagctatgccaattttgatgctttatgaaatacagctcatagctcatccaaatctttctgttctttccaggtaaagaccttgtccaaaaacgttacctattatttatgctcttgtcacgaatttttgctcaacaagtaaatatttatatttttttcttaagatgaatttttttttttttttgagacaagagtctcgctctgtcgcccaggctagagtgcagtggtgcgatcttggctcactgcaacctccgtctcctgggttcaagcgattctcctgcttcagcctcctgagtagctgggactacaggtgcatgccaccactcctggctaattttttgtattgttaatagagatggggtttcaaggtgttagccaggatgg

SEQ ID NO: 11183 - DNA, 1262 bp, Homo sapiens
tactgtatatttgtttactggtgtagggcttcctgtgttaagaacaggtatagaaatattgacattcaaatgtaaaattgctactgactctaaatgaaaactttggagttgagtaggcctatttagtttattaatcagattaacattcttttccaagttagggtatcatcattgccttgtctgatcttaaaaaaaaaaatctttaaaaaaaaaggatgcttttgctctgtgttaaagtaacatgaagactttgtacaaacatgtgccagttatagatttgtgaatagtaaaatggtcattaatttagatttctaagtaaatgtagctgaatgcatctttactgaaaatgttaaggttgatctatggttgagtaatgccagttgtcttcaaaagtttgtttcagagctaatcgttgttctatttattgtgtttgtgtgttctcaatgtgcctctgcctcccaagttcttcagctataaagtagcagatcctttgacttaaagaggctgactgacatgatctcgctgcactcttctattttagaataatatataagtgttccatgtgcgacactgtgttcaccctgcaaaccttgctgtatcgccactttgaccaacacattgaaaaccagaaggtgtctgttttcaagtgtccagactgttctcttttatatgcacagaagcaacttatgatggaccatatcaaggtgtgtgtgcatctatcctctactttaaatgaattgcagatccattcattggtcataaatcaaggctgagctgcaggtgactctaaagcatgcctcactgtcgagggaagggatggatgctggtcgttgtcagtgagcaacttacatgctgtcatcatgtgttcacttgactgtggtgcttttcattcaggagtcctgatctgcctactaaagattagtgaaaaggaaccaatgtctgccctgattttaaaagagtaaaaaagtactaagttttttgttttttgttttttttaatatgtgaaaatgatgactgtgaagttttcctttcctttccttttttttttttttttctttttgagacagagtctccctctgtctcccaggctagaatgcagtggcacgatctcagctcactgcaacctccgcctcccaggttcaagtgattctcctgcctcagcctcccgagtagctgggattacaggcgtgtaccaccacacccggctaatttttatatttttagtttcaccatgttggccaggctgatcttgaactcctgac

SEQ ID NO: 11184 - DNA, 1212 bp, Homo sapiens
agagaaaaaggcttgctatttactaacgtattgatcttagatgtttgctcaagtcagtttgttctagttgaattcctaataatgtattagcctatttaaacatttccaggctgatgggaaaggagagagttgttccgaaatggtttgttgtagagaggcctccctctgggatgttacaggaagataaagtaccaggattaatttgtgttcaatacagaggtctttctttaaagaattttaaaatggtacaaatatataggcctttaaaaagcatttggaaagagaaatgcataacgtatagcagacttttatctcttttgaaatgtatatttagcttaggtttttttctttatatattaaatatttctgaatgaatataaactggtgttgaaatgtgtaccacatgttaagatagcatacttgtgctttcttttagtgttgtgatttgtgatagatatttcttttctttttataatgtagtctatgcatggaacattgaaaagtattgaagggcctccaaacttgggtataaacttgcctttgagcattaagcctgcaactcaaaattcagcaaatcagaacaaagaggacaccaaatccatgaatgggaaagagaaattggaaaagaaatctccatctcctgtgaaaaaatcaatggaaaccaagaaagtggccagtcctgggtggacgtgttgggagtgtgactgcctgttcatgcagagagatgtgtacatatcccacgtgaggaaggagcacgggaaggtcagtaaagaatgaaagctgctctgggtgagtgcaagagagggcactggactggcaagcttccaagatgtgggctcttggcttggctctatcagtaattagtgctgtgaccttaaaaatcacttggtgtctctctgcctcacttctttatctgtgaaatagaccttttcaaatccttcagtcttcagttttcctggtcattgccttcacatgcactcctccagactggtgtgcatgaatgtggtaagttacctatcacattcatatttatagcttaggaaagagaaaaatagtaaaccaaggttaaagacatttgaatttacctctatccttgtgccagctaaggaagaaaggagcagagaaagacagtggaaatgttgaacattgccagtagcatttgtgtgacttacatgattcttccttgagtttggtagtgggaagaggaaccac

SEQ ID NO: 11185 - DNA, 3578 bp, Homo sapiens
tctttccaaagttaagcgtatagaacttctttaagtgtttgtttctttttttcattaggtctcagcaagaagcagctgccaaaaaattcttttgactaccattttcctgtgtacttcatctatttgtgtacaaaatgatgtcgttttgagggaatttaagtatttaaattgcttcatagtctaaattattaattttcttaataaaataactgtttaaacattgatttgcagttaagaataaaccttaaagcaaagacaaccacattttaatttgttcacagtatgtaaatctgtctaaatttcagtgaatttctggtcagtatgatgcagcctctgagcagaatattgaccagtaagagggtaaataaagtgggggcaacccctggatatgaatgttaccccctaagtctccaatattgcaggtttccctgtataacgtaaacacacttgccctcatgcctcccagaatatgaggtctaattaagaagtcccatcaggtttattttgtaaccaaagtcttttttagaggtcagacttcctaatcaaaggcctgggcctgcagtcctttcatcttaatgcaacttcctttgaaatcaaagaatattttgtctgagagctttaaggatctggtaatagacttcaaaatgttaagtgaaatttttttttcctctatttatcaatgatatatttcacttttaaaggaaattttagaggaaaattaatagctgctttttgcctaaaaaaccttgtgggtggaaacattcctctgagaatggcttttataggtattttgcctggtaatgtattcattcatgattgcccatattcttgaatgtcttcattccaatggggtcaggtcaatattatgaaaataatttttatatttatatttgtaacttaaggaatttatttctccctttactacagcatgtaaattcagctcaaattgcatgatctgaggatttaaattcacaaaacctgccactacattctggtttacattagttacttcatgctggctggggttagtgaccatttgcatactcttttaaatcaaggaggctgtagtagaagcagttttaagattcttgaaggcaaaatttgaaaaacagtgaatacttctaattgtttccttttagtgccagaactaaggacattgtgaagcacttgttagtaaacttaaccttgaaatgtcagactggaaggagtttttatagtctttgtgcatacttctaggtattacagaaacagtctgtaaatgacattttaagatgcaaatttaattctgttcacagctgatttatactgatttttgctgccttcaaaatactcttttacttcttttagctaaaatggttgtctttcatttgccatagaattccaaacaatactatcttataaaatagtactgttgaattattccaagcctccctaggtttgctctcaaatgtcatttacagattgggctaacgacctaaaatctatatataaagactttctgaagaactctgtattatagcaataccaaacgagtgctgtgtgtgcaaacagtctggcgttgctttttatgttgatatttatcctagaacactgaaagagaatatgccagtgataactcactttacttcagtcatttcaacacagaaaatgcttctctagcatttttcttttgtagtgttaacattttgaaattcatgtttcagaggcttcatcatcacagaatttactcttgctccatgaaaaaaaattaaataccttcagaggaatatttaagttgtaaactatgaaacttgagaaatcctcttgagataaaaggctgccaaatccagtattataaagtccatggtcatatgtgcctgtgcattaaaggaataccagatctatgcagtatacatttttcaggctgaaattcaaggggaatcattctgattattcttactacaaatggagatggctattatgaaacagcatgagcatgagccttttatcttttatacttagtgatatactttgcttgaaaatcactcagcaaagtagttcacatgatgtgtatcatatttgaagtgtggtttttctcaaaatcattgactttaaggagctcatttctgaacaaaaaggtttgctctgtggaaaaatcaatcactgccaggattctttcatttctgtactattttgtataattgaatttgttcacttctctcacaccagcaagtgttttacaggtgccttggattaaaacaaaattgattttaaaatttttatgtaagtcattgtgtctatgatgccacttttaaaaggaaaatgcaattgcgtaatggcttatatccttatttaatgtacctatttgtgttctaataattgtttgaatgttttattcagcttaaaactttaccatgaagtcataaacagtaaacaatgttttgttatgtattaaggggatatcagtgtttctcaaagtatgatccatggaccatctgggtcatggcgcctggtttcagacaacctgaatcaaatcttaggggtggggctttgggatgtcattgttcaataggcacctcaggagattctgagcacaccaatgtttgagaaccactaaaatgaggagtgggaaaaaaaaaataggtgttttgttaatttagagctgagctgagaagataatatatttttattgtcaatgacattaacagatatgcactgattcttttatacctacaatttacttaatgttccttttattaaaacgcgtggttcatgagcaactacagactgaatccagattattacctgttgctttcagtattttcgtgatggcttttaatcttatgaaatcatcttgagatcattcatggtcaagccatgaaaactcccatcttcaagcctgcctgctaaagcttctttgccttcctgattgtgattatggtaacaatttatatcagacagttgtactttttgataacttagggaaaacagaaatgacttgaacaagggattgcctgcctcactgcattgcagagatacaatttttgtaaagaacacaaatagcagttgtgaatattaaggtgtgattatctttccctgtccatgtgcttattgaaagaagatagtgaacaaatgattatattgaggatttttttaatttataagatctaatgtgaaatccacacttggaactttttagatctgtctgttgcttgtttaatatatttcttttatgacattacttaaagtttaaaagggttttctatccactgtcaatttcaattggataacattttgtcaagttttttttttcctgattatttgatgctagctggaattcaagaaatggcattgaccttattcaaataaagaaatattttagtaaatttgctttttccttcattgatcttggataataagttgccatttgtttttcagacacaacctgtattgtgatagcatttcatttatcacatgctttaggctctgcccgaggtggcctgctgcatgcagaggcagtacatggaagcatgccacgagaacatagaaatggtcatggataactgtttacccttgctggtaatgaaaaatacaaacta

SEQ ID NO: 11186 - DNA, 1187 bp, Homo sapiens
aagcccattttggactgcagggccctggggttttctctcttactgtttcccatcatctaggagcccttctggtgctcagtcagctcctggctgggcaagctgcctcaaactctctccttattttggtgcttcccatttcttctctgatgaatcctagcattctctcctaggcaatctatttgaaatgcaagtatctacttactactctggtttttctccgtggaggaggtacatactacttgcatctggttagccattttgatccctcctgagattatccaagaaaaattgtttttaaataaaaaaatttaaacccagtttataataagtgttcaatcacctgaaatggcagaaaacaaataatttaatcattattgaattaattatttgcatattttctgtttgggagattgtaccactgtgatggtgatgtcctaattttgctgaatgttggcactttggtcacttacgttatttcaaaaactacatatgtgtaggtgactctgatcatttttatttatttccttttcagcggaggaaatatttgagagtgtaggagatcgagagctaagacaagtctttgaaggacagaatcgtattcatcttgaaatcaagcagctgaaccggcagttagatatgattcttgatgaacagagaagatatgtctcttccttaacagaggaaatctctaaaagaggagcaggaatgcctgggcagcatgggcaggtgggcttgcagaatatgcagatgtgccccatttaccctttgctggaagggaagtaaagaagaagggcaactgtactatgtgctcatagaatgtggattattcagcttgctcgtcattgtttcttcctccagattactcaacaagaactggatactgttgtgaaaactcagcatgagattctgagacaagtaaatgaaatgaagtaagtatggaaaagtagcgtttgtgtgttatgtgattttttttatcctaaatttgtgacttcaggtgtgcaagcactgtattgcaagatttctgcatgagggtaagaatcccgttctagattcattttacaaataggggaccataaatacagcaacttttaatattcaaaaactgcaaacatgtctaaagtttttaattgtttagagctggaaaagaaaaaatgttttggcatcttttaaagagatttgtcagttac

SEQ ID NO: 11187 - DNA, 1376 bp, Homo sapiens
cacattgtagttttaaatattttcaaatacatggattgttcctgacaacccagagaagaagggagggaagatcctattttccatatttttagaagaacttgccaaattttaggtgaaagaaatttctgaagatcgtatggccaattgatggtaagccccaggcaggactcggcctggatttctgactccaggttcagtgccctgttacccaacacagtttcttaagttacttagtctacactacagtattatagttttctttttaatctgtctacatctctagattccgtaaaaacagtacaaagcataaagattgctgtacgattgatattaattgctcttgattggtggatgtgactagccaggattggtattttagttaagggttaggaagtttgatttgctgagctggtgcttttagcataaacagcttgaatttgattttttgatatgattttaggtaagataaaattattaatatcttccatgtgagagaaacaaataagaaagtaagacaaaaggtggtatgcactcttaagaaaggttcagagacatataggtacccggcagtatgtggagaccaggattttctctcatttgtctgggacgttgtccatgaaggagatttgtgggaaaccatggaggatcttggtaccagaataaggagtttggacttcttttgacccttcatttgtttgttcatttcttatcaaacattgattaaacatctattatatgttaaacactgctaaatattctgatttagggttttaaaaagtgagttttggattatttctaatataaatctttcaggtgaattttggtctctaagctcacagagtgccattgcctttaccaaattagtgctaatttttgtcaattccctcactggttattgttatttaaaacaataaatattgataaaatacatttacaatgataaaagtaatctcctatggaactttttcagacttttttttttttaatttgtagatgaccatgatgtcctttcttttctgactttccagttgactgaacctggaaaagagccggtaattttacacatattttcaaaaactttatcagtttagtttgccttttagctgaacgttttggaagactaacttaggtttggatcttgtttctgccagttactgctatatggtcttgtgcaagtcactgaacctctgtaatgcttcatttcttttttttttttttttttttttttttttttttttttttttgagacggagtctcgctctgtctcccaggctggagtgcagtggcgcgatatctgctctctgcaagctccgcctcccgggttcacacctgtagttccagctactcgggaggctgaggctggagaatcacttgaa

SEQ ID NO: 11188 - DNA, 1252 bp, Homo sapiens
gttagggaaaaagtatttctatttaaggtatttattttttcattctacctatgccatagatttctgaatcaagacttaggacatttgctgattaacaatgtttaaattaggaattgttataagaattaaaataggcagaacaagttgtgaaaatattgaaccaaaaaaaggccatgctatcatcttagagggcccatgaataaaccttagagggaatcctaaggctttaggaaaccgctgcagcttgtctgtcattttccaatatgttaattattatacttagtgtacagtatttagaatacaaaatgcttttttattttttaggaaaataatgttataaatgattgtatattttcatagtaatgtctttataattatttattaatgatagagctgaattagaaaagctcttcatccattataatatggtttctcatgaaaaacttattacaaatttcagccaactcagatattaagaacatcagtgtcaatcctcctcccctcctgcgacctttttacacttgttttggtggactaggggctccttttctcctcctttttgacatataactgtgccattaaaaacatgatttctgatgaagctggcctagagggaatgaaggagattgcgtgggtatggtctctaggacaggcgtagctgttgcagggccaccctgtccttgggagaacctggtgagctcccatattcacactagatgccatcatgtcagggggctgaagagaatggagctaatcaactctgtcatttggagaagacccccttcagaccagttctgagaactccttcttttaagagaccagagataacttgatcatttctcaccttttcgtagttgttcttttttatgttgacattccccttactgtttttaaaatgcttcaaagcattaatgattgttatgctgtgtgctttcagtactatggcaatatctttgtagcattttcccatttctgtataagcatggttttttgtttttttttttttcgtttttgttttgagacagggtctcactcttgttcaggctagaatgcagtggcaccatctcagctcactgcaacctctgcctcctgggctcaagtgatcctgccacctcagcctcctgagtagctgagactacaggcacatgcccccacacctagctaattttaaaatattttttgatggagacagggtttcactatgttttccaggcagcagcatttttttttgactgggatttctttatgatgc

SEQ ID NO: 11189 - DNA, 1386 bp, Homo sapiens
ctggatcctgattctccttttaagctaaaatctcatcaaggcttcaataagaagatggatatggatatatagtatattctactcctgtaaggaaaatggtatttggaattccgaattgacaggttatctggaacaaaggagcttctttttttttctaggttttgcaggcatgaaatagtgattatatctgtggaaaagcataggaaggcattctcctttttcatttttttcctttggctggcagctcttcccagtgatgttgagagcacctgcagcaatctggtccccagtcgcacaacttcccacatacccagaggagagcatatgcctgtgggggcagtgctgatggcatccagagtcattgctgtggctgagctggaaggaaatcaccaggtgccaccgtcaatatttatcagctttcagcactggttttgttagacagtcagggtgtattatttcaagagcttcaataaaaaaagtgtttgcaggtatttgtcatatttctttagtatgcaataatgctatcttatcctttttagtgctatttctcaggttttctcagtcaaccagctagatgcatgtgatgcatgtctatccttcactttttttttttcatttctggattttcctgggatttctgacaacacaaaagtagaaagtgcttggtatttctgtcttatacataggaaaacatttaaaataaatagtttttaattgtaggctcaacatctgttaccccatagctttttcgtatattgtttctttccctttgaatttctttttactgtcatctattattttaacaggagttaaaataactcctgttaaactttctgacaatatcataagaattcatattaaaggtgttattctttctggttgtgagattctagcacaaaggcctaaaatcatcaaattagatttccatttgtaaacaaattctaatgggcaaaatatcttgagagcagtttttatatggattatccataaaatgacctttacatatccctgcagagttggccttttgcccgtggtgtgctagtagctttggctgatgctaagctttcctggtatgcgccctatttttaagaagtaattgcttttgaattaagttatagcattactaattcatgttaatgactaggaaaccctctgtaatttacaagatttttcaaattggtggggagtgaataaatacaatttaaaagtcagaaatcagtttggcaaagtgtactttcttaatttctatttatgatgaagtatagtcataatttatttgtaatactactttatggtataccagtgaaagaactgtagtataaaaaagaggtattaatgttttatgaaatctcatgcatcagttcatagcataaaatctagctggac

SEQ ID NO: 11190 - DNA, 1122 bp, Homo sapiens
tgaattcttagagaagttacaagtgtgatttctgaatatgctaaaagattgtggttgtataaggaaggtgacatcttttttggagaatcttagttgtttgtttctatgttttttgagacggagtctcgctctgtcaccaggctagagtgcagtggtgcgatctcagctcactgcaacctctgcctcctgcgttcaagcaattctcctgcctcagcctcctgagtagctgggactacaggtgcgcatcaccatgcccagctaatttttgtgtttttagtagagacagggtttcaccatgttggccaggatggtctcgatctcttgacctcgtgatctgcccaccttatcctctcaaagtgctgggattacaggcgtgagccactgcgcctagccgagaatcttagttgtaacctatgtaaccaaacaaagtaattccatatgttctgcaaatattattatcattaatattccttataaatatcgtgtttttcagttcactagtaagggactgtggctctcaattttaacactgtttttttttttttcttctagtgcaaacccagcctaccatgagttactattaactgttttgtggtatggtgttgtccatacttcagcactcgtgaggtgtactgctgctagaatgtttgaggtatgtcaacacatgcctctgttggtttcaattataatgatttttttttttttgcgaagaagaagggaattttttttaataaaaaggctttgcatatcatgttatgttgatatatattttatggctttgaacagtgtctggttgtgtactgtgtgatggggcagaaatttagctttaacatatttaaaaatgttttctcagcttactggttccttgaatgttattcaattatcacttttatttctcaaactatcttttaaatcttattttaatttctaacttatataactctttctgactatactttttgatttactgaggtaaataaactgaaacaacataggatatctttcaagttgtaaaatatagttgaatttatcagtagcattagaaaatcaattattgaaattatggaaatgtttattttattggttactcctacgtcactattccctaacatttcatatgta

SEQ ID NO: 11191 - DNA, 1792 bp, Homo sapiens
attatacactaagctattacaatggtacttaaaataatgtaaatttgaagtcattgttataaaataataaagtggagattacttaagtatttaaattatgaaagaataatgcagactttttattgtttcttaactgactagaaagagccaccagcattactctgtgccttttggacatcagtttgtgtgttctgtaggaattgtgtgcattccattcacacagtatttctttaggatgctgtgatgatttgaattacaaatcctacagtcaatagctaaagacgaaaccttcatttcagaactctcatgaatattctttaagtgctatttaaacctccccagcacttagatgcatataatggacttacctgaggaaagacagcacataggcatggggagaggtaaccaaggtgaattttacaaactggtgtatagtagatttaaatgctcaaaaataaatgtaactgagaagagttaataattgtgagatttttcccaaattgagatacagaagaaaatatagtttgaatctgaaatttaacacttatttatgtaaaacactttatttaagatattttctaatgattttaattttagagagtaccttttcattctgtgtgttacagagaagtactgaaaagttaaggacacttgggggctacttttttccctctaaactaaaaaagacattggctgaattataactagttagttatcacctcgtcccttaaagtcagtgacctcctgtgtttgatgtatattacatagagtcttaagtcagtgtacagttccactggaatttgacagttgtctctacagtcatgcaactcgaagtagaaaagagtgctggacataggaagggggtgcttggtttgaggggttaatgtgaggcctttttgaaaaatgaatattttgataaaaagaattcttgttttagcacagttgatgcacataagtgattctcatatttgttgtataaactggtttaatacatttggaacatagttggattacattcatttcctgggaaagctagcttaccatacattcaagtttataaaacaatttgccataggcaaagccatttaaaaagttcattctgaaattatttcatttacctacagtgaaataattgtgaactaagtagtctttctgaaaactgttgggttctaggcattcctgagaaattgaaagtggctacctttcatgtcaaaaatgttgatctattataaataaaatgtttttgcatatgtttttgatttggtttgggctatgcattttactttcgttttgaaacactatactttctattaagcaaaaaaatgagaaaagcctatattcatgagaatatactaatattttgtaaatataatttatataaatttacctattttggtttatttttactaaaaggggaccatgttgctataaaactaatacatttcagaggtacctggaagaaaaatgtttaaactctgatttgcttcaaactatagtagaatatgtgtatgtttgttatcaggtgaatgggtagaatgtatttttattgtgaacatttttcttaattaatgaatatatttatttaagtgctaatgtttttttaaaggcaatagtaggcaagattcacagtgtatttcaagtgagagtctcttttcttaaatattttaatatcattaagatttcacattgtggttttgttttttgtttgtttgtttgtttttagtaaaatatgtcttgtctttacagacaagacagacactaatcattgagactgagatttggactgagtcca

SEQ ID NO: 11192 - DNA, 1225 bp, Homo sapiens
tcgctcgcttgctcccacccgcacccgggctcccagaaccggcgaggagcccagggggaggagccgtcgcgggcacgccccgcccccagcccgggaagacgacgccagcgaccccgccggccggccaccgcccccctcgccggccgagacccgcccccggccccggccctcccccggcggcatggaggggccccgctcctgacggccgcgccgccgcctcggcccgtgctccacctcgcggcccctcccgcccgcccccgctcgcatgtctgcgccgccctagccgaggatgctgaggatgaagctgccgctgaagccaacgcaccccgcggagccgccgcccgaggcggaggagcccgaggcggacgcgcggccgggcgcgaaggcgccttcgcgccgccgccgcgactgccgccccccgccgccgccgccgccgcccgcgggcccgtcgcggggccctctgccgccgccgccgccgccccggggactcgggccgcctgttgctggtggagcggcggcgggggcgggtatgccgggcggcggcggggggccctcggcggcgctgcgcgagcaggagcgggtatacgagtggttcgggctggtgctgggctcggcgcagcgcctggagttcatgtgcgggctgctggacctgtgcaacccgctggagctgcgcttccttggctcgtgcctggaggacctggcgcgcaaggactaccactacctgcgcgactcggaggccaaggccaacggcctctcggacccggggccgctggccgacttccgagagcccgcggtgcgctcgcgcctcatcgtctacctggcgctgctgggctcggagaaccgggaggccgctggccgtctgcaccgcctgctaccccaggtggactcggtgctcaaaagcctgcgcgcggcccggggcgagggctcgcggggcggcgcggaggacgagcgcggcgaggacggcgacggcgagcaggacgccgagaaggacggctcaggcccggaaggcggcattgtggagccccgggtcggcggcgggcttggctccagggcccaggaggaactgctgctgctcttcaccatggcctcgctgcacccggctttctccttccaccagcgggtcaccctgagggaacacttggagaggctccgcgccgcgctccgcgggggccccgaggacgcggaggtggaggtagagccgtgcaagtttgccggccccagggcc

SEQ ID NO: 11193 - DNA, 1221 bp, Homo sapiens
gtgtgcttgtgtttgtaatgaaagtctacagccaattttacttgtctaccaccgtgttgtgctcaaagagacactacttgagtgaagatttcttctttccctgtaccagctgttacagtgttacgttgtgtttaaaatgtgtatggtttattgcaatctgaacagagctatgggtttctaccataagtcaggttgtttgttccctaacctgtctctcatagcaaagtcacttttataacagtttaccactatgcttgattataatgtgaaaggcggaattctgagtgtgttaagatggtattaatcatgtcggtgtcatgtcactaagtttaatgctgctgtttttaaaaaaaaaaaaaagtttttttaaaaagccaatctatgtactaaattgcttccaggtaatttttgatttcctaaagtgcactgaggttatctggaagattgggtgtattttttggtgactgctgcattcatcagcaatgaacagtttccactgtatagtcctaggggtcagggggtgggggtttcattttccattcctcagcacagagcagaaatgatagatttttattgtttggagtaacgttggtatgcagcagaggaacgtaaacatttggtcttggttcagaagcctaacagattgctagacaagagaaaaaacttgaagaaaaaagaagcttaatttcatgcttcataagtagcatttatatttatagcaccaatgtacattttgaaactttctttcaggggtgggagttatggggaaggggtgggtgtgaaggggtagatgaaagctttaatttagaaagaaagttcaagtaaaggaaattattttgattaaatatattttatttgatctgggtatttttggaccacattattaaattaattgttaagctgcagttgagttgttcaagtgagagttttgataagccacttatgggccgcgttgtgaatcacttgccagttgtactttatggagcttattttatgatttaaaatactgtactgtacataggaggtatgttaccttctccttatttgtatgtttaccatatactttgatatttgaaatgttatgtactggaaaggccacttatatttctagaacagattggattttatgcaaccttttttccttgaattaacagcaataaaaaaatgaaaaacagcttaagaattgtgcctcattgtaaattttgtaaaagtggagatagg

SEQ ID NO: 11194 - DNA, 1388 bp, Homo sapiens
tccagcctgagaataagctcattgagggcagggactgtgtctctcaccacagtgttcacagcacctagtatagggtctcgctttcatgctcagaacataaattgcaaaccaaaaaagccttgattgtagtttggctatttgagatgctgcagtgggtctttttaaagctattataaccctaagactgcaagcaatatatattttattctgcttatggtttgaatttattaattggacaaatattttgttatgtatctgggctgtccagcggtgcagagcacacacattctgttctcacagcttactgacatttacagagttttcattatattcatccttagagcagactagaagatttgtcttagaaactgtttgttagagacctaggtaccttgaaatagtcttgtaccgttggatgcactaaaagctctctctttatcttgcaggtggtcaccatgggccttttccgcactattgctttgttttaccttggaagttttgacagcatagttcgtcgctgcatgatgcagagagaaaaatctgaaaatgcagacaaaactgcctaatcttcttaccccttggaagaagactgtttccaaataatttgaacagcttgctgctaaatgggacccaatttttggcctatagacacttatgtattgttttcgaatacgtcagattggaccagtgctcttcaggaatgtggctgcaagcaaggggctagaagttcacctcctgacagtattattaatactatgcaaatatggaataggagaccatttgattttctaggctttgtggtagagaggtgaaggtatgagaattaatagcgtgtgaacaaagtaaagaacaggattccagaatgatcattaaatttgtttctatttattcttttttgcccccctagagattaagtccagaaatgtactttctggcacataaagaaatcttgaggactttgtttaaaccttccataaaaaaacaattttcggtttctcgggttctctctctctctctctctgtctctctgtctctctgtctctctgtctctctgtctctctgtctctctctctctctctctttctttctttgtgtattttattcaagatgagttggacccattgccagtgagtctgaatgtcactgacagccctgtgttgtgctcaggactcactctgctgctggtggaaactcatggcttctctctctctttgatcccataaagctacgagggggacgggagagggcagtgcaatgggaagtaaagagatattttccagtaggaaaagcaatgctttcttgtctttagactcaaatgcttagggaacgtttcatttctcattcatggggaaaggcagcctccttaaatgttttctgaagagcggtaa

SEQ ID NO: 11195 - DNA, 1226 bp, Homo sapiens
tagatttaaataatttctttaaaagcgtaagctttggctgggcatggtggcttatgcctgtaatcccagcactttgggaggctacgatgggtggatcacctgaggtcaggagttcaagaccagtctggccaacatggtgaaatgccgtctctactaaaaatacaaaaattagctgggcatgatggcgagtgtctgtaatcccagctactcaggaggctgaggcgggagaatcacttgaacctgggaggcagaggttgcagtgagctgagatcgcgctactgcattccagcctgggcgccgagatagcgccattgcactccagcctgggcgactgaataaaactctgtctcaaaaaaaaacaaaaacggtaagcttttatatttaattaactgatacctttcactgtgcaatctcaagaggaagattttctaaattagacattgtctttaccttaaagaagaaaattgtctatttcagtgtcttttttagcaagattgaccaaaacaggtggtaggtgtgtaatttttaactgtcatgaaatactgtaatgcgcacctttgctaataaggaaatggtctccctttgaattatgggaagtttcttgtctgtgatatggggtgtctgtgtacatatatgtatatttccttttttaatacaggataataatatggggtcttgtccttcaccttttaagttcagggaacagtttgtcctgaccacacatatgttatcagtgtaatgctttatgaagctttagaaatgagctcatgactcattaaaaaataataaacgatgctattttaatattttcaaataaataatctgaggatgtgtttcatactttagcatcaacgctgagttgtgccttgtagaattgcattgtctatacatgcaaaagactattaagttaggatgaactagattccctaattacagtgaaattctatcttgcaaatgctatagaataacttgcattttaaagtgtatttgcacattttacatatgctatgtggttgcctttgggttttctgtacagattgtttttgttattaaatggaaaaggcctgaattatgctcttatgtgaagtaaattgatataacctattgactgtattctgtgtattattctttattttgggaccttctgtgtaaaagaaaatattacctaaattggttagatacaaagaaatcattaaaattattaatgtatatatgaaaattctgtt

SEQ ID NO: 11196 - DNA, 1144 bp, Homo sapiens
atagaaagcatcaagaaaaaaactaaaagcagctgggtgcagtcgctcacacctgtaatcccagcactttgggaggccgaggctggcggatcacaaggtcaggagatcaagaccatcttggccaacatggtgaaaccccgtctctcctaaaaataaaaaaaaattagctgggtgtggtggcacatgcctgtaatcctagctactcgggaggctgagggatgagaatcccttgaacccaggaggtggaggttgcagtgagctgacatcgtgccacttcactccagcctggtgacagagcaagacgccctttcaaaaaaaaaactaaaagcaaccaaaatctatcccattacccaggggataactactttttgttgtatattcttaattttttttccaaaagtaaacattctaataaaacatacaaaactattatacattttaactttcctggtaatggattaagtcttaatgttcaattttgtttcaaatacatatttcagattactgtttatttcaggttcgcggaccttcccgagctgatcctaaccatcttgtagatgatctgctaacaccttgctctccaggtgaccctggtgccattgaaatgacatggatggatgtccctggagataaacttttggagccagttgtttccatggtttgaaattttgtttgtttttaagaaaatattttaaaacattatacttcataattttcagttatataagatttgctggaaaatcttagtataaacaggtgtattttacttaatattgttgactcattaaaaattatgaagttaattgaacttaaaatataaaaagtcattatttttaaactattttcttgggtttagaggaacctttaagtgaaaaagctattttttaaagcacaagattctgactttacaggtcttatagctagaatatctccaaaatgctcatatatagtataattattgtaaagacctaactaaaaaatagggttggtgaaatattttttttcccctgcatctcagattttttaaaataaccagaagtcacctgtaatcccagcactttgggaggccaaggcgggcagaccacttgaggccaggagtttgaaactggcctggccaacatggtgaaatgccatctctcctaaa

SEQ ID NO: 11197 - DNA, 1192 bp, Homo sapiens
tttgtgttaaatagatttaagtaaaggaggtaaatgctaaattcatagtgttttttacctgtatcacttccctgtgtattatggaaaaattagagattttaacgttattcaaagttttactggaagcaaaactgtgccagggacagagatatacaatttaagttttctctttttggcaactgcacttgcttaaaatgtactgaatgtcagctggatttcacagcatatcagatttacagtctttgtcttatcaaggcctttactgtatgttttatactaaccagatgggaaacacattgagcatcatatctgacatgtatgcctaagggaggagctcccccatggatcatggcgttaatgtttacaggacatttactattcttagcattattgatgtttgctttctctacttttgaggaatctgtgagcaattattccgaatgggcagttttcacagatgatatagatcagtttaaaacacagaaagtgcaagatttcagacccaaccaaaagctgaagaaaagtatgcttcatccaagtttatattttgatgctggagaaatccaagcaatgagacaaaagtctcgtgcaagccatttgcatctttttagagctatcagaagtgcagtgacagttatgctgtccaacccaacatactacctacctccaccaaagcatgctgattttgctgccaagtggaatgaaatttatggtaacaatctgcctcctttagcattgtactgtttgttatgcccagaagacaaagttgcctttgaatttgtcttggaatatatggacaggatggttggctacaaagactggctagtagagaatgcaccaggagatgaggttccaattggccattccttaacaggttttgccactgcctttgactttttatataacttattagataatcatcgaagacaaaaatacctggaaaaaatatgggttattactgaggaaatgtacgagtattccaaggtccgctcatggggcaaacagcttctccataaccaccaagccactaatatgatagcattactcacaggggccttggtgactggagtagataaaggatctaaagcaaatatatggaaacaggctgtagtggatgtcatggaaaagacaatgtttctattgaatcatattgttgatggttctttggatgaaggtgtggcctatggaagct

SEQ ID NO: 11198 - DNA, 1120 bp, Homo sapiens
caccatgttcaccaggctggtcttgaactcctgaccccaggtgatccacccaccttggcctcccaaagtgctgggattacaggcgtgagccaccgcacccggcctgttttactttattttgttttttactttctaaatatgaacagtgttcttgctattttagccagtatttttgctattttattaggaaaataaccaccaagtttcctgttactcatgggctgtattatattttattctgcttttaattaggtttccttagatattttcttcacagctctttgcttctcacttttctctgacaagatattttcctgtttgaaggtaacccaggatacaatttgaaattctttgagatatctttttataaacattttctttgcttataaagatcctttctcttgaattgtattcgagttacctttaaacttcaaattctgatttcttaatctttaataaaaagtatactaatcttctgaaggattttctttttctgatcgtcacagcattgcagatgctaccctcatacagacatgtgtccaggaactcagagccctgctgccttcatcacctccagctgaacacactcaggctcaggtaagcatctcaagtctgtttgtgggtttgtttacgttaggtgtcaaaaataaaaatcttgctgaggagatactagtcataggaaaaggatgaaaacctctcaaaatatacatggtatgatgagattattcgaaatacgttacttgaaattttaatatgggacatgtctggatgttagaaaagagaggtggggtttgaagacctagattctattcttgactccatcattaaccagctttaaatgtatgatcaagtgtctggatatcttggagcaccactttaataataaagagggacattggtatagttcacttcctgcttctgtgattttaggctatctctgttatttacaccaaagttaaagttgttaaaatatttggtggctaagttatgtgtattttcaaaacccaatttgataaaaatgatttattcttgttccttcacagatatttagttttaaattcttgcctatagctagaatctatttataaaacatgcttaacaattattcatgtagctgttg

SEQ ID NO: 11199 - DNA, 1218 bp, Homo sapiens
gatttgagcattgcacatagtatgcctgtatcaaaatatcatgtgtaccccataaatatgtacaatgattatatatccataattaaaaatttaaaaataataaaaatagtaagattttactctgaagaaaacctaaagattatttgaatttggacacacctttggcccctcgagtttcagaaaaaggattgtaaatcatctttttgttctcagtgtctgaatacgtggggcatgaagtcatgttctgccctttctgacctgtctcttctgcatacgacaatgtccgtgtgtacacatctacacatctacatccacacatggtggaaggtggaggtcaggagtagtaggggtagcctgacccctaacctcaaggttaagatgagccaagaagctaaggcaattccccaactatacattatcattttcaggaactttcctatgattataagaacttttgagtattgtacatagctgtaaggtaaataataattcttatgtttattttcaataataggtcaccaggaaagtacatcaccacggccacctcatgattcatctctttctgctcccctgcccaaactgtgtgtttttgttactccatctcttctttcagcaatgtgcagcctcttggacaacctcttgacgattgctcccagagacactgcaaaggcttttcgacaagctcatctcatagaacttctctgtaggtaagagataaatactcctagagaggcatgttagttgagataaatttacacaaactgtattcatgacttgatacaagatttcttgtgacctggaaatacagctttattcttttttaggctcattgaactctaggattttgcttttgccagaattgtcttggtggtttttattttacatctattaaagcacttgtattagtttgttatcttgactattaaggccaaagaaaaactcctgctttctaaaattcatggattctaaaccttatttatcctccagcacacttaaggaatatggtgctatcccctgttcttaatggatgtgagggactttgggaattcatctttttagtggtcatatcagaataatgtccctgggttgaaaaattattggttaaattcatttggagttattttgttaagggaaattaaacttttcatcaaaaagtattctgataaaatttagggaaattaaattcaaagaaaaattatttgaatttttattacttat

SEQ ID NO: 11200 - DNA, 1191 bp, Homo sapiens
aagttttactttttccttaggtccagtagctttttcccttggtatcatctgattctgctttttaacagttataatttttactttcttttaaatattacatgtgtttattacttttaacaatctatcatatgggaaaactttaaatgaaaaagcattttactctgtactgttttagaggttaaagtctgatttgttcgtagatatgaatcactaggaaaagggtcctggattagaacaaaatctcagtaagtatatgcatgagtgttatcattagtgtgatggtgattacttttgaatatcttaatattctaatctgtctgtcttaagtgaataaaaatttttataaggaggaaaagtcaatataaacatttgggatgccaatgtaaaatcctaatattgacagatatgtatcagtttttcttctggctgtaagtcaaccttttgttaaaagaaaatgaagataaaacagcttttgggagagtttataatagaaataagtgtgagcttttatttaaatagctttatgttcctccttcattttttttctttttgtctagaattttagatgcattgaagttatctacagaggacatcctcactctgaagataacacacatggctagtgggctgcaggactgcctccattccattgttcaggctgcaacccacagggaagttagggctgctgtcaccaggatgagtttttatcttctgaatgacagattgtctttaaagggttgccctggtccatgtggggttaccttgaagtccttggcttggcacaccgcactaaacaggtcagtgtaaggtcaaggctgccagtttcaaagacctggattgcattgtattgtgttcatctcctaacctttgaagataagagtctatgcccttactgctgctatcatagaaagaaaaactccaggatttttatcatctgtaataatagccaaagagaaatttttaatttagttattgcattgttgaagggattattaataaacttgtaacaatttattcttagaaaattttacctcacaaaagcaaataattaggataagacatggatgaaacaaattgaatgtttatttctatccatgttataaatgagttgagacatcagtgaattgattaatagctgtgatacacctgccacaggctgttttgttttgcttttgttttgttcttaagtaa

SEQ ID NO: 11201 - DNA, 1266 bp, Homo sapiens
aatattaaacccttcgtttttgggaaaaccagatctatttttttctttaaataaaagtagtgttttcagttagtgctctcatgaagccacatctgtgtcactgagttcaattaacttagtcgatgaaatgcctgctgatctgtagtgggtggtaacataattattttaatttggactattttaaaagcatcaagagatcgcatctttgggaacccacaataaatggttacttttggcaatcagattattgttttataatacaagtaatcttttcattttgtaagatttttatattgtttgcttaatagggatatattattaaattgaataattattgctttccaagattcccttcagcgctaatgatcaatgaatgaagtttatgttggctcttaatgtacatttaataacaaatttcatgtggattactttttgttccccaaatctgctatttaaaactccattcttcatttggatgtactttagaaatggggaaaagattattttaactgaaaactcaaattctctactgcaaattgaatgacaaaatcttgtatgttctatgtgaaagcatttgaataatgggcaaattgctctttaaattagagcttttgtgttgatctgaaggctctgagagcagtcataacagttgtgttatttttcagttagttttacatgcatgttgcctttcacaagttagatatttttgctttagtagttcattacatttaagatattttaatatataaacaaattacttttaatcttaaagcaatgaagaaactattaaaacactttgctacagtacagaataaaaacaaaacatctttgttcataatttgtcaaattctgaaagaatcttacctacttggtagtttataattcatgaggtcattctttttcatagacaattaatgtggtgagatttttagggaatttgctatatttttagttaaaataattttgtttacattaaaatgttaaataattgttttttaatttgtcattgtcagctataatcatatataggtgaatggtattaaaagaactatatataagatagtattttacatttatcattctggaggtcaggatgtattatatatatatcagaaagtattacaatagctgtttctaagccaccaactgtaattataccttagccaataaggttgcagatgtggacatcattaaggatcttactagtagtaagttggggtgctgtcttttcagtgtgcaaatgatttccattatcaatgttgccca

SEQ ID NO: 11202 - DNA, 1174 bp, Homo sapiens
catattgtctatcatatatactgccatttaaaaataggtttttaaaatttagctaagtcttaagtaatttgccgttgctaataattttatctccttgagtcggttgttggggagagatgttatattcaataatttttagttattttgtaatgcagagtgtttattcatttcacagttctgcaatggatgtagtattttgggattgccctgtccagaaaattttcagctacacacctttaaaggaaaatgtttctatctcagatgaaacatgtaatttgggatggttcttcctttgtcacttaaaggaagagataggaaaagtctcttacccactttaaacatgagggtaaaggtttaggtcaaacttactggctttgtcattcaagcatatctgaatcctcacttttttctctttgctttttagggtcagaactgagatattaccaagaaaaggcacaatgccataatattatggtgttatggtattttgacttaaaggggaaaaggtacttaattttggtgggatgttgattgtaccttgttaaaaagactctcattttctcatatgttttctcctaataagatggaatatggagtatactgtaataatataagtgttcattataagctatttggattaagaactattgcagagttgtaagcttgttatcaaattaatgcaagacatttaaactatttttttgcaaaactatttatttttaaaacaacttaaagtatatctagggtgagttaaaagtccctgtgcatctatattagatggcaggttttgtcacagagtcactgtgtattaataataaatgttgaaatggcttctccgtgtctccagaagcatttacatgtcctccttgtgagatcatggtgcacagaggtctttggactgccctgaacccgtcttatgtggacataacctattcccttcgttttctcatcatgccatgtgtttaagatctacccgcttagtgtcaagattattgagattttcatctaaatgtttttaaaattgtattttgtgttttagtggaggacagtcttgatactgttctaattcagaaagccaaattttgatgcgcttttgtatattcataatatatactttaatatgccctattctaatctagtttgaaattgttagattctgatagtataatgataa

SEQ ID NO: 11203 - DNA, 1228 bp, Homo sapiens
ggtcggcctggtggtggcagtgaagacccaggaacacaggcacactgcttctcagggtgatgcggtgcctcacgctcggaagcgctgactggttgttggtgtgatttgtgtcacatctgtagccactgtactttaacttccatgaggagagggacaatatttgtgacacatttctctgagctcccagtgctaagtcctaaactgagccctgtgagagctcctgtgtatatttgagaatgaatattaagtgatgagacacacaaaagcccaagtataatctaggttatgaagtaggccatgaaaaaccaatgatagtattctggattttgatgccacacgcagcatttctagtgagttttacagagtcacgattttctgtgaaaatcaggtctgattggcctttttatccttgtcaatctgtgtttattttgcagagttgttccatgatggacgtaactcttttggatgaacatgggaaacccttttggtgtttcagttccccggtgtgcctgagatcgcctgccacaccctctgacagctctagcttcttgggacagacatacaacgtggactacgttgatgcggaaggaagagtgcacgtggagctggtgtggatcagagagaccgaagaataccttattgtcaacctggtcctttatcttagtatcgcaaaaatcaaccattggtttgggactgaatattagcagtaggtggcaaattattgttgttatttagttgtttatttttgactggctttgttcttggtgttgaaaattaaaataaagcaaatctgcagagtgctgtgcaatgcctttcatctcacattagaaattatgatttatgggtcatttttaagttaatgtttgaaggattcagttatattttaaaaacaaaaataacagtgaaacttcatataaaaagaagaaaaggtatttacttctcttccgcccttcgttaaaaatctaagaacttttacttaagcaaatgatcatgtgatcactctgtgtgtgtgtgtgtatgtgtgtgtaggggtgtgttcttacagataacggtttttctttttctttattggtaagaagctcaaatgagaaaatgtacttaaatattaatataaatttcattatattcactagaattagaaagtgctacattcttgacagtcagcagccatatcggtatttaataaagttaaatagaccagtggcctcattcacaaggaaagatatat

SEQ ID NO: 11204 - DNA, 1111 bp, Homo sapiens
catggggttcctagaaccaatttcttgcggagacagagggataactagtaagtagcctaaagttttaatgaaaagcagaagtaacctacttatctgctatagtacaataagaatgttcaaggtctcttttctgggcagaacctttgtcttatttatatattgccagtacctggaaaatcatggatgttcagtgggtgttaggtgaggagaaaaagtctaaagagagtactattgttgaagtgaaaattatactgggcacattctgagaattttgactttggcttttaaggaactagatgctttagagaagatacatgaaattgcctttagcattttttttttttcaatgaggcaaacattgttagtttttttttctttctccagaatatttggtttaggttgggcaattatactgaaagaaaaaggtggaaaagaatatatcatggagcatgttgatctttccataaatgacacatcagttactgttatatggtatggcaaaaaatggccatgcctagcatcattgtcaaccttagatttatgtggcatgacaccagtttttaccgactggtataaaactcccaccaaacataggtaagtaccaatcagcagaactgttgagtgagagcatcttatatgtaaatattagttggcattacttttgtaattaaaaaataagagcagcgttttttaattttatcacatattaaatgtacattctgcattaatgcagaagaggaaaagagtgcattttatcacatttctgattaggtctaaatttaacttcctcgtatcttggggttgtctttaatggtaaagaatgatgttctagttaacaaaatttcctggatgattgatggctaacctttgaggtttttcattttaaccatcttaacagaaagatatatgttatcttccttctttagtaaatggtatactaatcatagtctaaatatgaggaaaccaagtcataattatgagttattttgtctgccttctgttgaacttactagatatgtgatcttgtgcaagtaacttactctttctgtgtctccattctctcctctatgaaatggaatgatcgttatactggcatagtatttagcatata

SEQ ID NO: 11205 - DNA, 1139 bp, Homo sapiens
actgccaccacgcccagctactttttgtattttttggtagaaggtttttactatgttggccaggctggtctcaaacttctgacctcaagtgatccgtctgccttggcctcccaaagtgctgggattacaggcgtgagccactgagcccagccaagtggggcatgagttttctcataaagccagcagggcagagtgattcctagtatagcagggcatgtgttacactcatgtcacttttagcaaatccacgttgccttttcagcaaaattcattacagagttaagaaaaacatgccctggtaattttctgttagaaggagcaaagattttgagtccaccacagtgcacatcatgtcagcatcattgctttttgtgtctttctagttggtggaccaactgggtgatccctgccatctctgcagtggccgtcgccttgatgtatcgcctatacatggcagaggactgaacacctcctcagaagtcagcgcaggaagagcctgctttggacacgggagaaaagaagccattgctaactacttcaactgacagaaaccttcacttgaaaacaatgattttaatatatctctttctttttcttccgacattagaaacaaaacaaaaagaactgtcctttctgcgctcaaatttttcgagtgtgcctttttattcatctactttattttgatgtttccttaatgtgtaatttacttattataagcatgatcttttaaaaatatatttggcttttaaagtatgcaccgtgtttgcctgtttggtgtataattgtctttaatgtttagaatctggttatttagaggattccttcaatgtgttactcatccagacccacagaggccatatgactggaggtgcgggaaataggtttgagtgtctcctttcacatcgtcacatctcattgagtaaccatgtattgtatgcttccgatatagtttctttttttcaaggaaattaagaaaggccagaaattatagtttaaggatttctaataattgtcctacttgaaatagatcttaaaaagaaagtagcggctgggcatcgtggctcacacctgtaagcccagcactttgggaggctgaggtgggtggatcacttgaggtcaggagttcaagaccagcctga

SEQ ID NO: 11206 - DNA, 1373 bp, Homo sapiens
attaaaataagagttgtgacatacagggattgagaaggacttggagcactttaggggagacctgtcgggggaccatctgcccagcatgaatgagccagtcccatgaaacctggggttttggctgcagctctctgctctctgctgtggtgcccttgaggtgggagttgagactcaacatgtagggcagggcttagacactggaccaagttgaggactagctaaaactggaatggggttgaagcagctttccataagacataaccaccagtgtgccatgtcagtttaccattgccacggcaatacccgggagttactgcctttttctatggcaatgacctgacaaccccaaagttactgccttttacctggaaatttctccataaaccacctcttagtccacatgtaattaaaagtaggtataaatatgactgagcagtgacgtgacatgcagcccgcggtctgtacggacgcgccctcgcttcttcctctttctcgactccatcttcgcagtagtggcagctgggaccgcggttcagtcaccaatatgcagctctttgtccgcgcccaggagctacacacccttgaggtgactggccaggaaatggtcgcccagatcaaggctcatgtagcctcactggagggcattgccccggaagatcaagtcgtgctcctggcaggtgcaccgctggaggatgaggccactctgggccagtgcggcgtggaggccttgactgccctggaagtagcaggccgcatgcttggaggtaaagtccatggttccctggcccgtgctggaaaagtgagaggtcagactcctaaggtggccaaacaggagaagaagaagaagaagaggaagaagaagacaggtcaggctacgcggcggatgcagtacaaccggcgctttgtcaatgtcgtgcccacctttagcaagaagaagggacccaatgccaactcttaagtcctttgtaattctagctttctctaataaaaaaaaagccacttagttcagtcaaaaaaaaataataataaaataaataaataagactgcagaactgccttgaactgctaacctctgtctctgcaggaacagtcacgaagctgtcacactgctgcttcagttaagctgtttcctctggcttgcccttgaattctttcctgggcaaagccaagaacctcacaggataagccccactttggggctcacctactctgcatccccctcacaccaggctggcagtcagttcatggcctgggtttggaatccaggtgattgtaggcagcaggtcctaggacctgacccccagtgctcctcccctggcctcgtggccatgttatctctgactttctcagaatgcaggcagaccacactagga

SEQ ID NO: 11207 - DNA, 1198 bp, Homo sapiens
  misc_feature (1)..(121): n is a, c, g, or t
nnnnnnnnnnnnnnnnnnnnnnnnnnnnnnnnnnnnnnnnnnnnnnnnnnnnnnnnnnnnnnnnnnnnnnnnnnnnnnnnnnnnnnnnnnnnnnnnnnnnnnnnnnnnnnnnnnnnnnnnncgggtctgtcctgtggctgcaggtaggatgttgtgggggttgctgtcctctgaaggcttacctcaagctggaggatctgctaccgagacaactcactgccctctggctgtgggcagcagcccccagctcctcactggctctgagtcggaggcctcatttccttcccccatgggcctccccacagctgcttaaatgtccctgctacatggtactggcttgcactggacagagtgaccctaggggagggcatgcaggaagcacagggtctcttagaacttcgtctccagcatgcagcatcctcacttccactattttctgtcccttacaaacagctccgcactcaagaggaggggaattgggctccatcctttaaagggaatgtcaaaagaactcatttaaaccaccgaaggcattttcctgggtagggaaataaacaattttacaaacatgtaaattaggaatgcaaggtagcctggtctcaggactgtgaggacgtgggtttcctggaccccagtgtttatgtgctagtcctcttgtgaggaagacagaccctattacatctacacgtggtgaaattgcctccactgttatctagtgaatggttttttagggtgttgtatactctcttctcgtggatgagtttgtacaacttgcagttgtaaaccttttcatggaagagtgtttttttttccttcataggatcagatacttgattttgtggtctttgttatgaatggatgtttctgctgggaggagactggtgaggagagggtggagtgcagcgccctttagttaccctcagattgtgcacatggggtttcgtgactacaactaatactaagctgcctttatgcatggacttgatggctctattaaatgaggtaataccataagggcaagacacattttcaacaggaagtcagctgacgtgacagatgaagaaagagatgcgagtggccccctagtttctattgcctcttaccttgcgcagccattgcccttgcagctcgcagggggcttgtgggcagccctgcctgtccggccttgccctgcgaggagcagggaatccagttctgc

SEQ ID NO: 11208 - DNA, 1858 bp, Homo sapiens
ttttacagagtaggagctcattgaaatgttttttgaaaggagagcttctctttttgttttttttttaaaagggtagtaaattgaagtatgctggtacagagaattgaaatatgggagtttttctgcaagcttgttgagaaatcactttttctaccaaagataccatagtatttcttctggagtcaacaatagggtgacatggtgttcctaaaatcctacttcatactttttgataaaagactttagacatgtaatcaaattcatctcagtataaagggtgtttcattggggctaacttcatgatactttttcatctagttttagactaatacgtgtgtctttatattcaagatttaataccatgtttgtttacttcacaggttatgagtgccagtgagccgccttagatagaagcatcgtcagcactttattaatgatggatagtgagaataaacccgaaaatgatgaggatgaaaagataaacaaagaagcacaagacttgacaaagctttcatcccataatgaagacggtgggcctgtatctgatgtgatagcaagtttccctgagaattctatgggcaaaagaggtttttcagaatcatcgaactctgatagtgttgttataggagaagacagaaataaacatgcttccaaacgcaggaaattagatgaggcagagccccttaaatctggaaagcaaggtatttgtagattagaaacttctgagagctcagtcacagaagggggtattgcattagatgaaacagggaaggagacctttctgagtgactgcacagttggaggcacatgtctcccaaatgccctctccccttcttgcaattttagcactattgatgttgtttctctgaaaacagacactgaaaaaacatctgctcaggaaatggtttcccttgatctggaaagagaatctcctttccccccgaaagaaattagtgttagttgtaccattgggaatgtagatacagttctcaaatgcagcatctgtgggcatttgttttcttcttgctctgacttggaaaaacatgctgagtctcacatgcagcagcctaaggaacatacctgttgtcactgcagccacaaagcagagagcagctcagcactacatatgcatatcaaacaagcacatgggccacagaaggtcttttcctgtgatctttgtggttttcagtgttcagaagaaaacttgttgaatgcacattatcttggcaaaacacatctccgtcgtcagaatctggctgctcgtggaggatttgtacagatcttaacaaaacaaccttttcctaaaaaatcacgtacaatggcaacaaaaaatgttcactcaaaaccaagaacttctaaatcaatagcaaagaatagtgattcaaaaggattacgaaatgtgggaagcacgtttaaagatttcagaggaagtatttctaaacaaagtggtagtagcagtgagcttcttgttgaaatgatgccttccagaaatactttgtcacaggaagtagagattgttgaagaacatgttacttcccttggtctagctcagaatcctgaaaaccagagtagaaagctagacaccttagtaacctcagagggtctcttagagaaattggaatctacaaaaaatacccttcaggcagcacacggtaacagtgtaacctcgaggccaagacctgagcgaaatattctcgtgttgggtaatagctttcgtcgacgaagcagcactttcaccttgaagggccaggcaaagaaaaggtttaatcttttaggaattaaaagaggtacaagtgaaactcagaggatgtatatgaaacacttgagaacacagatgaaaacacacgatgcagaatca

SEQ ID NO: 11209 - DNA, 1113 bp, Homo sapiens
ctacaaataggacagatttggaaatccatgtgaaaaggtgccatgccagagagatgaaattttactgccgtacttgtgacttctctagtatgtcaagaagggacttagatgaacatttgcacagtaaccagcatcagcaaactgcttctgtcctgagttgtcagtgttgttcatttatatccttggatgaaataaatcttagagaccacatgaaggaaaagcacaatatgcattttctttgcaccccttgtaatctgttctttttgtctgaaaaagatgtggaagaacacaaagccaccgagaagcatattaattcattggttcaaccaaagactttgcaatcatctaacagtgatttggttttacagactttacctttgagtactttagaatcagaaaacgcaaaagagtctatggatgactcaggaaaagcatctcaggaagaacctctgaagtccagggtaagccatggtaatgaagtgaggcattccagtaagcctcagtttcagtgtaagaagtgtttttataaaacaagatcttctactgttctcacgagacatataaagcttcggcatggtcaagactatcattttctttgtaaagcttgtaatctttattcattgagcaaagaaggaatggagaaacacattaaaagaagcaagcatcttgaaaatgctaagaaaaataatattggcttaagctttgaagaatgtattgaaagggtatgtataggtgcaaatgataaaaaagaagagtttgatgtttccggaaatggaaggattgaaggccatataggtgtgcaattacaagagcattcctatcttgagaagggcatgctggcgtctgaggaactgtcacagtctggtggtagcaccaaagatgatgaattagcttcaaccactactccaaagagagggagacctaaaggtaacatctcacggacgtgttcacactgtggccttttggcctctagtattacaaacttgactgttcacattagacgaaaacacagtcaccagtatagttatttatgcaaagtgtgtaagtattacactgtaactaagggagatatggaacgtcattgtgccaccaagaaacataaaggacgggtag

SEQ ID NO: 11210 - DNA, 1190 bp, Homo sapiens
aacatcattatgcctgaagaagagcatcaacaaaattctgaggaatttcaaataatttcaggtcaaccatctgatactcttaaatctagaaatgctgcagattgctctattttaaatgagaatactaatttagatatgtctaaagtgctctgcgctgctgactctgtagaagttgagactgaagaagaatctaatttcaatgaagaccattccttttgtgagactttccaacaggctcctgtcaaggataaagttaggaaacctgaggagatgatgtcacttactatgtcctcaaactatggctccccaagcagatttcaaaatgaaaattcaggaagctctgccttaaattgtgagacagcaaagaaaaaccatgagatatcgaatgatgcaggtgagctgcgtgtccattgtgagggtgaaggaggaaacgcaggagacggtggaggtgttgtcccccacagacacctgtgccctgtgacgctcgatggggagcgctcggctgaaagccctgtgctcgttgtgacaagaataaccagagaacagggaaatctggagagcgggggtcagaacagagttgcacgtgggcatggtttggaagacttgaaaggtgtccaagaagatcccgttctggggaataaggaaattctgatgaattcacaacatgaaacagaatttattttggaggaggatggcccagcttctgatagcacagttgaaagtagtgatgtctatgaaactataattagtattgatgataaagggcaggccatgtacagttttggtcgatttgactcctccataataagaataaagaaccctgaagatggtgagttgatagaccagtctgaagagggcttgatagcaacgggagtgagaattagtgagctgcccttgaaagactgtgctcaaggtgtgaaaaagaagaaatctgagggcagttccattggtgagtctacacgaattcgctgtgatgattgtggcttcttagcagatggactgagtggactgaatgttcacatagccatgaagcatcctacaaaagagaagcacttccattgtttactctgtggaaagtcgttctataccgaaagcaaccttcaccagcatctggctagtgccggccacatgagaaatgagcaggccagtgtggaggagcttccggagggaggggccacctttaaatgtgt

SEQ ID NO: 11211 - DNA, 1162 bp, Homo sapiens
tcaggattgcaggcagatacttatggctcctctgcggggtggagagccttctcttcaagcttctctcttggttgggttcctcagctcttaggaagcaatgtcaccggtactcctgcatcagttacatcatcaaatgcgacatcaaatatctggattccatgtatttgtcagataatttactttgatgtcacgattccttctttcttctattcatttcttaatgtcctttcagttttagctttcagttatttccattgctagagaactgcttttcttcattgacttgtttcgttttcttcctttcgtaaattgactccgctcatttagcacacagctatgacaatgacttaaatttaagactgttttaagaagtaacctcataaaagttacatgtttattgtgaaggtagtatttaggatgctgttcatggaaatacatctttcttttaagactcagaagaattatttctctctggtctttattccagagaaagttgtacttgtctctaacacttcgttagcctttgatactagcaaatcatgtatatgattgagttttcctctttatgtttactgttgggaagctcatggccaaaattgtgatccatctctagtcagcaggatagccttaaaggcatgcattttatttactactgttatttccagttttatttattttttccttatggggaagtcccattttatgtccgcaatatattttaaaaacctcccataaatcaaagctcatgtaattcaagggcagttttgcaatagaaattgtttttgagtaaaaccaatatttttctggaagtgcatatatctttagccatttggttttgggggcgttgtattgagcattgtgcatccctgtgattaggcatattttaattgtgcttgctctgttgtaggaaactgctgtgcacttctgtgtagtggtccagtggtgctttttacttctcagacttatttatttaaaaacacgcttgcttctaaagtttgctgaacagacccagttaacaagtactcccaaggaaaggaaagggaaggattcctttccttttataccaggagtccttgctctctagctgtataaaaaatactgtttcttttagtacatcttggttatcttgaaaaaaaaaaaaaaacaccaccacagtttacta

SEQ ID NO: 11212 - DNA, 1114 bp, Homo sapiens
ataacgattgaataattgtgcccaaagggtatcttctttgaattcttaggatgtttgtactgctatatatatttagttatttcattgacttttatattcgtgttatattcaataccctttcatgtttttcatttaaaaaatatttttatttcattatttccttactgtaaatggtaatgattttgtgaatatggatatttaactatgaatctgtaaattaaatcctactcttgaggataaattgaagtttttaattctgaatttatgactttcaagtcacatagagttacagattaattcagtgttttcataggtgcttagtgagaatagaatatctttccatgatttaaagattaatatttcattagatattaattgtgaatagtattttctttgatacccactggataagacttagaactttaggaattttctttaaaagttctctaaaattgtttaaatttgttattaaaatcttcattttggttttatccaatacataattcctttgttaactacaaataatggatggaaacattgttggttattttaagcagtgaggaaacctaggtcctagagcagagtattttatgaccggtaactttacagaacacacgccagagctctcactcaggaaagctggctgcacgttggatcgagtgtggcacacacagttccctgggtctacagatgctgtaagtagccagatatgtctgggagcagccaaatgtttttctgagaattttaacaacagtgataggagagaaataaaaaaaaattaaatcatacatttatgaaaccctgatgttaaccttatagaataaatgtataattgcagttctgctgtttttactataaagctgtagctatctttttgttttgtttgccgaagtaccaagatataaaatgcatttatgtagtactgtatcgaagttatttattactttaatacatgatagtgggtccacataatttgtcaaattttaattggttttgtcacttgtcagagtcaaatctcccaaattgtcaaataaatttattttagaatcatacatcctaaaatttgataattctgaagtttttcttcttcagctttgcttccctttttgccaac

SEQ ID NO: 11213 - DNA, 1184 bp, Homo sapiens
tgtttttccacgctggagatgttggcttcaagcacgcagaaggagctgcagcatcataatggcatcccagagcagcgagccgaactcaaaatcctctccccaaaagcaaatcctcagacaccccagtaactacctttttattccatccaagctgtgaactttcaatgcattcggctctgagaagggagtaaaatatctttgtgctcacgaacgcaaacgggcagaaagtgaggactttgtagatgggcacgaggctgcattttaatgtcactgtgccttctacgcaaagctgcttattgccctgttgaaaacagacccaaaaaagaatgattttaggcacactgtttggttaactactgttactgtattgaaatctgacactgtcttttttaaaggtaccgtaatacaaatactacattgagcatccatgccccattaaggctttgtgcgattttggacacataacagtgactaagcagtgaaggatgcaacctgtaccacgtgcctgtttcccaaacgctgtatccatttggccatttgcatttggtgagctttacagttcatatttactagaaagagctcaaaactggaggtcgatgtacccagtacattcttggtcatagcccagttagggtttaaagttatagaagagattcacattcgtttaaatgacacttgaacttctacatagctcaacattaattcatcatggttgaaatggaagaatcttcagtgggtgaatctttttcaatctgattgaggctgttacattttataggtgctatttttcaaagcagtactgacagcactcgaagttattaaattgctgaatcaaaagatggacccgcgctcgcatttatgaactgtgatggactcgctgggcctgtgcgtgtgcggaggtgaggacattggtgttgctaggcttcgtcacaccccacaccgacagcagtatttacccatttagtttacattaatggtctggaagtggcttaacccacctctggattaaaatacattcagtaagtagttcagaatagcataattatcagtgctgcaagggatccaaaggataattctatacccaagagatttcctgtccagttacaaagtaaagaacaattgcttggactcaagcatgcaccatttcttcctgagactactgaagaagaggatgtttgttcttt

SEQ ID NO: 11214 - DNA, 1168 bp, Homo sapiens
acacacaaaaaaacctcaaaaatgtctttttactattgacctttagtgggttaactcttggagccccataaacccttcccataacacacagcccgcatctctacttgcttgctaatgtcatcagctaaactcttccgcaaaataactaaaacaggaatgaactcatttctttcctccaaagctttctgagagctaccagaagaaatgactcttacgcaatataaaataatgttgtcatccaaaagcataatcttcagacaagtatatagagacaatatatgtaaaaccatgctccttatcttggctaaagtaaactaatccagtaagatagaagatcaaggattttagcttaactttctttttggttgaagtacttgtatttaaatgctaactgacgtctttccttgttgggtctcagtctgttactaaagtaaaactttaggaagtaagtataatatattggacgggggaaggctaacgtgaggcagttccggggtattttctcagcctcaaaggacttccattttgagcttacagaaaaccagaaatgagaccttaggcctcaaggtgaaagttgaatttctatttcctagaggtaaatgatagttggtttgctctttcttttagaccttgaggatattatattccttctccatgtgaacattctggacctttctttatttttctttttaagcattagacttaacacgacttaaatcttagaaaatatgtcaatgcatttcggtgcctgggcacacaattaatcttcatctatctctggtaatataaacacacctgtgggatgttttccattgaatacatgaaaagaaaactcataataaatctcagactgatagctttatcatgactgacagtgctgctggaggctccttctttatgagtataatttgggagtatataaaagcaggagattgatttctacagaaacttgccttttctttagtatttattccaagctgtgtgactcttcctcttttttaataaaaaagccccacaacatgcagttcctatatttaatttatataacggaatgtacacatgcacacactcacactcacacacatgcattattatttaatgcctggaagacacaaaatgctgaatgagaagtgtgtatgtgatttcctcctgcacttctcaggcaaga

SEQ ID NO: 11215 - DNA, 1056 bp, Homo sapiens
ggcctggtgacctccacaggatgagtgactttgttcataaagggtggggatcaccagccccttgggtgggggacggcttcatatacctcttcctcagtaatgcaaatgcgagtttttgtggtgggggttaaggcccataacaaaggatcttaaaccatgcagtgtacgcaattgaaatggtattccacagatataaatattttcttttcccattgccgtgacactatgtgtgatggtaatatttctgagagtttcagatttttgcacatatgattttatgcattatcaaaagttactgctgccttgaatgaaaatgttctgtgaaattttttgcaaaagctttactaggtttttttttaattgtgaaattttgtaaaggcaggaaatggattaaaacgagcatgctaaatatatttttcaaaaaagcaataattttacatgtacagaaattatcctaacctttaatactggcgagagcaacagtttacttaatacggtaatggactagtgcagtttttgtagacagtgggcttctgatacaaagtcttgtttaaacacagacacacacacacacaaacacacacacacaccctaaagtgtgggtttcctgttctaatgatttgttgaatattattatattattattattattattattattattgttattgttattagtaatgtttggttctggattctacttgttactgagtttaaattacttgacggttcaggttactttgcaacactttcaaacgatgcaatgtaactggctagcttatatatatatatatatatatatatatatatatttttttttttttttacttatttttttctgatattcttacaccagatatgtacgaaaatgatctgtcctgttggtgtaattaggaatgtccatgcagatacagttaaacaactgtaattgactgttctgtaaagttattttgggcaaagttgcggagacacattcctctgtccacctaagaaatcagaagactcttctgttgatttatgtttaatcatttcagtagtttccccacagtgatcatt

SEQ ID NO: 11216 - DNA, 1164 bp, Homo sapiens
ctctgtgggcgcccggccctgacgggtatcgacagaccaaaccttgtcacggccaggagccacatggcgcggccacacaggggcccctggccaagcccaggcaggaggctagctccaaaccggtgcctgccccgggtggcgggggcttcagcaggagcgccacccctacgcccaccgtcatcgcccgggctggcgcgcagccctcggccaatagcaagcctgtggagaagtttggggtccccccagcgggggctggctttgcccccacaaataagcacagtgccccggactccctgaaagccaaattcagtgctcagcctcagggtccacctcctgcaaagggcgaagggggcgctcctcctctacctccccgcgagcccccctcgaaggcagcccaggagctgaggactctggccacctgtgctgcggggtccaggggcgacgcggccttgcaggcccagcccggcgtggctggggcgcccccccgtcctacactccatcaaacaggagccggtggccgaggggcatgagaagcgcctggacatcctcaacatctttaagacgtacattccaaaggactttgcgaccctctaccagggatggggtgtcagcggccctgggttggagcacagaggtaagatgtgcgggccctctcttccccaggccacatgtgacccccagaaccacccccggagggccagggctgctgcgcacctgcctgtccatgtccctgaggacagagccagccggccccatcccactgctgagctgagagctgctcccttgccctggccgaggagcacagcagatgggaacagctctcccaggctccacattctgccctgccggggaatgcctgcctggggttggtggccctctgcacgttggccctgggaggaggtcgcaagccctgcacggcttccttcctgctgagaggacgtttcctccacaccgacattccgcaggagcaggccgacgtgattgcacttcacgtgtttgtcattttaaacagaatccgtagatgttcattgtcctgtctctcaaaagacaagaatattcatttaatgtattaagttttatttttattcatctgtaattaaaaaaacacctaattagtcctctaatattagtaagcaaagctttgcagaggatcgatgtaccata

SEQ ID NO: 11217 - DNA, 1437 bp, Homo sapiens
ggggcctcgcaggccgacagcggcagagtcctgctgcggagcagcaagaagggggcagaggggtccgcatgcgccccgggggaggccaaggcagcggtccagtgctccttctgcaagagccagttcgagcgtaagaaggacctggagctgcacgtgcaccaggcgcacaagccgttcaagtgcaggctgtgcagctacgcgacgctgcgggaggagtcgctgctgagccacatcgagagggaccacatcaccgcgcaggggcccggcagcggcgaggcctgcgtggagaacggcaagcccgagctgagccccggggagttcccgtgcgaggtgtgtggccaggccttcagccagacctggttcctgaaggcgcacatgaagaagcaccggggctccttcgaccacggctgccacatctgcggccgtaggttcaaggagccctggttcctcaagaaccacatgaaggcgcacggccccaagacgggcagcaagaacaggcccaagagtgagctggaccccatcgccaccatcaacaacgtggtccaggaggaggtgatcgtcgccggcctgagcctctacgaggtctgcgccaagtgcgggaacctgtttacaaacctggacagcttgaacgcccacaatgccatccaccgcagagtcgaggccagccgcacgcgcgccccggccgaggagggggcggaggggccctcggacaccaagcagttcttcctccagtgcctgaacctgaggccgtcggcggccggcgactcgtgccctggcacgcaggccggacggcgggtggctgagctggacccggtcaacagctaccaggcctggcagctggccacgcggggtaaggtggccgagccggccgagtacctcaagtacggggcctgggacgaggcgctggccggggacgtggccttcgacaaggacaggcgcgagtacgtcctggtgagccaggagaagcgcaagcgtgagcaggatgcaccagccgcgcaggggcccccgcggaagcgcgcgagcgggcctggggaccccgcgcccgccggccacctcgatccccgctcggccgcgcgccccaaccgcagggccgcagccaccaccggccagggcaagtcctccgagtgcttcgagtgcggcaagatcttccgcacctatcatcagatggtgctgcactcacgcgtgcatcgccgcgcgcgccgcgagagggacagtgacggggacagggcggcgcgggcccgctgcggatcactcagtgagggtgactcggcctcccagcccagcagccctggctccgcctgtgccgctgctgactccccgggctctggcctggccgacgaggctgccgaagacagtggtgaggagggcgcccctgaacctgcaccaggtgagcaagtgtacccaggtggcctgggtcctgggatcccaggctcaggg

SEQ ID NO: 11218 - DNA, 1181 bp, Homo sapiens
agggtgtcgttctacagccgatacctgaaagttaaacccagtgtaactcaaaagccttaaaatagggattcccaagactatttagagacaaccaaagttgtgtgaggtaagatttctgaaagtcaaataaattttaattccctttaatttagaaatgtaaatgcttatattattttgggtgggagcaagatgtcatatcatcagaaaggacgttacagcctcaaagggttggaagcctcacttataagtgatgacttggaattgtagattcttatttcttggagtggaattagaattctataggtaaagcttttgactgattttggtaggcagagttgggccatcgttaccttctaaccttttagttttgttctgtcttagcaagccttagaaaacagtgggctgtcttcaattccagctgcagcacatcctaatgactcctgccatgccaagacctctgcaccacacgctcaaaacccagatgtttccagcgtttcaaatgagcagacggaccccacagacgcagagcaagaaaaagaacaggaaagcccggagaaactggataaaaaagaaaaaaaaatgataaagaagaagtcaccgtttctacctggtaattttcctaaactttaaagtttggacatttgggatagcatattgctggtttttaagaaatgtgcccttcttttttcctctgaaggtgataggatatgtttgttgaatgttttgtagctagctgtagttggttggtatttaaaattaaaaagaatgacagccataaaatgcctgaaacttatcacttttctttaacctggcttctttcctgtattcagtttctcctgactcctcgccagggcttgaaagcttcttgtctctgtctgttctcttgaaagcttgttgtctccgactgttctctctctgccctgcttaggcgcctcctctccactcagatccatggctttgcttcagttcttctcacccttggtgcttctggcatccagccatgtgattttagtagcctctgactagtcctttcctcttcatcatcaaaggacccctgcagcacagctccctcctccacacctcaccatttcccattacacaccaagatccatttcttggctcctgagtatcctgtcacctgtcccctgcatttccatccgccctccctctgtgcttctagg

SEQ ID NO: 11219 - DNA, 1494 bp, Homo sapiens
ttgtgaagagcaaagcacttggaatctccgttttaaagcttcaagtgttaaaaatgctacaatagttttttatctataaaattatctaaagaatcattgtctttcagagactcataggaaaaaaaaactaggaaaagtgtcaccgcattgttctcttttgtctacaaatcactgaactcaggtactactgtaggcagtttcctcctcagtctcctccgtggctagtgtgtctagttcacgaagcaattaactgggtcttactatcattgtagtgtgatttctttgtattagcaaagacaaaaacgctaacattgaaaaagtatgtcagattttccttcatgtttctggttataagaagcatagcttacaaagcaagcgtaagattgaggcatgaagttcagaaaaaaaagtgttacaacacacagggaagttttttccactcttttctctgtgcattttgaaaattagtcaaaatggactcttttcagtctaccataagttaatataactgataccttgagagatggctggaccaattctctccatgacaaatgtttaatcattagttacaagaatgcagtatctggggcgtcaacatggggactcgagtaaacctgacccaccaataaggattcagctgtccacacgggctggcgacacacttaccgcatcaatctgtgttcaggtccagggttacataattgcagaagcacaagccatacatcgcaggtaggaaaccacagaaccgtctgcaaggagcaagcaacggtggccctgtccaccccagcaaataagaagcatatctgtagcttaaggccacgaatccgtaaaaaccccatgactttctcttcgtgcataaacagatgtatttttgatttcagggaattctttagtatcgtcaatggtgccacataaaacatgtcccaaaccaaatcccacccgtgctgggcagagtgcgtgcacgccattcctacagcattccaaagatggaaggttctttacttcatgttaatttttcctttgaaattatttatatgttctatatataaatacatatgtacatagatatatgggcctctgtgtggctgaacagtatattttgtaaatataagtactagtcctaattgcagaaagagcgtcagtttcacctccccacgagcacttcagatcagtattgtattcattttattcataaatggatatctttttcattgtcatataaagctgggttttatttttttttcctgaaaaataattgcctttattttctctcgttgcctccttggtttcagaagagagtagttttattataaatattgtatggactttgtatattaagagaggagctcatttcagattcctaaagaaatagacattttactgttattttgaaagggcatcttttgatttttttgttgttgttgttcacttttggcatatgtatataagtaatattgacggtgatatgaaaacttttgttatgtgaagatattt

SEQ ID NO: 11220 - DNA, 1201 bp, Homo sapiens
ggcaccgaaggcaggctggagaagcgcggggcggaagcaagaagccgcgcggcgaggagggcgcgtggggccccacacagccatggggcgcgcgtactactggcagcgcaggctctggaccgctaaggaggccgcgcgcgcccacgcgtgtccccggcagagcttccaggagacggctgcgaggcccttccacccgcggaccagagcgcgccgggtcgaaccacgacccacgtgcaggccctcgcgcgctaccggaaggccagcctgtggcgcacgcgcgccccgccccgccgatcggtgacgtcatcgggcccgtcacgaggcgggggcggggcctcggaacgcgacgccccccgtcccagctttagccactcgtgacgtcattgcccggactccactgcctcctgcgccgcgcttttgccaccctgggcacgtcatcgtgcgccgacgccaaacgagggcggggcctagggacgccacaccttccgcgccgccgctcgttacgtcatcggacctcgccgcttggcggaggcggggaaggcccgcaggcggcgcctcagccggggttggcgctgaggggagagggcggggaaaaggtggcgaattgaggggaaagtgggaggggcgggaaaggggcggtcggaacatggcggaccagatcccgctttacccggtgcgtagcgcagcggcggccgcagccaaccgcaaacgcgcggcctactacagcgccgcggggcccaggccgggagccgaccggcacagcaggtaaccgaggcggcactggccccgttccccgccgacgctccccggggcccccagcccaccgcaggaacccggagccgggcgggtctggggtcgctaccggcgcgccccatctgttcgctgggagccgggagtccttggcgttctgagcgcgccgcagctgtggcgtccgccggtggtgagggccgcgggcagctgccggggcgagcggctgcatccccgggacgcctgggccgagcgtaggagccagaacgggagcagagaaccgcggtccagtgttgaggggtggctgctctcctaaagtaaacggggatcaaaagtgctaacttctcggatacttcagagtctccgaaacttgttcttgtagccctgtgaattgtgaaggtgacggatgtaacttttaattgctttgttaaaaacacacttcttattgaaatga

SEQ ID NO: 11221 - DNA, 1162 bp, Homo sapiens
acagacagctacatactgtcgaaagtcacttctagaatgttggttgatgacttaaagttgtgtaacatagagtgtttagatgttgcttggagtgaacattctttgctatagtcatgtttcagaagattggttttttctgactggattaagtgcagtgaggagctgttgagcagcattggttgtgctgtcaggctgcccatccgcaccacagatgcctccaggattatgctcacagcacggttaacagagacttcttcagctagcacaggtctcgttgggcagcttttttaccttagctaacttattcctttgcaaaagaaagcagcctctgcagtcttatttataatgctttccctcagctgaagacagcctaatttgaggaaatattgtccctaaatgaaacacactgtaaagaagactgcttggcctatctcagcactccatttttaccctaactaggtaccagctggaggatgagtctgcgcatttggatgaaatgccactaatgatgtctgaagaaggctttgagaatgaggaaagtgattaccacaccttaccacgagccaggataatgcaaaggaaaagaggactggagtggtttgtctgtgatggctggaagttcctctgtaccaggtttgttatccattgctacctaatttccttatatgctaaggttacttataaggttagcttctaatatacttattagctatattaatataaaaactcaaggagatattccttaaatgatatcatggagattatcagtacattaatcaaagccaaacaatgctaatatgaaaggaaaggaaagccaaattattatcttacgagaagttttaatggttaaaagctggaggccgggtgtggtggctcatgcctgtaatcctagcacttcgggaggctaaggcgggcagatcactttgagctcaggagtttgagaccagcctggacaacatggtgaaaccccatttctactaaaaatacaaaaattagctgggcgagattgtgagctcctgtaatcccagctactagggaggctgaggcaggagaatcacttgaacctgggaggtggaggttacagtgagccgagatcgagccactgcactccatcctgggcaatggagtaagactctgtctcaaaaaaaaaaaaaaaagctag

SEQ ID NO: 11222 - DNA, 1100 bp, Homo sapiens
agaggctgcgtgtgcagtggctcacgtctataatcagaacactttaggaggccaagacagaaggatcgcttgagaccaggctgggcaatgtagggagtcactgcctctacaaaaaacaaaaaaattagctgggtgtgttgtcgtgcgcctgtagtcccagctattcgggaagctgaggcaggtggatcacttgagcccaggaggtggaggctgcagtgagctgtgataatgccactgcactccagcctgggcaacagagtgagacccagtctccaaaaaaaaacacacaaaaatgttataaaggtaccttgacatgctagggagaaaatatcttgttcttcctattaaaatgaaaatagtagcaagtaacaatcttaacgctactttgtattatacagttgggcatcccagctgcttcagcccatgaatgtgcagcatgcctgcatggtaggaaagctgggtgttcccgcaggcctcctgcattaatgtgtttgctgttgtcccctttatcctaggaaccctcacccagaatgaaatgatatttaagcggctgcacctgggcaccgtgtcctatggcgccgacacgatggatgagatccagagccatgtcagggactcctactcacaggtaagtgggttcctcctgcacggggtctgcttccacacacatcccgcgccatgagtccagctgagcctcgtgtgttcccatctgtaaattagcacgcttcttggtggtcttaacatcctgctacttcagtcgtctgttcgaatatacgaatcaggaaatcgtctttgatgagcatttgtacatgagtgaaatcgtagaaggcatagtgtgctgaagtcatttattcatatcacattttactagtgagttatttgtaaaaaattattcagtaaacattgtagttgaagaatgttcagtaggatactacatcaatatgttttctaacagttctgtttttctctataataaaatgttctcatatttttaaaggtaaattctttttttgccttttcggtagataaaagtagacaccatcgtgttgggaatctcgtatctgtcattcacctacctgtcatcagtgcccaggtggtga

SEQ ID NO: 11223 - DNA, 1163 bp, Homo sapiens
agaaatgatgctcagtctggtcattggagccctggagacagatggtgagtgtctgtgctgtgcagaggcagatgtctcactgcaaggcgggagtcctgtgaccaaacagcacctggcacattgtcagatagtagaaggtctaagcctgccgtgggaagaggatgcatctgcatgtacctcagtacagaggtacaggagatgacttcctctgacccactcagtgagttgtaaggagaaaaggcagcatcgagcatttttgattagtgtctcagggcaagtggctgtgaggcaagcgtggggtcagggttccggtttggttctgcaaaccaggtggtttggtttgcgggtcctggtgaagagaggagggaggttttggtttctggggccctacttcacctggggacatggtgcggcagcaggaggtggcctccagcagcatgccagagccctggcttgggtgggaggggcgtctgcagctgtcgttttcatctcctggatgttgtttgtcttgaaaacccatgtaagctaaaaagtgacctgtggaggggcggggtctcaggtttccctgactccagacttctcagcctgccgagcgtactggaagacaacgctctctgctgagcagaacgcacacatggaggctgtcctgcagagaagtgccgcgcacatgaggtgatgacctttgctttctgaatgtacttgctttttgctcataccctaaatttctcagctgtttcacttgtaggtggacttgaacttttcattgagtatttttgcttttaaagaaaattttggaggcattttcttgaagttcatagtataatttgcatttttgtataagctataatgtaggttagcatttattaaagtgtgccaggatcactagggatctggagatcctgtcagggagttcattagggtaagacgttatttcacctctcctgctgtgttgacatttgcactgagggtacagaaaccatgagggaagactgctggtgccatgctgccagccagtgctgtaggggcgccatgccacatgcctagagtaaaagacaatgttacttttacttaagaatatcccagatgaggctggacatggtgcctctcacctgtaatccccgcaactcgggatgccgaggcgggaggatcacttgaggccagga

SEQ ID NO: 11224 - DNA, 1156 bp, Homo sapiens
tgcactcctgacctcgtgatccgcccgcctcagcctcgcacagtgctgggattacagatgtgagccaccgtgcccggcgcaaatgcatttattgcatacaggacggtgcacctggactgtgctggccgaatgcttctgacactggagaaggcggaaaccaaagcccaccttccttcactcctgtctccagttaccctcagatagacgtttgggagggttctcaggcgagtagatgtaggaagtgtgatgtgctgttgtgttgtggcgacgacactgtggactaggggcatggtttgtgcttggtgtgaagcctcttcttccttcccagggaccctgatgccccacaaccctgcggcaccacagagccgaccacaagctccagtctgtgtgggatcgatcatgaggcgctcaacaagcagattatggagtacaaaaggaggaaagataaagggctcgggggcctggtgtggcaggggcaggtggctgagctgacaacgcagatgaaaaagggaaggaagagggccaagccccgcctggagcaggacagctccctcaagagttacctgtcaggcgaggaggttgaagatgacctggacctggttggtgccccggagtacgaatgctatgccccggacacagaggagttggaggcagagagaggaggtggcagaacagaggatggccacagctgcggagcaagcagggagtagatggagaggctctgcccatcccacatttgcagggaaaagcattggcacgcaacgcagcatgtggcttcattgaggcagttgatggagttaaaccatctgctcttctgctacttcaacattttctagcttttccgtgtatctaaacacaatttgctacacaagtcactgtttttttttccatgcactgtgtgtaatttaaaaattaaatggccatcttatcacagattctcacaaaaagaaaatggtaaaatagtgtctctgagatgctggcatggccacctccacctgcagagccctgccaggtgccagtgagtgcttggcccgaggggtcaggccacagcagtggccggggtaagaactgaacctgcaaacctggggagaacagagggtccccagagcctcccaaccccctggagctgggctccgtccctggggctgctgggctg

SEQ ID NO: 11225 - DNA, 1170 bp, Homo sapiens
atactattttgtgacatgtggaaagtatatgaaattcaaattggtgtttgtaaataaagttttattggaacataaattacaaattattttggggacttttgtacaacaatggcagtgctgagtagttgccacagagactgtactgtatggcccacagtcctaacataatcactctctggcccttcacagaaaaagtttgccaacccctgggttagaaaacattaagtcaggttaaatgcctagcacattagaagaaaagggatcaagtcctcagggactgtggaaggttagcatctgacagtttattcaattatgcttaaggctttcttttcttttaacagagatatcgaacaaagccatactgttgtggcctctgtaaatactctacaaaggtgcttacttcattcaagaatcatttacatcgttaccatgaagatgaaattgaccaagagctggtgatcccttgcccaaactgtgtatttgcatctcagcccaaagttgtgggaaggcacttcagaatgttccatgcacctgtccggaaagtccagaactacacagtgaatattttaggtgaaactaaatcatctaggagcgatgtgataagtttcacatgtctaaaatgtaacttttcaaacactttgtactacagcatgaagaagcatgtgctggtagcccattttcactacttaattaactcctactttggcctaagaactgaggaaatgggtgagcaaccgaaaactaacgatactgtttctatagagaagatcccaccacctgacaaatattactgtaaaaagtgcaacgccaatgccagcagccaggatgcgttaatgtatcacattttgacatcagacatacacagagatttggagaataagcttagatctgtgatttcagaacatattaagaggactggactcttgaagcaaacgcacattgctccaaaaccagcagcacatttggctgcaccagcaaatggcagtgctccaagcgctccagcgcagcctccttgcttccatcttgctttgccacagaacagtccaagcccagccgcaggacagccagtgactgtggcccagggtgcccctggaagcctcactcattccccccctgctgctggccaatcccacatgactctggtctccagccctctgcctgtgggccaga

SEQ ID NO: 11226 - DNA, 1100 bp, Homo sapiens
gtttgatttgtaacagaacagttgttttcaggtttttttctctgtcatgtaaatgaaatcttttgatatttcatgcacgccttgttttcccactagtgtcagtatcgtatgataagaaactgaaatctataaataatttgctttttcattaaggacatttcagcctttttcagaatacttgatttaactgcgagtggaagcatcgatctccttcagctttccctgtagcagcagatggtacagtgagtgttcagagacgtgggtacaaaccctgtgatgtatgtataaggctccctgaggatgcactgcattaacttacgctgacttctttgtaagatctttgcttatagattataatttagatctgtatttttttaggtttatcctaatagctgtttttttttttaaccataactcatagaaaatcaaatgtttttatttgttaaaagtagactgaatttgacatctggtatgctggtatgtagctcatacatcaagagttattttacaaataaatttattctgtagatgcagaaatatttttcagtgtagattttcccttttgatatgctaagtcatttctccgttcagaggtaaaacaataaatttttagtgcctttagaataaacattgaaagaatacaccccaaaactcttctcctaacttaactactcataaactagtgaaagggaaggtctatgatactcaggaataagattattgcccctgagtgtgaaaactaacttaaatttcagcatagggtttcaggggacatggcgaagtttacagactgagatctcagtctccatggttggtacagtaagtctttcaccacattttctgaaggtcatgtttagtggagaaacgggcttttctctagctggtttaggctggaagctgtgtccgggtcgatgggatggcatattgttaaagaatctccattgtcgtcactgtcctgtggatgttaaacctcgtttttttccccacacgatattaaaacttaaagcaccagaaccagtcatggagaccagccagtttagatggtaagtcatatttctggtggtacacagcagaggaaccccttcactctatctttaggt

SEQ ID NO: 11227 - DNA, 3119 bp, Homo sapiens
gcctcccaaagtgctgggattacaggcgtgagcctccgcgcccggccaccaccgcgcccagctggctacgtttttagaaaagaatttccagtttgtgctggggctgctacaagagctcgatgccctggtccctgctcagggacgtgggtgggtgccttgtctgtccccacaccctggtcccagcctcgtgtgtctctgggcaggaacatcgccaggcggggcctctgggttcccagcgccttagcccagggcccgccagctgccagcgaagggtgccttcccgaagggggtgccttcccgaaggggcctcctcagcaggcgctgggctcttcccttcccggaggcgtggccagaagttccccttgggcctccggtcctcggggcgtaagggccacggtgtatttttgggatgaaaaccagtccttcccggggaggagccgcaggttcctgggggtcaggcaggcagcgcgggccgtgctcctccactctgctgaccgcgtctcgccgggccttgcagccggcacagtcttcactaccgtagaagaccttggctccaagatactcctcacctgctccttgaatgacagcgccacagaggtcacagggcaccgctggctgaaggggggcgtggtgctgaaggaggacgcgctgcccggccagaaaacggagttcaagtgagtgcctgaccacgccatgccgccacctgccccttctcacggctctcttgccgccagcggcctgtggtccgtgagaacaaaagaccggtcggcaggcttgatccaggcggaagttagggaccagctccgcgcagacccccagagggaaaccccagggaggggtctgaggggcgtccttgtgaggcagggggctccagcagccctggcaggagtccccattgcttgctcctcactaggtcccgggcacgaaagggcgccacactgccaggtcccgggcacgtgtgcgggcctcccaggctctgtgctcctggcacaagagggcaccacactgaggcatgccctgctcggaccccagacgctgtcatggccggagctttgtcataactggggctgggacggccctgggagcacagagccttttgttttcaggctgactgggaagacggtcacagggtgtggggtgcagagcagggaccagaggtgtggggttcatcagtcggggagaagggggtctgttggttctctcacctgtggggtcttgccagcctggctctgtccttggggccgcacggggaccccaggagttcttttgaggttcagacttgactgggacagttttgctttttcactgtgccgtggttgggcccctggagaaccctgggtccttggaggcgtcctgcagagctggtacgcggctcacctgcctgctgtggttgcagggtggactccgacgaccagtggggagagtactcctgcgtcttcctccccgagcccatgggcacggccaacatccagctccacggtgagtcctgcagccaggggtaccgggcaccaccgactgtcgggagaagttgttggcctgaggcacccggcacatcccagagccctggccccctgctccctggaggggaacagccctcctgcgggaggccggggatgggggcgggcctgcggttccaggctcctctctctcaccctcctgtcagggcctcccagagtgaaggctgtgaagtcgtcagaacacatcaacgagggggagacggccatgctggtctgcaagtcagagtccgtgccacctgtcactgactgggcctggtacaagatcactgactctgaggacaaggtgagaagccaaggaggctgggggtcctggacccagccctcaggactgggtgagaggcctagactgggggtcccggacccagccctcaggactgggtgaggggcctagactgggggtcccggacccagccctcaggactgggtgaggggcctagactgggggtcccggacccagccctccggactgggtgaggggcctagactgggggtcccggacccagccctccggactgggtgaggggcctagactgggggtcccggacccagccctctggactgcagccctccagactgggtgaggggcctagactgggggtcccggacccagccctcaggactgggtgaggggcctagactgggggtcccggacccagccctccggactgggtgaggggcctagactgggggtcccggactcagccctccggactgggtgaggggcctagactgggggtcccggactcagccctcaggactgggtgaggggcctagactgggggtcctggactcagcccttgcctttggtcccctaggccctcatgaacggctccgagagcaggttcttcgtgagttcctcgcagggccggtcagagctacacattgagaacctgaacatggaggccgaccccggccagtaccggtgcaacggcaccagctccaagggctccgaccaggccatcatcacgctccgcgtgcgcagccacctggccgccctctggcccttcctgggcatcgtggctgaggtgctggtgctggtcaccatcatcttcatctacgagaagcgccggaagcccgaggacgtcctggatggtgagccgtctgccctcctgcccacatgccctgctctcggggtggcccagggccactcctggtccgtccctgccagccccaccgctgacccagagcttggaactgaggagccccaggcagggagttgatgggaccccgaaagaaagtgtgggatggagggtctagccccgggcagctgcggctcagtgggcagcgggaccccgggaggaggaggcggcacctccgccccacagcctcacccggcccttccctcccgctcacttggctgcaagccagtgtcctccgtggtgagccggcccttgctgctctgcatgatcaggctcgggaacctgaggtcagccatgctgtgctccggcagcccctgcctgcctcctcgcggagcccttctgccccttgggctgcgtgtgccggggcgaggcctgtgtggggcctgtgatggcagctcctggaaaacgctgtggggcaggggtgaggcccacgaggccatggggacagctcaccatggggagc
